United States Patent Application Publication US 2014/0057251 A1 - sequence listing, part 26

SEQ ID NO: 27160 - DNA, 5636 bp, Cannabis sativa
agggcacaaaacccaacagtattatcatcggtggtaatcataaggttgtgtttaatttttgggttcaacccatccaggtacttttctttcatgctgaagtcggttggcacaatttctgaggccaacctagcaaatcgatcaaactaagttgtgtatttcgtaacagtcatattctccttctgagtcagctgggtaaattctttcctattcacagttctgacaaccttgttataatactttgcattaaacaactcctggaacacttctcaggtaatggtagtaacatcccgagtcagggccaccatattccactaaaccatggcatcaacctagaattggaatgtggcacaagccactctgtcgttaccggtgacacccataaagttcaagatttgttgttaatataggtagtcccatacctacatagtctcagaatcatcacatgcgaccgtccttagacgatgtggaatcgcatagctccagtcttttccttgcggatcacagggctctaactgtcacaatttgactcatgcccccttttatcccattttctccctggtagtgattagattaacccacatagtcatcgccctcaagttacctaggatttcggataatactcataaattttcccacctttgttaatgctagatcacttctaaacaaaaaaagattttgttatttgaatcaattagatcgatacctccattagctactcatgtcctatattccacttgggaaaccaacaaatttaactcatattgtcatttctctaatctgtctactctctcagatgagctaccactaaataatatataggcacagtccattaagatttttgatgtctctaattgaatgtataatgtttaatatcaatatcaatcaaaatagcaaatataatatttcccataaaattctaacccgagtcgatcaaaggaccgatactcgagtccctttgagtcataaccaatacttgggcagaaagcacacattcttctccttaaacattagtctttcttaattgcgggcagtttctttttagatgactcactactccacaataaaaataagatttggctttacattggcctaaatggcatcctttgcatcttggacacttaggatagggtcaccatttcttgttctcaccttgaccgctatcctggtcatcctggaaccttttattctatcctataattagtggtttatttagcttttgcttcctgatcttctcataagttggttccatatgtttcaacacatccagtggcacaacaagaagtgtcgatattggtacaagaatagacacaagacaagcatgttgttctctcagatctcggatctattccccttgttgtctaatcatatcttgcatagcagcaattacttgttcccagtgttgaggcgataaaggattttctttcttaccatccatcccgagccaagatagctcgctaatcggattgtttgattgctttggttgcataatttatcacacttttaatccacatcttccaagcatttaaaactcagatagatatcaatattaatatgcgcataccatacacaaattcttatcataatcatcattatgctacttttcctaaaatattttataatagtctaggcaggtaattcaatagcaaataatataaacacttactataccatgagtcgacttgtcctcgcagcaaatgtatatattcgactagtcttcaggacccttaaaaccatggctgctctaataccaagttgtaacgccatatcccatagagacgcgtgtgtgtgattttataaactagtttaatactaataagttaattaattattaaaatatgtgataatattaaaaatttcaccaaaataaaattctaaaaacgaacatcataacgacactaaaactgtgttctgggtatccatgttgtaaaagatttacaaaaatgctaaatacgacaacacgtcaaaatactaaatcaaaatgcatggcagatacagcccaaaaaaaactcctgccaactcggcacgcaagctggtagggtcaatatgtacattgctggagaagattgtcacctcatggatgctctagcttttctttccctttacctacaccacatagcacccgtaagtcacaaggagtcatcaagaaaggtaataaaagacaatacatggaataactaattattaattttgctattatggaatgattgaataataacatttaaaaggggataacataaccagccatacgcatggaaataaaagcaatcatatattgtattgcctaatcaggcaattccatatcataatctggcatcatatatgatgtcgctgcatcaactaatcagatgagctcgtgccacaatctggcatcatatatgatgtcgctgcatcaactaatcagatgagctcgtgccacaatctggcaccaatctatcacttcgtctaaccagatgagcctgtaccacaacctagcaccaatatatcacatcggctaaccaggcgagctcgtgccatatccaggcaccaatgtatcgcttcatctaaccagatgagcctatgccacaacctggcaccaatatattacatcgcctaactaggcgagctcgtgccatatctaggcacctatatgtcactacttctcgtgcttaattaagatcaccgacaggaagaaacctaacaacggttttagtctgtgccatagcctggcacctatatgtcactgctgctcgtgcctaatatggatcgtcgataggaagaaacctaacaatggtttcggtctatgccatagcctggcactcacatgtcactactgcttgtacctaatcaggattgtcgacgggaagaaacctgacaacagtttcaatttatagtcatgactttataacggtttcctcacaggcacaacctgaataccgatatccacattgcctacccaggcaaattcatgccataacctggcattcataaatagcatcacctaatcagatgcgcttgtatatcacattgccttattaggaaatcccatgctatagtctggcatccatgtatcatatcacctaatcaggtgcgtttgtatattacattacctaaccaagcaatcaataattacgaaacttgtcataccatgtgttacattgtacttttcttacgtctgatccagattcatgcatgttagccaacccaagtagagaaacctccccgatgatctcggccctatgtcacaacaatggtaaaccaataagtgtttatcccataacactgctaaatatttgtaaaggataacatagggtttcttacaaaaccccgtagtacaattacactaaaattaaacttatattttggctctaaaacatacaccatgttgtacagctcgtcgcaagcttcaaaacagtatatagaacgtctaaaaaagacacccgagtaaaaagttatgataaaaatatgattctcaattttcccaaaatttccaaaaatggtaaacaggttgggaaatggttaaccgtttcccctcgaaccggttaaccggttgcaccaattggtggaccgatttggcagtaatatgggttaaaaatcccaaattttacactcactgaaacaccaccgaaacttatctaaatcattcaaaactttacagggcacatatatactatacataaaataatccttgtgtaacagaaattcaaaccaagcccttaaatgaaaaatgacattaacgtttggacttaagctataaaaatttcaaaactcaattgctaactcaaaatcatctcaaattcaacaagtaaacaatgaaatagttccatagctacccaagaacaattctatgaagtcaaaacttccataaccactctaaatcacaaagtcaatatataaaaccaattgtattaaccttaaaaaaattaatccttaccttaagctctccttcttcgatgatttactatctcgctactaccggagcttaaattactagatttcggattgaaaatcgaagaaaatagattaatggagagaagagtttcatcgcaccgaaagacagtatttcgtacagtttatgttttaaaaaaacttagtatgtatatattaatagataacgtttattaataataataatatgatattaataataataataataaaacttttattaataataattaatttactatttttggaccactaagaaatctttaatgttaggatatttggtcaaccttgagttctctaaaataccctaatatttctaaaattaacttatctcaataatcccagcaatattactaactattgttgtgatatttttggcctccaatcgagtctctagggttgtcaaacctgaaaatatttttttccacaaataaacgtatattatattcatatatttcaaataaatctccgtaattaacaaattacgtttatttatttacttatagtaaaattaataatttatgctaaattaggttagtaagatcgtaatcctacttattatcacctaattaattcatagtatataataaatcataattatttataattagattttcgggatattagagatggagagtagatattcatcaaacccatcttgtccttgagataagcaaactgtccagacattaagacctttgcaaatatttctgtaatttgttccttagttgaaatgtgtgatatcttgataatgccttgttgaatcttctccgtaatcaaatggcaatcaatctctatgtgttttgttctctcatgaaaacatgattggcaacaatgtgttgagctgtttttttgtcacaatgcataataacaggtcctttgtgctcaatgctcaattcatcaagcattgacaacaactaaatatttctaatgttgcattagtcattgctctattctcagcttcaactgagcatctagaaacagtatgttgtttctttcttttccatgaaatgagtgatctttcaagaaagatgtaaaagccatcagtagatctccttgtatcagggcatgctatccaatctaaattagcttaagcttctaaattgaccttggattgagcaagaaaaaatataccctgacttggtgtgcctttcacatactgtaacaccttttgagcagtaatgaaatgagatgtttttggtgtgtttaggaactggcttagtctgttgacaaaaaaggataagtcaagttgagttatggtaaggtatttgaattttccaataattttcgtgtaaagagtatactacaagaaaataggttttcagcaactaaattttttgtgacttaaatcaatttagtcactaatagttagcttttacgactaatatttagtcgcagacatatttagtcataaaacaatatttaaatgaaactaaaagaatcaacgactaatttttagtcactgtttgttatttttaatgactaaaattgtacttagtcactgaaactttggcgccaaattaatagttgtggccggagcactaaatgttggtgactaaaataatttagtcactaaaaattctcaatttgtgacaaaatgtttggtcggtaaatattaaagagtttcaatgacgaaaatattagtcctaacaaatttatacttacatttactattaatggtttatatataccaactaattatttagttacga

SEQ ID NO: 27161 - DNA, 5816 bp, Cannabis sativa
  modified_base (5671)..(5678): a, c, t, g, unknown or other
  modified_base (5769)..(5769): a, c, t, g, unknown or other
gggcccgattcctatgtaaaaaaatagaatttgatatggcccgatgggtccgatggtgggcccgatgcctgtgtaaaaaaatagaatttgatttggcccgatgggccggatagtgggcccgatggctcgacagtgtagtgaaataaaagagagaagaagagagaggggggtgatgatgtaaatggagagaatattgtaggaatattataaaatgtgtcatattccacaaatatcaaatattatgagtttagaggaaaaaaatatatataagcataaaaaatcaacttccccttctaaaatacatagcaactctcttaaatttgacagaaacatatagcttcctaacataattcatccaaattttgcatcaaactgtaatgttttaatttgtgtgtgtcgttagaagattttatattatgtattagtttaattttattttatattatatttgtgacttataatttagcgcactaacaaacacattggtacaaacttatacatataaaaatgataataatgctaataatacaaaattgggtcggtacaggtttctgattattctattaattaagatacgttaagtaagacaccaatcctttctcctattttttcccccacctatgtagacgtggttgacgttgattagtctttctgcttaatcaaatgtgaataataaataatcactaattaattattccgccacttaaataatatatcatgtattgtaaggttaaattaaatgttatttatatgaaaagaattatataattaaataataataagaataatgttatttgtgtgggaggaagcgggtgggggtggtgagctgccaccgattgaaatattgaagcattgcaagaaaggtgtttggatgagtgacacgtggagtgcaaggttgacagacacgttagtaggttagtttcaaagtcatagggccgaagagggcgccactaatgcctcctttggtctctttaatctcatttgggaatttcaaattcaattaaacaattcatgttttctgtcccttaatcacattacgtggcatctgatatttattcttccctatgtaggacccatttctaatcgccaaattatatcttaattaatcagatattaccaaagttggtcagatttttataaattattctgcacattattttatacttttatcttcccacaatagaatcttttaacttgcaaacaatctataacctcatattttgtctacgtttatttatttatgaatttaatcttttatttgagcaatgctatgaatccaaaagatgattttttttttcttttaatgtatcttaatattaagatttaccaaaaaaaaaaaagcaaaatgaattaatttttttttataagtaaatgaattaatatttgtattgttatatttaggtgttatttgatttattgtgatgattacaagatttaatttgttgttggaataaatattaaaataagtgataaattcataaaattgttcttattttattttttaaatttgtgtaaaggaaggtattaaagtcattttagttttactttatttagttatttgtgatgtaaccttataattagggagctccagttgcttcaatccaaagaggcccatgaatcggatgtggtggcggaggccactcttctaaaaaatttaggagaattgtggaaaagaaaggaatcaatgtggaaacagaggtctcgagaggtttggttgtcgcagggcgatcgaaattcctctttctttcatgcttctactatggttcggaggaagaggaaccacatatggaatttaaaagattcaaatggcagtttggtatcgaatgagagggagattggttttatactcaatgactatttcaagagccttttctcttccaggggctctgtttcttacgatggaatggaaattctgcttcatgattcggtctttcattctgagaacatgaatctaattgcagtcccggagatggaggagatccaagctcatgtcttccaaatgcatcccctcaaagccccgggaccggacggactctcaggatgtttcttccgtagatgttggagtgttgtgggggctgatgtcaccaaatgcatccagcagtttttcacttcgggggtgcttgaatcgggtctcaatcatacgcacatctgcctcattccaaaaggaatcaatcctgacagcgtggatcgattcagaccgatagcattatgcaacttcacttacaagataatctctagaatcattgctcaaaggatgcggactattcttgatcgtattatcgctcccactcagtcggcctttctccctggaagatggattgcggagtcctcgatccttactcaacagatcatgagtgttatcaagaagaaatctgggacaggcggcttaatggcaatcaaaatggatttgaacaaagcgtatgaccggctcgaatggaattttctcaaagaagttctggtgagattcggatttcactcacactttgtcaaaatcatcatgagttgcgttaccacggtttcttactccattcttcttaacggaagacctctcaagaaattcttccccagaagaggaattcgccaaggagatcccctctctccttatctcttcattttgtgcaacgaagtcttctcgcggctgttaactaatgaacaaaacaaggggctgttacatggtattcgggtagcccgcaatggtcctgtgatttctcaccttatgttcgcggatgataccatcatcttcttaagagccaacctcaatgaactggatactcttaatagatgtataatacagtacgaggattggtctgggcaattatgcagcaagcaaaaatcgggtgtttgtttttccagaaattgttctcggagtctaagagagtcaattgaaaatggcctcaatattgggagtgttcgaagtgatgagaagcacctaggcaaccccttccttttcagtcgaagtaaaagaaaggacttcaactttcttaagaccaggctttatgaaaggttggaagggtggagacttaaaaccctttcaaagtctgggcgtgctgtttatgtgaactcggtggctttggccttaccatcgtactctatgtccacttttcaaatccctacctcttcttgtagagatcttgatgctattgtgagaagattctggtggaacggatcccccgagagcaagaggttttgggctgctatttcctggaattctttgtgtcaaccgaagtagcgtgggggcctgggatttcgtagatttgaagacattaatcatgcccttctttccaaacttgcttggcagttagcaagcaatttggacaaaccgtggtgtcactcgtttaaagtgaaatattttcccagggagtctttttggagtatacaggagaaaagtagtgatagctatgtgtggaaaggtattcttggtgccaggaacattattgcaaaaggggcatgttctataattgcgacgggagagagtattgacatttggtggcagccatggatcccttggcttgaatatgaccaatttcgagaaattatggagggaatcaggtgtaaggccccgagtctcaaatgtgttgctgatctgttgtaccgccaaaccaagagttggaacattggttatatgcatttcttatttggggaggaactggggaatcgaattgctgagattcaaattgtaaagaataatgctgatgacatgctcatctggaaagactcttcggttgggaaattcagtgtcaaaggtgcgtattgggctgaccaaaaggatcgatttggcgaatgtttgccgctttggaaatggatttgggagaagaatatccatccgaggctgggaatgatgatttggcgggcttgcatgaaaattctccccacgggggataagtttggctcttctagtaactgttttgtgtgcctcacgaaccatgaaactccccttcatctttttgctcggtgcaaccttgcttctgctctgtggttctcaggccccattcctatgagaatcgatcgtattcccggtgatgatctttgtgctctgttatgcaacctggtgtcatctctggatcccatgatgagagcgagaatgcttgtctatgcttgggtgattatggaatgtatctggaaacataggaaccaaattgtccactctaatggtgtccatcaatgtgttgactccattcgtctgaatgtttgtagaagatttgctgaatttgacccggcggttgatcaggtggagcagcctcccctgttgcgtcttcttgttgaatcgtctcgtgtcgctacggacaagtgcattcttgtggatggatcttacttgaaaggaaaatacggatgtgcgatgatctccatatcaaagaactcccaggattggtggataagtgcctctgctgggtcttgtcaatcggccttggaagctgagatgtttgcggttatgttgggcctgcaatgggcgatcaaaaaccagtgggatgacttctcaatcttgactgattctcgcgttttggtggaggctttggccgcgaaacaaccccctcactggaaggctgctgccttattctctaacattttgcatttgctttcttttttttctacttgtcatgtactgtttgctaaaagaactgctttaagttttgttgactctatggctaagtccatgcgactttgtgaaggttgctggcaggatgtaaaaggggagggattaccccctgtgaatcccgatcttttctgggttgtttaatagaacggaggttcttttaaaaaaaaaaccttataattagggttgttcattgcatcacatctaatatttttaaggctatttagatcaaatccaattatatattggatgttgaattttagcatccgatctgatctaattcatttcaatcacccaatcgatccaacattcattgaatgttgaattaaatcggtttcatttcatctattagatatatttcatgtatatttattggattaattcaagtttatctaatattttacacctaatatttatggatcgaattagattcatccaataatttagatctagtatttattggattgaattggataaatctaatccaaaaataaaaagtaaaattttaatgttaattttcatatatatacatatattttttttttacgtataataacataaaattaaattactcatttaaactaaataaaaatattaattagttcgattagatgtttgatgtattgaattttggatatctcatcgaaaacttgacgcaatccaatttgatattaaaaaagataacatctaatccgatcagatcataattaaacatccaatatttggtggtcgattataattagattggtcgattgtcattgaattagattgatacacacccataacataactttttgaatctaacaaggattcccttatataatgaaatcatcattatattataattccattacatcactttttaaagcaaaccaaatattgtaatgataattatgattttattatgattaccattataataaactaaacatgatttgtgtattaaaattataatataatgaagattacattatataagtaaatctccattatattaaaaaaaaaaaaaaacttatgtaataaagataacattacgaaaaattaaggtgccgttttgtaacacttttgttttttaatttnnnnnnnncaaaatgaaagtaaaatttttatttttaaaaaatttattttcaaaaaataaaaatacgttttgtacccacttttgtttttcaattttaaanacagaaaataaaagtgtgttctgtaaagttcatttttatttttattt

SEQ ID NO: 27162 - DNA, 1376 bp, Cannabis sativa
aggaagtgtgcgagtgagaacaaagcacgttgaaaacactcgtgttgccctgtagggccagttgttagtccatgaagcagcaagagtggcgtacttgagtatcagagccatcatttcatgggtgtaagagtccaatggaggcttgaagtgaggacgttacatcagtaggggagaccctttgaagaccgtgaagccaagtcgtgaactccgcaagggtgattccatttcattgtatttgtttattttagtcaatgaggtttctctagaatgcttttgaatgctgagatgaatggtagctttttggggttcaaagtgaattggcagtgccctcctatttcacatattatgttcgctgatgacactatgattttttgtggagttaatgagggtaatgcagttacagtgaagactatcttggatacatatcatttgtggtcgagtcaaattattaacaagtgaaagactaagggtactctttatgtcttgcaagatgatgtcattgctatcctgggctatggtgagttgattggtaggggtaaattcctcgaaaatcattttttcctatcaaatagtaaggtggttgatttttgttttgttgtggacaaggttaaacaacgaattcaaagcttgagttgcaagcttcttttccaagcagatcgagctaccttaatctgtagtgtggtgcaacctttcctatttatttgatgtcatcatttctcttgcctaaagctatctatgaggatattaacaaggtaacccgtaaattttgatgggggggctcaaaggagaaacaacattttttggccctcgactgttgggataacctttgtaaggcaaaggattgtgagggttttggtttctggtgctgtggagatttcaataaggcccttatgtcgaagcttgactggattttaatgtttggatttgaggctctttgatgtaaaatctttaagggtaagaccatctccaatggaagatctaaaatttgtgaatttagcacaaaaaatgagtgtatgctatatttgacccactatttacaattgtgctccaatacacaagatgtaaaatataaaaaaagtaattgattatattgatggtcatttaatattttattgagaatgtagaaaaatattattttttttttattcttttattatttaaataatgataatatggtaaataaagaatgtaaagtttagtaaaggtcaatgaatcgtaataattagttgtaagccttctccctcttttattagttgtaattttatcaatgttagtaggtcctgtaattttgttgcctacaacgtggctaagtgggcttttactcaccatttgaacgactctattttagtttattccttaccggaaaacttattttg

SEQ ID NO: 27163 - DNA, 1898 bp, Cannabis sativa
ttttcgagaaaattcttttattaggaaagattgcactataattgaaaaaatactgtagcgtgccttagcattagggcgttacaataaatacccaacaaatcctttagattaagggttgaagtctcttacaatacttgcttaggcataaacaaagaacttatactcattgtattctcaaaggcttttctagctatacacataataatattgactcgtggactaagccttcttaacaccccaaccacgtaaaaatcctatgtttgctctatttctttctttgaagtatttatttcttcagttctaatttcttataattcattttcagagaatttcggtaaacattttggtgctttcattgagagctgaagaaagtagtgataccatctcaagattacattcaataatcatggtactcacccaaaataaatatggtcttcactttacttatcctaatgtaaaagctagggatacagaagatccaaacaagatgactagtcgccacaagaaccaacgtggtatagactagaaccgtgatgatcccataatcgaagatgaggaatcaagggagaatagttctaatgatgttgaagatgatccccaagacacactgaaagatgatcaccaagacatgcatgctgacagtggtgctggaaagaaggacaatcatgacgattcaaaccctcattatggccaaaaagttagaattaactgaaaacaagttgactcggcaagatcaatttaatgtgataatgctcaataaaatgacaagaatggaagttgtgatgatagccttaaatgctggaaaaaaattaaacaaaaaattccaacagatgatgccacctaaaaagatgatcctaaagatcctagaacctttaatcctcataaggacaaagagaaagggaaaatacgtgaaacttcaaagaaagattctcaggccaaacaacaaaagaaatctaaaattgttagccaacctcaatagaaaaagaaaggaaaccatgttttagggcaaggtgaccagactaattttggaggcagagctgcataaaaagataagtttaatgctagaatcaagaagcctacttcccgaaaggacaagagtcgctgtaatgattctagttgtcaaattgataatgttgacgagttgcatctagtttcagacaacaacagtggaagtctctccacaaatgaccttcgaagaaggttaaatgaaaagaaagaaaaggctagaacaaaaatagccaaacctcgtggggatgatttgaggaatcatatcaatgatcgagttcacaaaacggagtcttcaaatgataaaactcagtgtttagaacgcaaagtcaaagagtaacgaagcttatgaagaagatttcctgaaggcaaaatggaatcatgtctgatttagaagaagaaggcaacataaaccacatgtgtgaagagagaattatagagatgcaccgctgccaggagcactttagaatgcctcaaatggaattgtatgaaggtatcatggatcatagggaccacttgtacaatttcatgatgcaagttactgaggctagtgatgatgtaaagtgtcttagctattcattgactttgaccaaatccgcataagactggtggaagaggctatctccaggatcattccacaactggagggacttgcaagcagtgttcaaaaaccaattcgtgctagcaaaggactttgatctagaagctaattccttgtctagtgttaaacaaaaaccaagagaaagcctaagaaaatacattcagcgtatgatggacgttactgcaaatacaaatgttacttattatgaagatggttactttgacatcaaggttaaccacaagatctttgctatgaagaaaactttaacgcaggagagcagaaactttgatag

SEQ ID NO: 27164 - DNA, 2792 bp, Cannabis sativa
tctcaattccaataatcaatagaacaacatcaaatttcaagttctcaaaatctataaaaataaattaaaaaaaaaaacagatctcataaacaaactcaaacggtagaatttcagtaaaatacgaaaattcaaacattaaaaatacacacaataaaatttgaacctagaacttaacacacacatctgaataaaaattacaccataaatgaatcaaatccaaactcaaatatgtcttcttcttattcttttgcttggtctccgttcaagaccattaaattgggtaccaataaaattataaaactgttaagtttagaaatttgaggatttatgctactatttttcgaattccgctatttatgagcaataaatataatattttaagtatttatgttacaatttttctaataataaatctaaaattttaatataattttactaaaaattattattaattaaaatatataatttaaaatattttatacattcgccgagaagtgcgggatgcttactagtttagtgtatacttcacctctaatgttgcagcaatttgaacattattttgaacctttttcttttattatattttataatattatatatatttaataattttctatatttgcttctacaattatcttagaaaatagagtactgatatatttttatttattttggtatttaaaaataattttttttttcacgcttgtgtattgtaattatttaaaatatctttgtaaattttaaataattcaaaaaattatataccaaaaatatagtttaaacagtctattatacacataataacgtgtgacatagattgtttgaatattagtttttatattgtattttattaaaaataatataataataaagaatattatttttaaagaaatttttgacaccaaaattaatattgatgtagcactaaatttagtattaagctcaaaccaaatacaaacaatatgagggttctgatattatttgtgattgccaagtgttaattaagaaaataattaaaagcaaatggagggataaatcatgtctttcaggtctagttcagaagctagattcctttttgtcttgttttcttaatgtctccatgactccatgtactatgtccctaacaattctaatgttttggctcctaatgttacgttaggaaccgataaataaatggtttatcttaatgttacatattattcaaaccaaaaaaatatgaggttatgatatatttcccttttccagcgtgaatatcaggatttttaaatatcaattatatttaaaaaagaaaaaagaggtgggcttatttggaatatgtcaaaatcaatccaacccccctctcctacaacctcatgaatataagatagtggattcttttagtcatggatctttctttcttttctttaatgtctttatgttacagtacctttcttctttataatccatttaattaatttcctatggaaaaaaaaaaaaacaaaacaaagaaagaaagtcttgtaacgcctaaatatgttatacgtttcaacttttttcttttctttttaattatatgttctcactttgtctctcctcctttctcttcattttcctattgaatgaaacaaagtagtctctgatttgataatttgttttcatcttctttttcacatgttctaaaagataatgattgaataaaaacaatcagttacgtatttatttgaagaaattctacaaaacaaaactgattatattcactaattaaaattttcttgtgaaaatttctctaattctttgttttcttaaaataaataattatggtagaagagtggaaaacattacttcaaaataagatttctatatcatccgaactatgattcttttataattttgtcccgtatatttttttaattttttttttttcaaaaactataaaaattattacaaatatctcttaatcaattacattatatttaacactattgtaacactaattagatgtaattcaagagttagagacaaaatatacatgcataaatatgtatttaataaaaaatagtaaattgcgacattactcttaatatttttattttgttagcaattaatttctaaaatctaaattttgatagcaaaacctctaaaattggcattttgttagcgttagctaattctatctatttttggcagttacttgtcatattgggctattctcgtgtacataaaatttgtctacgtggacatagttacacaagacacaatttaattgtctactataaaaagaatatttaaaaataaaatcaaatttaaaaaaaaaacatgttaacgtaaatttttgttaaccaaatatataacttttttagtaataaatttactacagaatttaataataataataacatcaggtattttacgtagttttgtagtaagaatttacatactccacgtcaaatacctagtgttattattattattaaattctgcagtaaatttattactaaaaaggttatatatttggttaacaaaaatctgtgttaacagtttagtgctttcattgagagccttggtgatgaaaactcaaaaaaaaatcctcattataagcacaaatacaaatccatattaatggctaataacattcctcaggaaggtcatcgtctagaggaaacgatccatcgtcctggcaaaaaacctatgggatctcaaagaaccaacccatctgaaacaccacgttcaggaaggaacgatggtaatgctactggtgatcaaattctagaatgaaggaatatgaagatgcatatgatcctaccagatatgta

SEQ ID NO: 27165 - DNA, 7001 bp, Cannabis sativa
atagtattacagacattgagagatcatcgattatatgctaagaaagagaagtgtgaattttggatgactgaagtcaaattcatgggccatataatttctctagctggtatcactgttgatcctgcaaagatagactctattctacagtgggaaagaccaaagaatgtcactgaagttcaaagttttcttgggttagtaggctactatcgtcgctttctagagaatttctctcaaattgttatgcctttgacaaagttaacaagaaaagaaagttaatgtgggatgatagttgtgaagaagctttcaaagaattgaaggaaagattaacttcggcgcctgttctcactgttcctaatagcgaggaaccatatacggtatttactgatgcttcaagtactaatttagggggtgtcctcatgcaaaattaaaaggtggttgcctatgcttctcgacaattgaaaccacatgagaagaattaccctacgcatgacttgataattttgatatgttatttgtatggtgtaaagtttgagttatactcatatcataagagcttgaagaatctgtttactcaaagggacttgaacttgaggcaaggaagatgggttgagtatatagaagactatgatttcacttttcagtatcacctcgggaaagctaatgtagtagctgatgcactaagtagaaagtctcatggtactttggcatgtttggctcttgaggactggaaaagaacaatcacaatgggtgattataacttgtaatactatgaaggggaagaagtagcctgtatctctaacatagtggctacaccagtgctacttcaacaagttaagcaacgtcagtggcaagatgaaaagctaagacttatttagaaccgaatccaggatggtgagcaactagatgggtggacagttaatagtgaaggatacctataccatacgggaaggctagttgttacatatatccttgatcttaaggagtccattttgattgaggccagtagatccaaatttgatgtacatcctgaaagtactagaatgtatgtgaatgtgaatgcaataatgtattatatatgttgatataaagacttatggggttaaggcataactagattagactcggtattcaaaacagaggtaaacaattctaaagccttattgtaaatagacgtgagaacgtaacacgtaggtctatgtcaaatgaactatagatgcagtggcgtcaatacttaagtgattataattgttggatatactattttgctgggcattggctcacgggtgctctattgtgtaggaaagggtaagtcggtagttgagtagccatgagattgaggggttttgctgtacattgtacatgttcaagctaagctagatcacgagggttgggtctgccagaattgttgtaatctctacttttgtcgcttaggccggcgtgtattaatgacttgtaatatcttgcaaatgttttacgggatccccgcatcaaatatactctttttggatttatcttaaagtttaattattacaagttattattttatcatgtattttaatgtttaatttttcgctcctggctctattatatcccaaattagcaggattagtttatgtttagtctcattacgtgacgttccttatgttaggacgttacaattcggtattagagcgccaaggtttttacacttcatgtagatcgaccgaacatgtacaatcatcgccgaagacaagctcgactcgtggtgcagtaagtattgagagtaaatgcttaactgcttctgtgattaaatgtttactgctttttgtcataggcagcatacaagcatctagaagatataatgttataagaaaagcataattattaatcatgtgtataattgtttataaaaaaaaatagtatgtatgagttagggttaaggcaataagtatgtaagtgtggatttggtgcctaactcatcgcagttgttgattttaaggctatttgagagaaaatggaccctgatcaatcaaccagaccacatggtggtagtgtaagtaaggggaccaacggtggcaacccagatcaaaagcaaaaggctaaagcttccaaaatactgggaaataataagaagttttgtggaaatagaggtagtcatcaaggtcgcaagtcttcatttaagacttacccagagtgtcctaaatgtaaaaagtaccatcagggtgagtgtcgagccaaaacatgttttcagtgtggtatggtgggccaggatccaagaaagaagaaccaaagaagaacaacaacccaaatccaggacgcttgtgcaccaagactcaggctgacgctgatactagtccatcaatggtgacaagttagttttctattaacgattgtttttattcagtattatttgatttgagaactactcattcctatgtatcaagtagagtaatagataattttcataaaccactcaacatgtatgctttggggtttggggccctattaccctcaggacacctaatcatatctactcagtggattaggtctttgtctttttggattgacaattgtgagttaaccgccaacctgattgagttacaactatgtgactttgacataatcctgggtatggatttcttatataagtacagagaaaatgatagactgtagacggaaaatagtagtttttaaggcagaaagtgccaactcgcctttgtttgtgggtttagtacaaggatctcgagtgcccagaatttcagctttgaaagctgaagatttattaggaaaggttgtttacggtttcttgtaacagttgaagaaaccgaaagggatacagttgttggacctgataatacaagactcgtttgtgagtttttggatgtgtttccagagaatttgcctggattaccaccttctcgagagattatatttgttatagaattagttctgggagcaaaactagtatcaaaagcaccttatcgaatggctccagcggagttaagggaattaaagattcaacttcaagaattagttaacttgggattatcatattgagtttttctccttggggtgctctagtgttatttgtgaaaaagaaagatgagtcgcttcgcatgtgcatagattattgggaattgaacaagcttaccattaagaacaagtatcccttacctagaattgatgacatgttcgatcaattgaagggtaagactatcttctcgaagattgacctacaattgggatatcatcagctgaaaatctgagaagaggacatttcgaaaactacttttcaaacaagatatgggcactatgaatttctagtgatgtcttttggactcactaatgcttcggtgacatttatggacttgatgaattaggtattcaaggactatttggatatgtttgttattgcattcattgatgacatattggtgtactcagaatcaaaagccaagcttgacctacatctccaatttgtactttagtggctacgggatcacaagctctatgataaattcaagaagtgtgagttatggctatcgcatgtttctttcttagggcacatagtggacaaggatgggatcatggttgatccagccaaaattgaagttgttcgagattggccaacaccaaaatcaacaacgcaggttaggagctttttgggtttaactggttattattgtcggtttgttgaaggtttctcaaagattgcgacacctttaataaaattgactcaaaagaatttgaattttaattggacgaatcggtgcgagaaaagtttctaagagttaaagcagcatttaattactgctccaatattaactcttccttctgacaaggaaagttttgttacctattgtaatgcctcaagacaaggtctatagcctgtgtacttatgcaagctggaaaggtagtagcttatacttctcgacaattaaaagagtacgagcagagatactctactcacgatctagaacttgcaacagtaaaatttacgctaaaaatttggcgacattacttatatggcgaaaaatgtaagatttacaccgaccacaaaagtctaaaatactttttcacccaaaaagacctagtcactagcttcatgcaaaagagaagctatagtaatattttgacactaatattctaatatattttaaaataagaataaagaaaaagataaaatatgaaaaattagttttttatttacaaaagtatgggatgtgaaaaacctacaaaaaagtaaataaaacacaaaagccataaactaaaaacattattttattatgccattaataagtcaacaacaaaaaaaaataccatatttcatgtcatttctacaatgagcttctataattaggcctaaacacatttacaactagaatgaactctctatactacgacactagttgctgaatcttcgcttatctcacatatatattgactaacattgagagtttttatatgtaatttctctggtcgaaaatgaaatcaatcacttatcgaaattgtctaaatccttaaacatatacatggcgatgataataaactttttaagtacaatttagcaaattaaatacatagcggaacctaaagcaaaacatagatacgttaaaaggaacaaagtgagaaatatttacagtagaaatcctcaaaaagaatatctacaaaagagtacaaatctaagcttcggacactgaatacaaaattcatccacgtgtatcttcatttttaatgctgcctggaggaacggaagcaacagcagctctagatctactgttaagatatcaaacctgaagtcttccaaaatccaaatgctaaaaatgttcattcatcctcagatccagatgataaattgtatgtgcgcgtaatacgaatctggaaaatagattagataagattgctggataaaccagattgcattattttgttgatctttattttgatttttattgtactttccgtctgcatgttaatgttcaaaaagttatcagattcaatcatgacccatgacatgattattctagctttgtaagtgcctataacatagatatgtaaaattcatgtatgaaacgaacaaaaacatgacagcaactccatcctaatgaataaggagtctcctaataaaggcagacaaatgtgtaacaatgatgagtgaaaaaagtagttacaaagcatgaaatgatgtaaatacctgggcaaaagcataaattgctcgtatgattctagcataatccgttcccagcatttgaatgacaacatcggcgagaaatgttccccaaagcctgcaagcatccagacataagtaaaatcaaatggccaggtagtcaaacatttaaaaacaacaagtgaaacacagaagaccaatttcagtaagtaactgcctgaagcataacatatatttgaggacgaaaaaaattaaagcagcaaaccagcattcagactttgaagatgcagtctaacaaaatagcctagttttgacataaaaatccctttttatgaagagagaaaaaagggactgtaaaataagcaaagatactgtagaaaagtatcttgcaagccacttttgcttaaagcgaaccaaaatatccagcaacaaaataagatagatttctaagcaagaacaaacgtagtaataataatgttgagatgatttagaactctataatttcatatctttatcattccacatcatatacatgaatatgtaacatgatcaacatataccacctatctaagaattttaaaggtagtatgaagtacctagttgaatagtctaaatcaaaacacaaaattaattgtgattctatctaaattcagatgcaaacaagtagaatttctaatgaagtaaaaatcacaatttttcagagttccactactaaaaggcatttctcaaattaaatatttgaaaataacaataataattactctacacaaatataaatctactatgttgtccaagagagcatcttgaaggatgtctattactcttagataattttcccaatgatatcaaccatcaaccgaacaagacaagaacatttggaaaattaagtgagcataataagctgttcagaagatgcagaacagaagagtcaatacattgggccaagtaaagtcatcatgcttctgagacctacgtatcttgatgcagcaccggcaaaaccctgtcaaaaactacccacagtgagaacttgtcaatgaaatttttccataagaggatgttaacatgcttgtgctaattcatgataataaatttacttgatatattatactgtaaagcattggacacttgaagcttgacaattcaaaattatagtgtaaatataaaatgctggataactatataaataaaaagcgcagatgttataacgtaaatatatatttatatacattctcaacaataaaaaattatatacattaacaaagaaaagagaagaaataatgaaatagaatccaaccgcagagaaataaaagaaaaaaacatttccaacccaacatgactccattggtactagtacagcttcctttctccattagcagtttattttggttctcaagttgcttggacatatacatgggaagctacttcttgttcttgtcaaacaggtttctgccatgaaaactcagctttcagacctgctgatgggacaattatgggactctaatttacttcctaaagttgcttgtatttctagctcaaaggttgggcagatgggtatgtgtaagtgatatgtattcaggcccccaataaaagaaaaaagaaaaagacagaaaagaattagcttgaattttttcatgttagatgtcggggtaattgcacagtagatggaagtttttgagtcaaagcttcccatggacaccaaaaagagggcttcagtttgtatctcaatatataagcgcctacaaagcaaaaggttgtctacagtgactctgataggaatttcctatcaaataactaagaacagcaagaacagtagacagaaataggaaaaacatagaaaaatattgtattggatgcc

SEQ ID NO: 27166 - DNA, 3078 bp, Cannabis sativa
tactttgttttggacatgatcacaaaataactaagggacctacgcggctgtcacctcccccaatccaatactcagaatcacgtgcatagaagagacaagaggaggtgagcaacctgagaaagctacaaacatattctagtcagcaatactcgagggtaccttctaggtaaatcacaatgagcaaggttgaatatcaaccaagtaccatcttaagtacacttacttagacatataatgagtcataaattatatagttgactataatggattttctaccaagtctcatacagagttcctaaggggaaccacgcataagaccacagttgtatatgcctccaaggccatcacaagaccctaggcgaggtcaatagaggacaaaaactggttgcatgcttggaaccttggccttggttagccagggttcctaagccttagaggtcggccaggtcccatgacctagcctaggactagccagaaacccaatttttaggcatacgccagccagcctatggggtatactcccttggccggccagaccccatggtggccatccttggccgactaagtcttaaaaaagatctgcttggctaggcaagatctgtatagatctgaatatgtgttttttcaagaactcaaacacgttatttgtgttctttgtgacacaaagatccaagaatcacaacgaaggtcagattcaaatcttttttgtctagaaatcacacattatgtatcctaaggctatcatgcggatcaaaataccaaaaggacaacaatctaatgtgggaatcaaaagacattcaaagcaaagaaaaatattcatgcattcatggcaaaatcaagtgaaatagcgagaatagaaagtttgcccataacaagaaactgttgatgaagaagatgggaagcttggattgtcaaaacgacgcaaaaatcctgggagaatgatgctatgtggattcggccctctagagagaaggaggagcttcttaaaaagttaatttctagtgagaaagtgaaaagtaaaaaatgaaaagggtttcccgctaaaagcccttaaatagtatctgtgggaccaatccttcacttgctccacatacacaacaaagagacatagaaaagcagttagtttacagcagcaaatgagatcagacagtcaagttaaagtattttgaaaggctaaaaatgcagcaacttccattcaacaaatgctacatcagttctaactactctaacctaactggtaagtccctatccgtacagtttgtacgcacagggactttaggggtaaatgttatcccaattttttctcacctgacatgacattgcttacgtggacacaatcagtgttatgtggaaatacaactcaccaataagaaggtcaagtaccacctcagccaatagggaccctagcactcaaatgggacaacaagtgacaaaccaactgcctcaaaggagctggtcggccacccttggccgatcctatagctggtcagcctttggacagcacaaggctaaccagcctgcttcttgcaagtgcctggctggtcaagaaaggacccgacaagatcctctacacagttttacatgtggactgcgagttagactgcgaatcgggccctaacaatccaataaagtagctagaaaatatatatgtttaagggctttttagtcttttgaaattaattaatttaatatacaaatatctaatgatttcaattgtaaattagggtttaggctctcctatataaagggcattaactctaacctagaaaacttaagtctaactctagcctccaagtcattaaaagctagaaactcattctaagcctaaatctctaagtttgatatctctctcttcctctctctcatctacatgcccatacaagtattctcaacacttgagatttgctatctttgattcctactttatatccttaagggagctatatcagatcccatctatggtgatctgaatagtattatcccttggtatcaatacaactaaaaggcgagtaagtcattacccgctaactaagagggtcgaacctttataaaagtctttatgttctttactttcaagttctaattgcataacatgtagcaaacatcagattcatacgacctcgctgtcaattggccactttttgaggtcaaaaatgtatattatagaatcatgtatcattataaaggttttatatataaaggttaggatcgatagaattttcttgtatttattttaaattatttagaggattatgtagctaagttgagatttttatagtttttttttttttttaattttagttaggatacgactatatatatagatgttgaagtgagataattaaggagagaataaaataaatttacgtaaagtagtttagatataaatattttagattatatatgattatttttaattgattaattaatcaattaaaaaatttagagaattaagaaaaatgaagaaaaataattttcaaacaatttaaaaattgtatgtatattgattgatatattaatatattaatattgatattagataatgtttcgtgcaagacacgaatatttagtttacaggttatatatttttctttttaaatattacaaatatataagttaaaatgaaaggtcgcaacacaatttacacgtcaaagtatattaaggctactatgtacgataaaatactaatatcattttgtacttattattattatttggatcataaactaatccaccttttaatggtagaaaatcttcaactgttgactaaatttattttaataatatcaacttaaagaaaaatttattttaactaaatttgaaaaacaatattatttgaattagtttaaattaaataattaatttattaaagagtaaggtaacaaccccaaactgaaatcgaattaaaatattaattttatataatttatattgtaaagacgagaaaagttaaataaaataatattaatatttagatatttataaaataaacagtactaacaacacctgttaaatttaacagaatattcttttatttttaaagtatattctgttaattaaatagatattttttatata

SEQ ID NO: 27167 - DNA, 5295 bp, Cannabis sativa
aaccacaaaaatcgaatttttggccgctaaactacttaaaccctaattctgtttagctctgcacacctccgtccaaaaattacagttaagtgtcatggtagactgtccatgtgtacatatgtgtacacatgacaaaattttagtggtccacataattttaattattaaacattatgaaaagcacaactgtcactttggtgacctggcgtatgagaaaagtcgacgtccgcgaacacccatgagagtcgatatccgccttaggttcctgtagtgcgcatttggggagccatttgaaacgaaccttcctattagacctttttgggtcgaggagagacatttcttatcccgctcttgggaagcaaattctgccgtaagtaggctttcgcatatttcattttttgcatcttttaaaggactttaattcacggaagattaattgagccttttccattaaatgcaacgtgtcttgtcttgcataaaacacagataacatttactctctaagctttcgagacgcaacgcgatctgagagcttgcagcccttcttagcttttttgtgataaacccctgacacgtggggctatctgagatcgcttcatattcctgaagttgtcgtcataaatacataagtttaactctcggttgcaaataaatacataagtttaatttttggcggtaataatactaagatatatttttaaaactccgtaggcacatagccgttaaatgtcaaattattattcacgtgtcattttcttattggtatatttattggtatatttaaactcatttttaaactcattttttaaaaaaaaaaaaaaaaattaataacagagattaatcatggattaccacgtgacaatttattactgccaaaaattaaacttagatatctatttgtaactgaaagttaaacttaagtatttataccgtaaattactctcttttttaactatctatttaatattttatttatatttatttatttttatcaaaacctctttccttctatcttttgatctttggactttcactgtaattgtggagaagaattactcgtcataagatgtcacaattaggagtgttcataaaatacttaagagcaactccaacgttgcactaaaattaagatttggtgtatataatctatccaatatagcaacaaacttcacagcatatatgtcgtgtggctacaggtcacaacatatatgtcatggcactatagctacaacattctcttttttaattattattatttgatttatatttatagatattgatattattatttgtatttaaagattaaaaatgttacttttacgatgtactctcttaaaataaatccatctatgcacccttatttgttgcatctctaaaaaaaattaccttaatttttgtatgtccatctacattatagctatttaagacaattaataaaattttgagaaatttaaaaaaatttaacacgctgaaaacaggattcaaacagtctgttgcacgcaaaactcttttattttatacatgcgcgaaatagactgtttgaatcctattttcaaagtgtaaaattttttattgaatttttcaaaattttgcaggatgtcctaaataactacaacgcagacggccatgaaaaaaattggactaaaaaattttcttgtatgctgaaatagataggggtgcatcagtggacccctaatgcattgtagaattttaatctatttttttcatggtcatgtatattataattatgagtttttggcgactaaactctctcagctatcgtttaacttttatttaaccctccaagctcaacttttgacgataaaaccctccaaactattcaaccagtagcaaatttaaattgtcatccggttaattgccaccatgaactgcttatgtgcatactcttgtacacgtgacacgtttatattggtatatcaaatattattatttaaaaattattttcaaaattcatttaaaattaaatgaaattataaaaataaaaaataaatatttaaaaaataaaaaatattgtaaaatttgaaatattttttatatttttaaatgataatattaggtacaccaatataaacgtgtcatgtgtataagagtgtacacataagcagtctatattagcagttaactgtagaagtggatgacaacttaaatttgcaaactgttaagtagtttggagggttttaccgtcaaaatttgaacttagagggttaagtgcaagtagagtgatagttgagagggtttagctgcaaaaaactctataattatttaagatatcctacaaaatttcaaaaaaaatcaaaaaaatttaacacgccgaaaataaaattcaaactatttgttacaaacgtaactcttatactttgaggggtgcattgcaaaatcaccttttaatttattgtgtgtaaatttagaggtgaatactataattattttaattttattaaaaaattaatataataataaaaatattttttagtataattttttgtgttagggttagagtgaaaataatttttgacagcaaatttagtaatagtgtgacaccaaagctccttggagatgctctaatccaatctaattcgcacgatccaatcaagtgcggattggattggattagaaaatagaaaatccacatttgtgcgaattgaatgttgattgaaatttaaaaataactgatccaatcagcacatatttatatttttataaaaaaaaaaattaaatatacaattaatattttaatgtagattatagtaatttaaaaatctaatacatatatgatacaaatatatttaaaaatatagtaaatcaaatgtatattttattcttatttataatctaaaacaaatttatttttaaacatctttcgactttgttattttttgttttatttattttagctggttgtacgatacataaaacaacaattattttctttattttattgttatttatgtgaaaaaaaatatttttttaataaatattaaataattcaatattaaaaaaaaaatcaatctaaaataactaatccaatctgtaattttgcaaattgaattggatttgagatattatgtggattgaattagatccaaaatataaaatccacacttagtgcaaatggaatgcgagcaaaattatacgaattagatcagataaacacccctaatcacaacacgcttcttctgtcgcatctcatgccctctcattttcagtgagatgaaactaaactctcaagtctgatctctggtgtactttgagaacagtttcaaactttcaatttcaccaagtacccattgaaacaattgaaacaagcatatattaacatacatcatcaaccaaaaaaaacatttgaatgaaacatgtttgctaatgaaaactcaaagagtcatgtttaaaactttcaatttcaccaagaacccattgaaacaagcatatattaacatacattatcaaaaaaaaaaacatttgaatgaaacatgtttgctaatgaaaactcaaagagtcctctagttgctgaggattcttaaatttcttcaaatgcatataataatcatcattaagcaagaactcataaatgaatgaagaatacactaagttgttgtaaaatgaaacaatacagtgaccataaatgctaatcccgacattcaatcatcaacaatgtcatccaaatattcatggccaaagaagaaatcccactacttctgaccaaaatcttggttagcgaaaattgatgaggaggacgtctttgcctcaggtctcattactgggacatccttatagtaactgcccaactaagtaacccaaaactaggtctggggaaaatgtgaagatacttcaagaaaaaaattgctttttttttcatttatttatttaatattattattataacttctttcctctttttctatactcccatatggcaattgttgatggaatatcacagtcaatccttgtgagggtaggagtttgggaggaacttagcgtactgatcagcctttttgcctgttctgtggtcatagtattccaccactgctgcaccagctaatgcagctaaggtgagagcctgagcgtgcaacctgaaatcataagatgagcacagatcaatacagttaataactacagaatgagcaaacaaataaaagagatttgacatgatccaattattgtattggcaaagaaaacccccatagaacttctatattaccactgtgcctaatagcaaaccattagaatctgtcttaagagcacgttcactcaagaatgcttggcagcaagggacaatcaccttttctctcctcaaatacattaatcgaattcattttttatttttatgagaatggaaaataggatctaattcacaatcaaaacgctcacaaaatcaaaccacatatctcatggtagactagacctctcccattgatagtcctgaccaatagacctaatcctcatgggagtattttatacatcgataaaagctttttcctccacatagatgtagtttaaaccccatctcaggccaatttatttctcagaacaaccaaaacaaaaatgtgaaatcaatcaatcaattgtttggttgctattcaatattatatatataaaaaaaaaatcacagcataatgttatcgcttatgaagattttgcccgacttaaaatttcattctcattctttaaaagccaaaccatttaatcattatacggtagattaatttgtcattcaaggcgtaaaattaaacagagtttaaacatacatcttctacatcttacaatcaaacaataatttaaacttaaatctccaaggtaatagaaactcacctagcatgaataatcttcacacttgttttctttggtcgggaccaattgtatgcgattgaacctgctattccgctaagccaaagagaccctatttttttcgcaaaataaaaataatgaaaattaaaaactatcatccacgaacacccaaaccaaacaaaaaaaaaaaaaaagaaagcccagaaacccaaaaaagcaatcaaacagacccctctaaaggaattgtgcgaactcataatttttccatatctttagaagaagaaaaaatagagaagttgaaccagaccagcgatgagaaacaaaatagacatgattttgttcattgtcattgatatggaaaaagaaaatagaatattacccacagttcgaagcttatgatctacgacccactctctggcggattcaaatgtgctcttaggttcggccatcgtaagaaaaagttcttagatttttcggagaataattgtt

SEQ ID NO: 27168 - DNA, 2307 bp, Cannabis sativa
  modified_base (1577)..(1579): a, c, t, g, unknown or other
cccgccgatagagagtcattaccaaccttggcggttgggaagaactgagattgggtaacctatctcggcggctcaaggtaaaactgctgaaataggtgtgtcatcttctcatacttttgggcaatctcgacacctgaaatcaccaagataggtggcattctcaacactttagaattgccaagataagtaatttatggtgctatttttcacatcaatcaattgaattcttctttttatttggcaatcaaataaaaggattttcaaactaaataatctaagaaaaaattagataaaaaaaataagaaaattaaaagagaactaaccgtagatgtgaaattagggatatgatatcaatttctttgattatccaattattaatactaataactatacttctttcttctaatgtgatgatagattataagttaacctaaactctttttaaatcataaaggtcctaaattccatgtcaactaccgcatctttgagatagtataataaacaattcccgtcaagtaataatttaaaagcgacataagctatgtgaatactttcatttcacatcaaaatctatgtttattcatttagagcattcctaacattcacttttcatattttgcattaggatcatagatatgcataggatggacaatcaaatacatgtaataagcacaaatatttataaatcacacaatcaaggaagagagaacaattaaataatactaatttataaaataatatcagacattatccatcaaatctctaaattgagagtttagcttataatcaaatccattatcaaattaaacatcaaaataaacatagaaaataaaagagaatgggaaggaaactaatttaggattatcacggatcgccaacttctcgctccaatcttcttcttcttcttttttagggttttgtttttgcctcctttggctccccctttatttttgaaccccccttttccttttaaaatggaattttctgccaaaacacgcaaaaacacgaaaaaatcatgtcttccttcgacggtcgtgtcatggtgcctggaacaacttcgacacttcatttttcctctataaaacctcgtcgtggcaccttggaggcgcaattagcgttgcgatactagttttgggcgtcgtagtgcctagcatttttctacttcgacctctcacagtaaaatgggcataacttttgcatataaactccaaatgagttgattcaatatgcattaaaagttgagaaagagctctaaaaatttcatgtgttttcattttcacaaatctaaacaaaatgtggtcgaatttttgcttgaatttttagctttatttttcttccaatgttctctatgttataaatcactatatttccaatatttgactaatttatacattttaagtgtcgaaacctgaaaccaaagaaaataaacgtaattttattccaaaaagtgacaacgaagaaaaaaaattaactctaaaaattaaattatccaaataataggctaaaaatagcttaacataagcttaaatcattagtgacaagcaatatgtcatcgacatatagaaccataaatatgnnnttactcccactgaacttatgatatacacaatagttaatattcatctaaaaaaataaatgagataattacttgataaaacttgtgataccattgacgagaagtttgcttgagtccataggtagatttttcttaatttgaaaaccatattcgttgggttaccaaaaataaagttttctggttgcttcatataaattgtctcatcaatgtcatcattgacaaatattatttttacattaatatgatgaaactcaagatcaaagtgagcaaagagtatcattattatcctaaaagagtctttcgatgaaactatagagaaagtctatttataatcaatgccttatttctgagtataaccttttgctacaagacgttccttatatctcaccgcattacaattttcatccctcttgattttaaaattcaccttatgtattttttttaagattgcatgtcaaagttgatgagtccaatttattcaaattatactttgtttctttttctattttgcaactagcatgctcaaagttgaaagatgaatttttaccttttggttggttgtgtctggtaatgcatttgacactaaagagctttctccaaattttaaaaagctatacatatacacctaatcttacatcagcatttgactgtatgcagggtcggccctgaaacaaagtgggtcatagggaaagaaaaaaaaatttgggcccttatgttagaaaaaatatggt

SEQ ID NO: 27169 - DNA, 1688 bp, Cannabis sativa
tctctctctctctctctctttagcatgaacatgaaaattcagtaagaggacaaaatcacagacaatttctaatcacctttgatgagagttacgcctcatattttctttctgcaagagtacagtcagtgcagttattttccatgtatccaaacagctagtggcacttgcttggatttacacttgtagtggtactatttgctctgtgcttttggaataagaaattggatgtttatcaaagtaacaaataaggaaaaagagagaaaaagaaaagaaagaaatggcgtgtgatgtttgatgtaaaaagattcctcaaaacgaaagctactgctctcaattatgctagtgagtttgatttttttggaaagagggccctgtcgcatgctcattatgtcagcctctcgtaaagcttcctcgcttttcattagagggacccctcagtggcctttgccaaatttattcatttatttttattattcttaaagaaaactccatccattgagattaatctagttgttcagggtacattgaataagaaagggatcttcctaatacattactttgttggcctccctatggataaagcgaactgacatgtggaaaataagatagagctttagaaatcaattgaacgtaatcatgtagcggaacacacttaagcctttttatcgttgaccctattaacgagaattttacaatcacatttgaattgatttgaatataccagaataaggagatgcaacaacttctttgctattgtgaaggactattacgaacctcatttttttgagaatactgattgagcagcatctctattaagtttcaatcgatcctctcgactcccaggctaatttaaacgcctactccctattttttcttttttttttgatagaacgttttagttcattatatagaagaaaagatgggaaccaccggaggagtccctccccgattacaataccaacagcctggctagacgctctagcacttattgctagtaacgattaattaaagcaaattgacaaacattaaaaatactaacatatctcaaacacgtaaagataaagaacgaagtctccacaaggcaaggcaagatttttttgccaaagctgagatgagaacttgggcatcaaaaagaactagaattttggcacaagagttctcttcagcctaaagaagagcatggaggatagcttccagttctccttttaatgccgagttccttgtacttttcttggacaaagttgcccacttgtttgacgttttgttgatccaaaccacaaccaaacctattgtgtcttccttccaagatgaccacttgcatggtttgttacctttcatataatcatattataaaaatgtagcattttgcaatacgaacactttattgactgtatgacaatagaaatatgcatcgtgagtttcctctgaataacccacaaacatacactcttttattttgggagcaacttttcgagtcttgagtttaagaacatgagcaggacaactctaaatatggaaatgttttaaagtgagttgtgtcccatttcactcttcaagggtacttcattcaaaatgtaagtagtcgcttgaagtgtgtattcctagaaacttagtggcatgttgagtaacacatcattgacatggccggcccaaaggctgtgcaaccagatcaattgcacagggcccac

SEQ ID NO: 27170 - DNA, 1045 bp, Cannabis sativa
taatgtatttaaattacaaaaatataattgaattttgttatatgatattattttgaattttaaattaaaataatattattttttattttaaaggattaaaaagggtttttaaatattaatatatatatatgtgatatataggtgagaacacggtactgaattataactaaaactgtgaaacataataaaattgaaattcaatttcaattctctttctctctcatgcaacacactctttcttcttttttcacaggccacacatatactaagtgtggttttgtaatttttttaatgttaagttacagtatctcataagttaagtgcacaatgtaataataaaatttatttatcttgttaaatctataactttattcttatcctgagtgttgagattggtatggaagatttaatgtgaattcttcatcaattccattacaaaaatcttaagtttagagactattgccataatttgttgaagttaaagaatctacctcaaagtaaattttttgaagatgtaatttttcttaaatttaacatgagaatctattagttagaaacagaaacgattttcattttaaaaaagaaagaataataataagaaaaagaataggaaaagatatatttgttttttttttttttaaaaaaaagtaggggaaaagatttcatataagaaagagttgtaggaattaaataagaagttaaagaagtgtcatactcctatgctaattacttaattaccacatgtcacctaactctcttactttgacgtacaatacaaatacacatttatacttttgcgccccaatttaggaatttcacatattaccccgaaatccacgtttctgtaaaagaccagcgattactcacactcgcagatatttggcgcgtggggataggtatgtgggtgttggggctggcaaagaactctataaatccaaatccaagcccaaaaatctggacacaccaaagctttaatgagaaaaacacagctctcaagtctcaacaacaccgtcaccataatcaacacccaactcccttattactt

SEQ ID NO: 27171 - DNA, 3369 bp, Cannabis sativa
aagttgaacaaaagcttatgtcgagatggtgttgtattgggtatggcttccttgtttgtgatatctgccattattgtatcaaaagggtcttacaaaaacatgtcatggtttaatatctccacaactactactccattgccacagactcatattacaactcctacttacatggtactctacttattattcaggtttgatattaatttatttatttatttcttgattatatatattggtagtcttgactttgtataaaactttcaatgttcgatctgtatgatttgtatttgtgatgtgtagaatcaaagaaaggggatgggattgcaaaatttagaaataaataacagaaaaaaggagagagatgaaaacttggagatggttgaaggtgatcttgctacagccagagcattaataagagaagcaatttcaaagaaatttgttaataaaacttattcacctcttcaagattcagattatgttcctctaggagatatttacaagaatcctcacgccttccactggtactgaatcatttcaccttatattattcttttcctagtatcaaatgcagattgtttaatctaccagaagatgaatatttcattagtcacttaaactttttctgaaaagcaggattaattattgttgttaataaaccaaaaaaactctgtttagtaaaatgaatttattcagtttttaggaaataaaatttgaatattaacagaggtagttgtacatttaatattgatttgaatatattgcaggagttacctactgatggagaaattgtttaagatatttgtgtatgaagaaggagagcccccaatattccacaatgggccttgcaagagcatatactccactgaaggaattttccttagcttgatggagagggagactcatttcagaacttgggatgcagataaagcccacgtgtatttcctacccttcagcgtagccatgattgtggaatacttatttgatcccattgtacgtgacaaagctgttcttcaacgcactgttgccgattatgttcacattatttctcacaagtaccctttttggaatagaagccttggagctgaccatttcatgctttcctgccatgactgggtaatttcttcccttttttttttttttttctcttactcgtttttttctttcttgctttcttgttagaatcaacaatgtgccaattcacctataaaatgttgataagtgctttacacctgtaagtaaggtcacgtttagttggagctgatgaaatgaaaaaaaaaacaaattttgttctattttttgtttggttatatagtattggagtgttccaatagaatgatttttttactattttgatagaattattattctcttctgaaatagaaaaacatatcattctaatataagatattaaattttttataatgatttttatacattttaaatttaattctatttttatttttatattttcattcctttcagataaatccattcttagttggttgttacacttgaacttagccattaattatggtcaattggaatttttcttttttctagttgtacattgcacatccaatcatatgaaattcataatattaaatgcaatattgtcaattaggacactgtattatattattaagatgattaatgaggacattgtattataaaagtttgtgaaacagagaatttaggagaagataatgatcaaaggctgtgataaattagaggtacactaatgaaatggtttaaagcttcaatgagaagcagagacagagagctattatttataaatgagaaaatctctgttaactaatcattatcgacagtttgtaagtcttaggagagaacactacttaagaactaacgtggcttcattgcaggggccaagagcaacttggtatgttccagagctatactacaatgcaattcgagtactttgcaatgccaacacctccgagcatttcaacccgaaaaaagatgcatcattccctgaaatcaacctcaaaacaggagaaatcagaggcctcacaggtggcctcccactctcagagcgcaaaatccttggatttttcgctggtaggcgccatggccgaataagaccggcattgctgcagcattggaaagacaaagacgaagagttgcaagtgtacgagtctctgcctcaaggcatttcttacgaggaaaagttgaagaagagcaggtactgcatatgccccagtgggcacgaggtggcgagtccgagaatagtggaggcaatctatgcggaatgcgtccctgtgttaatctctcagcgttatgtgctgcctttcagcgatgttttggattgggagacgttctctgttcaagtgtctgtgagtgaaataccagagctgaagaacatcttgttgggaatctctgaggaaaggtatttgagattgcttaagggagtgaagatggtacaaagacattttgtggtgaatgatcctcctaagagatatgacatgtatcacatgattcttcattctatttggcttaggagattgaatgttaagataaataataccatagttaatgattgatcacaattatagtacatttttttagaactttttgttattaaaactaacagatgtaagcattaattgacttcaataatcaaacaacaatcataaataatgtttatgagtacacaacaaagataaagtatttatttagagcattaatagttaagaaaaatataactcccatattgtttatcccatcatattgaacaaggtttgagtgcaatatgcaagagaggaaaaaagagacaattgtggagcaaccgacttagtgtctaactatccattaacccaatctatgcatccttaatatatatatttttatacatatatatatatatttatacaaaacacccatataaccttaaaagggttatgtattttactgggctaataagggttaattaatggtggactataacttttttttttttgaaagaacaacagttcatttaacaaaccgaagacaaaatgaggatcacaggaggatcaccctccccataatacacaccagcatcctaaatagaaactctaactttcctagccaaatcatcggcaacaagattctgacttcttctaatgaaataaaaactacattgttcaactaaattaattaagtctaacacttccaaagataaattaaaaaagttccaatccggagggagagtctttgaagagaaggcctgaattaaagtcctgcaatcagacaaaattacaatcttcctccacgaattttggatagccatcgacaaagccattcgtattgcaagggtctctgctgccattgcattcacacagtggccagtatccaccttgaagcaccaag

SEQ ID NO: 27172 - DNA, 3269 bp, Cannabis sativa
ggctcggatgaaaatatgggcgcccaacacactaggaaaacgtgccttgggtgcccaagttgacatatccacgtgatttgattgtaattctatcttgggcattattcttgttttgctcccgaaatgagatttgagacttgaaattagaagaaaatatcatccaagtggttgttcaacccccacgcaccaccagacaccacactaggcgcccaagttaatgtttaacttggagcttagtgttcccggacatcgatcttattttacggccaatataaaatttggatgcttctgcaaattaatatctcatatatatgtgtcacacacaagttcactgacacttatgcgcactagtgatcacccggtcgtcatctagtctcaatcgatgatcactcagacatctcctacgcgcatcgagtaaaattttcaagagacagtgaacaacttcaccagagtcaaagaatgaactaagaaaagttttcacatcatttagaatcttaaaatatgcacaaaaaaaacccgaaaagcgcaagttctaagcgtccatgtggacatttgcgggaacccgatgactggcaaattagttttgccgaattttcaacattgcacaccgctcagtattttggccatactcactcaatttttatctaaatgacgcgattcaagtagcattggatatctctttttaagaataatctaatcttgtctaaagttcttctcacgattttgcctttttgggtgcaaattgaaggaaattttcgacgagtttcatgcgaattttttattattttattataatttaattggatattatttcttataaaacgagagctcgcctaattttttttttttcacactttccattttctgtataaggtgagagttcctttagatttagtcatttttttctctagttctcttgtaagacaatttatttttgtgataataaaagctcgaagtagacgtagctcttttactatcgcgccacaagaagtgaagtactttaatttggtggtcttttttttttgtttttttgtttgcattactattagtaagagaaatttacacaatatacttaacatcaagagttttttttttcctttttttttttattttatggatttttttttacattttatgattgtttttatttacatttttacaaatattgtttatttacaagtttttactgattttttcaaaaaaaatatattattttcacgttgcttttctgtagcatcaatgtaaaaacaaaattattctaaaataacagaaaaatatcattttatattaatgtaaaacaaaatcacattactttctcgtaacaacatgtcaaaacaacgttatttttgaaataaaaaaaaacaaatgtatttttgtaaaaaaatatatagcaaaaacatagaaaaaacaaaaacagtagattcaaccaaatataaaatttttgtcatgaaataatctattttttttttcatacttgtttgttcaattctataatttaccgacaaaaagtggtacattattacttcgggatttgagaggaatttagagatttagtttagaagaaatcgaaaacgaagtaccatgtgctgtgctgtccatgttttatcgattgacaagaagatttactggcttacaaatactgaagcatgtcaaattaaatatataaaaaaaaaaaaaatcaattccctccgtcaaaatcttttgcactttttagttttgtcttattttttggcctacttgttataatcaatttttttttcttttttttttccactaaaaaaaagaagagtaatattaaaaatggaataattctatagtacatttttttttaaaaaaaattgttgtttcaatttgaaaaaaaaaaaaatatatacattatctcggtatatttatatccgtttcgacattaaaaaaagcttttcaatctaattttcttttcataatcgtataaattatacagttatttaaaactacttataaaatttcaaaaaattttaaataatttataatacaaaaaataattttcctatacatgtggtcatttattgtttaaactttatttttaatactgtaaattatttaaaattgtttgaaaatctacaaataattttaaaaacacattaaaaaaaaattctctaaaaatcaaaacacataagaaatatatcaaagatagcttttttaaaaggtgtaatacaaagatggtcgtttactcgtttgcacatttaaaatatacattttaatgtgccattgtatttcaaatcatacataataattaacatatgaattttgaatgtataaattaagagtgtatctataattttttttttaataaaaatacaagtgcccttatgtttttgacagcaaagcaaattcctcagttaacataatgacacgaatcatataaaaaaaaaaataacatcactaaaattactataatgccttgacagtccgctagtatcttcattatttctagcatattatcattaataccccttggggaaaaaaaattagaggataagcagttgacatgaaataaattaaaactactgatattattataaatattgtacatgtttttgtgataataataattaaaagtaaaatagagacagcagaaaaagtaccagataaaacagaagcttcactctctgtaagcatggcagagaatcctctgatagcatgattgtaattgtggacaattgatattctctctctttcactttcactttcttggctaccaaaattatataaatatttagttatatagcagtcaagacagagaaagataactaatttaattggtaaataatttaatatggaccttggattaataatggaggacaataattgtagataagcagattcagaaacttgatcatttccttcattttcattcaattttggatctgaagctcccatataaacaacataatgctgatgatcaaatcaaaattatttatcagtttaatcagagcataatgttatgaggtgtataacaattttctattcaattcaatgattccaatcttgtaattgctctagatatagctctcactttccatgagtatgactcttttaactgattttctaggcaaccaaacaagaaaatgaggttgaatcagcggaatttgaagaataccctttagagaatttaccttaggagtctctgaaattgaagcagaggctctagaaatgttgatgagaagccatgggagtgagagacaagtgagtagtagaataagtttagtcatctatggaagagagagaga

SEQ ID NO: 27173 - DNA, 1269 bp, Cannabis sativa
gagttccctctcttgccaatggataagtttctttgttggaacattcaaggagccaaaaaccaacaaaacaaagactaataaagcaatttactaactcacaaggggttgggtttgttggtctccttgacacaagggtcaaggctcataaacatggagccttgtacctaaatatttttgatgggtggtgttttcatctaacatcgcttggcataaaggtggaagaatagtaatggcttggaaccctctaagttacaacgttgacattattaaatgcacaagtcaatttatgcatttaaaagtaatgattctcattatagtagctatctcatagtggtgtatgcatataatgatcgaattggaagagtggaattatggaaagacttatgtgagattgcaacaaaggatagttggttattgatgggtaattttaatgatatattggccaatgaagaaagaatcggacacaaagtaaagtatcatgctgatacagatttcattgattgtgttcaacactgccaattggaggatgttaaagcaactagtaatttcttcacatggataattaagcagcaaggggatgatcgtatcttttccaagattgacaggattatggccaatcaatcctggcttgatgattttcccactgttgaagctgcttttcttaatgaagggctttttgataactctcatgtgatttttactttatatcctcaatggaaaggggggaagaaactcttcaagtatttcaggatgtggaaaaatcatcttgagtatgaaacaaactcagggagatttggtcacagcgaattcctggaacaaaaatgtatcaggcagttagcaagcttaaagctctaaagttagttttcaaggaggtcaataagaaaggtttttctaacctacattctgctgatttgaaaaccaaacttgatcttaaagatattcaggagaaattgcagcatgaccctttgaaccatgatttgattgctgctgaacaggaagcaagatccaaatttgtcatagtgcagaaagattattcatcttttctgcagcaaaaaactaaggcatcctggattcaaaatggtgattccaatactaccttgttccacgcaagcattaagcaaagaataaggcaaaaccaaattttttcgatagaacaacaagatgggaccagagtacatgaaacacattagattactgaagcttttgttacttactataagtccttattggggtcctagatggaaggaaggagaacaatttcaactaaaa

SEQ ID NO: 27174 - DNA, 3432 bp, Cannabis sativa
taaaggagatggcaccaaaaatggaacaggctgctctcctattcctactactaaccattctgtcttaaccatttccattgccttgggtaagtatatgtattaattacatataattaaaattaaaatatatatatattggttgtggagatgatgatgagcttcaccgcatgccattattgattgtgctttccccccattttcaaagaatttctatgatatctttatttaaattatatttttattaaactttgtaataagataataatatatacatagtgcttgcattttattttggccacttgtgtttgtattaattatataaaattctaaaaatcccttaattaatatatcatctgatctgaatatttgggtatacgtagtagctagctagctagcctagccatgtattcttttaacatatctttggtttggagtagtggaacatgacctacgttataacaaattaaatatttcatttttggaaggtaaagttacttagcttaagataattggttctgattttaaaagctgcttttatgcttctcaagtaatcagtaatttttcagctattaaaattataaaattcttttaacagaatttagttttagtatttttctcgctaagaactttcaaagaaattaaaagtaaaaacagaaattattagccaaacacaaccttggctagaattgaaaaataactacaaataacccatcacagattcacagtgccaaagttttatgacaataattcacttaaatcttcaaatgaaaatagtatatatagcggctaaaataattggtatcataaaaatattgtacttttaaattacattgtgttattattagggtgaatatatttataatatttccaaaagttacattatatacttaatttttgaatctgcatgcatagagaacatatactattattaatttggctatatataattttaaaagattaaatttattaattattaaacgttctaaattttattgtgttggtttatatatttataggtgtctctataggcatattgctactgcttctgggttgttcttgggcatattgggtactaaagaaaagaaagcttatcaaactcaaagaacagtttttccaacaaaatggaggaatattattacaacaacaacttgttcatcaaacaagttcttcttcagacacttcaacagccaaaattttcacagctgaacaactcaaaaaagccactaataactatgatcaaagcagagttcttggccaaggtggttatgggacagtttacaaaggaatattacttgataacaaagttgttgccattaagaaatccaaaattggtaaccaaagtcaaattgagcaattcataaatgaggtgattgttctttctcaaattaaccatagaaatgtggtcaaattattaggttgttgtttggaaaccgaagttcctttgttagtttacgagttcattacaaatgggacactttctgatcacatccatgagaaagaaaaataccctttattatcatgggaaatgcgtttaaaaatcgcaacagaaacggctggagctatttcgtacctacattcttcgacttcaatgccaattattcatagagatatcaagactgcaaatattctattagatgaaaattacactactaaagttgcggattttggagcttcgagattagttccacttgatcaaactcaactaaccactttggtacaaggaacattaggttacttggatccagaatattttcaaactagccaattgactgaaaagagcgatgtttatagttttggaatagtgttggcagagttactgacgggtgaaatggctgtttgttttgatagaaaagaaagtgtgagaaatctagcaatgtacttcatttcgtcgatgaaagaaggtgaattgctagaaattcttgataaaagagtggttaatgaagggaatattgagcaactaaaggcagttgctaatgtagccaagagttgtttaagagtgaatggtgaagagaggcctagtatgaaagaagttgcaagtgagcttgagggagtgatgagatccaaggttggaacacatccatggggccatgatgatcatgatcaaaaccctaattccctaattgtactagaagaggctgaattcttgttgagacctaattcaagtaatgttggtgtgactgaagggtttgatagtatgaatatccaaatgtttgagccatatgatgatggtcgatgataataattaagttttaatttagagacatatatttatatcttgataatacataaatgtactctttttttagtttgagttttgtttgaactagttaatcattgtcttttccagattattaatttctaaattcaaacttatatattagaaaaaatttctataatattttatatattttatattatagtgacaaagcctttatatatacacagattgacttaatttttatgtatatatatagtgatagatatcctactaaaaaaactgtacgtcgcgcagtcaaaattatgacaaaattgatcataatatttatgaaaacaaagaacttaaatataaagggcaacagagattatagaggttcggttcaatatatgtaataacctatatattctcatttttgttgtatttcagtacttaagatatcaaatggaactttagccattgatttttccaagtattctatttcaataatatttctagagtactttttctcgaaaaactaaatttaaatctttttttataggtaaaattatatcattacttttcattgccaatatacattcggaatatttcctctcatatccagagtactactttagtacttagggaggaaataaagacctactcttcgatctattctttgcggcatagcccagcagttaattaatttcctttacagcttaattaatcacactcctgactcctccatacagaggcagcgctcttcttcagctggttgatcacctctctatttatttaggaccatcataggtgtaatgtaatggttctttcacgagacaggataaatctttgaattgtattcttcgagacactgtgaatttcttaattgaatcgaaattctattttcttaatgtcatatccaaaaatagttacacaatcatatatttcacactacttagaaattactaataatctctattacaatattttcatagtgtaacacttttctactttttaaaattactttatcctcaaggtggtaaaatttttaaaaaaaaaaaaaagttcaaaatccaacaaaaataaaaagaaatatcgtcacacctcctctattttttttagtgaaaattacatgaaatatgggatttcataataaagttagaaaaatatggcatttttaagtttgccactcttctatggcattttttcacatttaagattttttatggtatttaata

SEQ ID NO: 27175 - DNA, 3551 bp, Cannabis sativa
ttttttttttttttgtaaatgatagttgttctgctattctttggtgatgagtttgtgtgtctttgagattacttttatgtaaagttaattctaaagtgaagagcataaagaacatataaagaacaatcttcgggagaaggttcatcaaagtcttgcttctagaggaagcaagcacgactatcttcgggagaaattttttctaaaagacttgctttgagaggaagtaagcaccgctatcttcaggaattaagtaccgctatcttcaggagaagatttctacaagtcttgctttgagaggaagcaaagcaccgctatcttcgggagaagatttctacaagtcttgcattgggaggaagcaagcattcatcaagtaatttgaagggagttcaaaccttggtgtcttaaggagattcattcagcaaatatgagtacatcaagcttgcggtaaaatcattagaggaagtctatgttttgtttaagtcaattactttgtacttgttgaaatttgactaatgaatcttatctctgggcaaggcccctggactattagcgatcaacatgaattgttgatactacgtacaaaatatcgtgtgttattttaatttttgtaattttactatttttgcagtatatttctgatatattaggtttggttatattaggtttggtttttgatagagcaggttttaattttattcaaataattttatagcagttccacattaattaaatcatttaataatttcatttagtaatattaaaaacgaaatttcaacgttgttagggtttttcattcctacggagaatttttttcacaatcttcaactttgttactccatagaggctagagtagaagtgaaaagagatgtgggcttcttaactaacaaatggtaataaaatgggccataaatagaaaggtcccttgtttgtgtagttgcaaaactaaattgtgggcacttatgttataacttttgcaagcattctttaagttcctgcaaaattaatccaatttgttcacacaattgatgtattgcagtactcgaatttattaatgttgcgtattaataattagttatgcatgaaatgcgcttgggaaagaattaattcttgtagtaactattatgcctataaaaatattagtttgcggtttaattttaataatgttaattgtaggggcaaagcaatactctttacaaaagttagaggcaaatccactagttaatgtttcctataaaatgatgagaacatgatattttttttttttggagaaacatgaccatagtttttgtgtttattaatgttgatgatttttccatcaagagggttgtggcacgaggatgtggtggaatgaatgggaaagagttgaataacaatgaagatggaagttaatttgagaaagagaggcaaaagaatcattggacacaacatggatagagtgacatacgtacaacatttccaaagacagatgaaccctttgtgatgactataataatatagccaagaaacacagaagattaattaattgagaaggaaattcaaagcatcaaagattcaaagtactaacttattcaccacttgaggctagctcaagtggccatatgagggtgcgtgtgtgttgaagatcctaggttcgagtcccagattatgcattgacaacacgcttaaatcaaaaaaacaaaacaaaaaaaaaaagaaaaaacttattcccattggaccaccaattaccaagagcatatagagctcacgtcagccctaggctgaaaatcttctaacaagacattcaacaagctttcttaatttcttcttagtttcctatatattaagctttgatttgtttgaccgtagtcatcaaccatgacgatatagtccatgtacttgtaatcataaatatatgaaaataatgatgatttccttaattatagctatatatgttcaacgcataagatagaagaaaagaaaagatcaaacgataataaactgaggttaagatacagggaactaggactatgattacttatatccaagattccaaatgaccaaatgcttgttgacgattgggactaggattaataatctacttctcccaaaatagttcgatttgtataagattattcatctcaactaaaagtataggagtatttatttatcatacatgttaatttattttatttaaaataaacaaaaaataattatgtaaataaaataatggccatgtattaataaattgtaccttttattttgtttatacacttttcaagttttcaacatcagtttatgttttgaaaaatatagaggtggtttagttgtgtttttttagttttcagtttttaaaattgtgtttttaaaattttaaataaaaaactgttttttatcatttcaaataaaaaaaactgttttttatcattacccccttcatttgcatggttcctgtagccgagaacattcaagtgtcaaagagaacttttaggttcgaaaattcatggttaaaggagccaatttgttttaaagttgttgaagatagctgggatttgtctacctgtctccctattactgaaaaaataagagattgtggcaatgctctgcttgactggggaaaagactataccggtaactttggaaaaagaataaaagattgcaaagctgagattaagacttggaagaaagggcgtgacactaactctgttgcttgttataaagctgccgagttgaagttgaataatctctacttgcaaagagaaatattctggaagcagagaagtaagcagttatggttacgagagagcgatcgtaactccaagtatttccatgccaaagcaacatcacgaagacgatcgaacttaattcagaagctgaagaatactgacggagactgggttggctgggaggatggacttcctacggtggtggtggattactttcagcaatattgttcaaacagtctgttggtgattattctactgttatcaattgtgtttcccaatcggtcactgaagaccaaaatgctttgttactcgaggaggtgactcgaaaggaaatcaagaaggcattgttccaaatgcatcatgataaggctccaggacccgatggaatgactccaggattttatcaaaaattttggaaattggtaggtgatgatgtggtgcgattggtttaggtttttttcattactggtgagttcccttctgttttgaaagaaactaatattgtccttatcccaaaaaagaagattcctgaacaaatgggagaccttcggcctatatcgctctacaatgttctctacaaagttgtttctaaggtgattgcaaataggcttaaagttgtcttgccgaatgtcatatctacgaatcaaagtgcgtttttgccgggacagttaatttctgataatattatgatttcttatgaggtgatgcattacatgaaacagaagagaaagggtaaagatggttttgtggcggtcaagcttgacatgagcaaagcctatgatcgagttggttgggcttttcttgaagctatgcttattcggatgggatttagtttgagatttgtcgcac

SEQ ID NO: 27176 - DNA, 4506 bp, Cannabis sativa
gctacttatacttttttattttttgaatcatatttaaacatagatttttatgtttaaacaattgtagtaacatatacttgtatataaatcttaaaagtagaattaggtgagtgtataataaggtttcattttattagaatgaaagtggttaaggtgagtgaattctatcttaaaatcaattaacaggaaagggtagtctaattatcttataaatattgtattatttttttacatattagtactatgagaatctctaacataacaaaatacaaaagtgtggttattcatgtatgtaataatatagtccattgcaatgaaaatccaataaatttattcattactataaatcaattaataataaaacttttttcctatgtgtaatgaatgggtttatacatatggggattgaataattatggaggggaagttttagggcatgataattagtgaaagtatatattaaattaatagtactcaaatgataatactttccttaaatagtgtgaaataattagtggatttgccaaatatataatatgtatgactcattagagattagccaattaatgtttatttaacttccatgagcttgacatttatgatgagtttttggcctttgggattatatattattaagattttgaaattggggctcacacagtacttacatgagacaatgtcactgtaaactgatagatcttcttagctactgaggtcaacaattaattaagaattttcaaaaggattttatttttatttttaattatgatcttattttgacaatgagaaaggaaatatcaacttgaactctccagaagagagatatctataatactatatatcaagttaccaaaaaaaaaaaaacccttattattaattcagaaagaaataaaaaaaaaatgatcaagcaatatataaatttataaagaataaattaacataaaaaataatataattaccctacttaatttgtttatctttgaagagtaatattagagacacaaaaattgtacatattttttaattacacatgtcatatgcatttaatctttttatcatatatatataattatataactaatgatcgaatgaaatatatatttatatatgtggacattaatttggtcaatgtcaattaattaatagtcatgtgtttatctagtttgggattaatatttcatcacgtgatggaaggaaaaagtaaaaggccactacaaaaaaaaaaaattatttaatcacaataaaatatttgattaaaaataaaaaattgtgactaattataaattagtatttttttttttttactaaaaactcagtaattaaaagtattaatcacaaattatgatttattgtgattaaatgtgtctttagctaaattaataatgtttgtatctaaaaattatgacttaattatgagtattttttttttattaaaaattacatttaattataaaaaaaattatgaaatgtagtttttttagtgctacattatatttatttatatatgtaggtttttttaaaaaaaaaaaaaagaaaataaatatatggaggttggattgcaaaatccttggatcggcggtagtgttgataagacagaagatgaattgatacaaagacaaatttttttggtcaattatgattgattaggcaatgaatccttaatttggatttacttgtgtaagtggtcttagtcaatattattttatttaattcattccatgagattttattataattattttcacaactacctatcttttttgttgtggcaacaaacgacatccttgccaattcaccatcatcatgttctcattattttactagctagctatataggatatatgtaacaatatatatataatctatgccatatatatttttctagaatattagtagcaaaaggaactatatatatgtgtatatactactataatactattattagtaattaatataagatatatagatgtaattggataagagattgacgtatatatagtggtccacgacattaattaaattaaagaaaaaaaattgttaaataattataaataattaataaggtgacgaacctttataagtaatttgtaaatcaaataagtatatgaattacttatacacttcatatttgtaggattttatacagattgtctatctgtttaattatagcaacgtagatacatgtgtaaatattgtgcataatattttttttctttttttttttctagaaaaaggtttatttagatcgataagcaataaatgattcaaattgatctttaaatgaaaagtattaatttttagtaataatgttagtcgtattttttgtaagaaaatagatctctttatagtggatttgattatgactcgtaaagtggtttgatgagtattttgatcacgaatggtgaggtcacacacaccacttcttattatttttgtgaaataattatgaaataccactatcatcaatctttttcttcagtgttgttattttccattcaaaattaaattaatacaaagacttaaattaacaaaagtttttgagtcttaattttgaccaaggaaaaaattgtgtatcactattcactatcatattcatatgcatgtgcacgcgttgagaatttttttttatatataatacatattttatatagaataaaattaatactgattagattgcatgtatttattcaattaatttaataattcaaactctatctagtaatgtaactaaattataatgctgctatatatatatatatcatcataaacgacactacaattaaatctaatttaatatttctggtactatagctataaagagcctagattagatatcacatgaaatcatataaatatatataatgctgtttttaggggatatgtatgtatatagataagctataaaacaaatatggaaaaacatgcaatacacgcttcaatataaaacaaactatattatattatatatataaataagagaaatgttaattacaacctttaatcaatttctacacgtttaaaatcacatgctgaaatattttttttttaattttttttatagtggtattcgttataattacagtatcaaaatttttaaaaaatttcgaatagtttacaataccgaaaacagagtttctgatattctagtttaccacgcgcgttgaaaaaacttcaaacatattttcagtactgtaaactattcgaaatttttcaaaaatttacaagaataatgttgtaagcataacaaacatatctgtgaaaaaaaaaattgaaaagaaatattccgatatatattttcagacgtgaagattgactaagagattgtaacgtaattgaaaaagtattataaataaatatgcaaacgtaattgaaaaagtattataaagagtttcacacacgtacctgtccaacatatccaagctcaacaaactctcacccggtccctcctcggacttggtccgaaccaccccaccaaaaaacggtgcaagcaaaacaaaacctcttatgcgaaccggttcggtccgaaccgacccggttccaacccggacagccaaatggtgagccatgttcccacctgaggaatcacccacaacaaaaaccctctcaaaatcaatcactttcctactcaaccaatattcctcatcactatcatgatcagcctctctcctcagccactccacaacccccgcagcatcttctaccgcggcgggaagtttgtgttccggggcaagcctgtagtctggggagactactagggctcccaggccagaggcaagcctgaggcaacagttatgacagttaggccaaaggcgggaaccgacacaaaagccgccgccgtggaagtaaatcactaagggaattttggttgtggttgtggttgatttgggcttgtacaaacggagtgagaggtcgagtttttggtcgtaaaccatgtctttgaagacgacggagttgtcctcgtagaatggtcggaatttaaaggccatgtcggagcagcggtggacggtgccgtcgctgtagagttggaggactcccatgcaatcttccacgatatgaggaagagaacccattggtggaagagattattataataataataattagaggaaaatgttttagtttgtgtctagtgtgtatactagtagtggtagtaataacttaatatgttttgtatgtatttatagggggagataaaaaagaaaaggataaatttggtataagagaattgttggagggtaaatgtgtaaaattattggaatgtgatagaaggtggtggcatatgcatgcatggccattggtttattatggggttggtttttaattaatatggaccatacatagaaccttgatgtggctatggtactactttttgttttggacggttgaaaattatttttattgtttgggtttggactttttcaaggtacatattacacggaaaattctacagtgtactctcttaaaatgaatatattgatgtcttttatttgttttagcatccgaaat

SEQ ID NO: 27177 - DNA, 6108 bp, Cannabis sativa
attgtgactaaatgttttttagtcacaatatttattgtgattaaaattaaattagtgacgacttgtaactaaatattatgttttaattacaatattattttgttgggactaaaaatcacatttagtcactaaaagtaacaattttttgtagtgcgtgtattcaatatcagcaaaaaaaaatataccgtatgttcaattacaaaatcaaaactttaaaaacaaaagtaggagcactctcccacatcttttttttttttcctttttttactttaaaaacaaatattaattttttttttcttaataaactttcaaaaaataattttaattacattgctagttattttggctcaaaaaatatactatactaacttatttttctaagatgaacattttaatatgtgggaagtatatatttttttgtcattaaaaaatatcattttaatttcttatatgtatatatatatataattatatataatggagtttcttatattttgtttatttgcagttaaaatatttttttctcttcgagagagtctttcttcacaagcacaaaattttcattatcatactactaaaatgattccctcccgccctagagttgttcttcgttggatctttttatttcttttgtagagagtgatcctgaagttgtcatgaattcattctattctttttctaagagtgtctctgagtgggttaatttttagatctattagattcttgttgtctgtcttttttagtgtatgtcttcaacatgtaatacaaaatggtaatactgtagcccatagtgagtaagatatgcactacgaatggaaaatgaggtttcttagttggaaaaaattctctccttatttaataaccaagactacaaaagtcagaattcgcgacggtcctaaaaacgctttttttaggggaccgacactataaaaattaagtaactatttaaaaccgttggaaaaattagtattcctgatagtttataacagtaattacaagaataggcgacgcttttaattataatttgtaaatttattaggccatattatatctgagggtttaaaactctagtaaatcccaataaactctcacttgtactaatataaaacaaaagtgcatttgaatttaatctcatatacttgatgtcttgatcaaatgtagtatttggcataatatatgtaataggatatgataggttatattcaatatcaaccttctctactatcatattttccttagtcacaaaattcatgatcttaacactacgggccttgtctcgatttctatgttttggtactgcaagcttcgcccggatgaattgggttgtgtgttagtcatattccttaggttttctataagttcctctcatgcaaggcattttcactatcaactcagttctcctcaactttgatcaattgaatgacaacttaattcagctcaaaacaacttttttcaagcgaattcagacaaactgcaccttgtaggaatggagagcttcagctcaaataactcacatgaagatctttttttcagagggcttaccaatggagtttaaggatttccaacaagatctacttccttaaactgagctttacaagagaagaataaaaaaattgaaaaaaatcaaaattttttaatttattttcaccaaaaaatcaaagaacactagaagaactgatggaagcagtattcttaggctctctattattactttgggcattaatctcctatattccaaagccaacaaggagtagatttaaatttaaacttaaaaagaaagataaagagagaaaaatctgtcatcttttctcttttcccttcttttttttcttatctttaattttctaattttccaattcaaaagggaataggttttaaaattcctagtcccactagaagtcattgaagaatagaaacaattgttgagattgtcaaaattgatgtccacttggtagtttcaagagaaacgagattagttcgcgtcatcaagtcaacctcacgcaagtgtaaagttgacttaggggaaaaatatttacccagaaactgatcctggtgacgtggaaatcaatgtttgacacgtgaaaggaaagaaagcatcctgaagttgagtagtcccgagtcatagcattccacctgggaaggggccctagccttgcgcccaggttgactctaggaactctagaattggtgtttagatcctaccaagttgttttaaactcaccatctttcactattctaaaccaagaagacaagaagaatccaagtcaaaggcttgggaactgaaaaaagatgaaatagcaccccgaaagtcaaccttggcgcctagggttttcacccaatgcccaagttgacattctaactagggtctcaatttttgggttcgttttagtgcaaatagagcaaaatttgtactttgacatgaatgagacatgtcatgaacatatttgaggcaccaaaattaaaattagaacacatttaattttgcgcacctgaggcaccaggcgccttaggcacctagtgcacccaggcgcaagttgacatatttttaacctaggacacttccaatcacaatattgaagaagtatctcgagcatattatttttctccatccaaaacgaagaatcaagtgctttcgagaaagaaaaaaatcaacccagagactaaaacgaggacccagtgcccaggttgacctaggcgctgggcccagcgcccaagttgatactttgtcaaccaaggtcatctccaatagcagttcaaaaaaattcctctgggcaaatccttgttttcattaatattaatatttgggtgctttcgggaaataacggagtcatttgggacccaacgtgtaagttgatattttgtcaacctgggccacttccaaccagattttcgagaagtcttccaggcatattctacatttctataaacaacagagatacgagtgtttccaagaatcaaacgaaaccaactagtggaaaaaagttagacctagtgcccaggttgacattttgtcaacctgggctatttttagtaatttttctcgaaaagtatttcgggcatcttttttattttcgtaaatgacgaagatacaaatgatttcgagaataaaatgagatcatctgggaattgaaactgagactcagcacccaggttgacgtgggcactaggccttgcacccaagttgacatgctacttggttcgcatgttttcgctcatcaaacacaaattcttctttgggcattcttcttattttggtcaaaaacaggataggagacctcgttcgcaatatcaaattccttataagtgttaaaacgagccccaggaagcacccagcgcctaggttgacttatggcctagtgcattgggttgtgcttatcagaatttgattccatctcaagcatctaactattttttcatagtaaacgagaactacaacttgtgacatgtcaaattcagacttcgatatttcatcctttcaacaaggtggagtatcggcaaaattaagaagtttcgagtctacctaatttcactaaaaagtgacatctctgagaactggtaaacaacttcactaaaactaagaaattggctaagtgatgtcagcatatcacttaagcatcaaaatatacaagtctaagacattttttcacttacccagtgtttaggttgactccaggatgtcaacctgggcactagacgtcaacttgggcactgggtgctgctgaatagttttttttagtagtaataaaaaatggccataaatcactcaatattgatctgattgccacgattcaacttgtgttttaaaaatctttcaaagctctttcaagtcatgtatcacacttatatcacaattcttaatattttgagttcaaaatttgtgcccaagacaggtgtgatttttcctacaaatcacctgaaaacaatccaacgcacgagattcaaactccaaaattgacgattttcatcagagtcatcaccgttagattatcatcaatggagaagatcaacccaaaaagaattttttatattttttgtattattttattaatattttaataggaccctcttctctataaaataagagcttatctagctcatttttcacattcttctaagtccccataaagttagagcatctctctactttcactctcaaaaaattagagctcgctcttgccttggtcaattttctttcttgtaattgtcgtgagaaataaaaactgaaagttaacgtagttcaataccgtcgcaatacggaaagtaaattactataaatttcttgtatctttatttacttaaacttatatttcttcttgtcaatctagcgcaataagtgttagccaaatttttgcatttaacaatatatttacatataattaaagagtgcaagaaataatgtttttttttatgctgaaaaagaaaataagaactatttattttattttaaattatgtttttatggcaagaggagaaattgatgaatacacggccttatcttacgtacgtacagatccatcttggtcaatctcagattaagggatattaattaatctttgttttatatctgtgtaatattgttgggtcacctatatatacagcttctgataattaataatttgaagctaactagctattaaaccataggaatgaaacccttctttttctaaagaatatcatattataaagtatgatcggttatatctaccattcaccaaacacatatacaagtcaagccacagacttacaaatcacttacgtataattaatatatttatattatatatatatacttatatacataatacatatatgagaagtgttacgtgaaccaatcatttgtgttcaataattcacatcccttgtatttttcacacttccacgacatttttaaatctgatcaagtcatcatttggccgtacaacagtgatcatcctttactatttacaacatttttttttaataataagtaaagattatgtcaaaacctactactttaacattaaacaattagaagaatatgccctctaaattaaattactaccaattatgcactcagaattagaataattaatgcatatattgtagataattagaatccgatgatgcatataaggtagacaaagtatatacaaatctatatatagatttaattaatttacgcatttatatatataggtgtatgtcatagaaattaattatctatctatactatatataaaaaagtgaagtttgggtccaaaatttggtttaagttattttgtttgtttgtggttttgtttgttagtgcattagttcaattactctccactttgttaataaattattttacattaatcaatatttataatttattttcatattttggaccaaaacctactcttttatatttagtatataaattaatcaatatttataatttattttcattattccacttttaaataaaacattaagagatgcattaattaaaaaaaaaatcttaactagttgaaattatgaaacttgaccagagtttccttaattcggcttttgttctattcttcaaattaaggcttgcaacatccaccaaatacaaaaaagagaaatataatctttacctaagccgccttcacctgctacaccttcattacaaaaacatataaatatatacatatatatataatatatgtgctacgcacataattcaggacagtttttagatatatatatacttacaaatttacaaatcaaagtatcaaagtatatatatatttatatattttctttttgagtgatcactctcgctctctgtctttgaacttgactttattttcaaccaacaatattaactgaaagaaactctcgagctcgatcggtcaactttagccatggagactacatctatcatcaaagaagggtggaaatggtgcaactatttttgcatcatatgctgtatcatctttgtttctcttttcaacagtaatccctacaactcaagcttttttgatgttcaagaaatgagtttatcaccaccattagcgcccaatgcatcgtcacacactaacactagtaccctgccattattggagatatcaagatccgttggtaataataatgagcaaggcagca

SEQ ID NO: 27178 - DNA, 2720 bp, Cannabis sativa
agtgacaacatgaggtcaccattggtacttttaggttggaaaaagcttcattgttaaccttctaatagtacaagtgtaagtgatttatttgctttaatttcattctagataaaagggtgggatccaaaaaaaaaaaaaaaaactactcatgactaaatgtaattttagtaaaaaaaaaagaaaaaaaactacttataactaaaatatagcatattaagatacaagtttgtcactaatttattttagtactcacaatacttgttgtgactaaaagtatatttagtcacagcaaattgtaatttttgtattaatacatttaaccacggaccatttagtcacaacgtaagaataataattaattataattagtcacaatatttttacttttaatcataaattttgttgtaaataaaaataaaaagtgtgagatctcaataccaacgccaaaatggagcagacgatcgcttttttgcaaatgtctcttcaaagctagccaagaaaaaaaaaaattgtatttagactcaatttatcccaaataaaagtatattgccaactcccatcttcagagtttatatagagtttatggtataccttaaaataaaaaaaataaaaaaaaataagctcgttttttatcttaactatttgagcccaatgccaactacttatagatactttataattcttccaatctccctcttttaaatacacactatgcacacacttcacccaaatattattttccttagccccaatatatttccccattgcacacttattccacaaccccacatctctaaaaccaagatccccttagtttttagctttacaaacatcatcccaagaaactctaccaggaccttcgtaatttgaatttcctttccatcaaaaagcacgatagatttgattaattcttttaataactattttatgtagaacatcaatttgagcccaatatgtattaatagtaagcaaaatagagttaattaagacacacattcccacaaaagagagattccttgaactcattgtccatattttgtgcaccattttatcaattaagcactcaaaatctgcctttaaaatatgcacttcttactgatcttcatgcccaagtaattgaaaggcaaggaatcatctttcatagttactccatatattgcagacttacctctattaagttagagccataagctttctgagaacagctaaaatccccttaataataaggattgatgtaaacgcacctttcctaaacataaatagatcatctgggaacagatcaagtgagtgaatttcatattttcacacctaggatggactttgaataagttaagatgatgagctaccttatccatgatcttagtaagatactccattctaataaaaaaaaaaaaaaagcaaaggagacataagattcccttgtcgcaaacctcttttagtctctatgcaacatgtgatctcccctttaatcactacaagaattgagatttttactaacgtaattggtaaactgcactcgcaaaaataacttttagcgacgctgttaagtagtgacgctggcaaaagatccttctggactagccaaattttgtaagatttaccagtgtctaaaggtgcctagaaaaccatgctttgctagcgcagtttggttattacactagtagtactatttttttccagcgtcatttgcctatgaatccaacaaaagtagacacataacttcgctagaagcgggagtattttggtaggtaaaaaagatttattggccccatgcaaaaaaaaaaaattaaaaagaaataggggggaataatcccacgcaaaagaaacttaggaaaaaattgggggaaagagtttagtaagcatctttgttgtattagaatgctagaaaaatttgaaatcgataataatgaaaagcttgatacgacatcatttttattaaccgcattttagcaatgttatttttggttttgccagtgccatataatgtgcggaaaaatctgagttgaataaaaaagaaaccctcgcccttttcccttcttcctcctcctcattttcatttcccttctctctccggttccagtgttgctcatgtaatgtcctactaatttaggcgcgctatagtaatttttaaattaccgtgccaacctttgctaatcacagagtttagtgaaaaatatgattactaaaaacttttacaataaatataaactttactatacattcaaaatataaagtttacaaactctgagttctcgagttcattttacaaaatacaaccaaaaaaaaaaggtgtcgcccagcgactaacaaaattgagcccatgatgtcccgaagatttgagcactttaggtctaatcgtctagatatgtagaatcttcattaagcttcagactcactgctaatcagtttttgccttgcctttacatacacagtagaaaaaatatctgtgattcgataaacttagtaacaaaagcataaatcataaacatatattttgtcttgtaacctaggcacgcccacacacctaatcacaagtataacccacgtccaacatatttgaatctttaacgttctagacaatcaataaatatactatatgcactcagtaccccgaaagtactattgttggtagtgttgtgtaaagcccgcttagtttaatttggaaattagcagtcaattatgattaattatgaaaattattcatagctatttaaataatt

SEQ ID NO: 27179 - DNA, 2263 bp, Cannabis sativa
  modified_base (1611)..(1611): a, c, t, g, unknown or other
ggtctacctgctcggccatcaacccctatagaaggaaaggggaaagccgtcctggaggagcaggaagactcgtcggatgacgatgccctatcagtacttgttcgggcaaattcccctgccaaagtgcagagtacatcattttatttttaactttcttaattatcacgctttcttatttcttatgctcttttttgaccatgttacttttatttcgtgcagacatgggttagaaaatgctcgaggctctgaagaagagagtgggaggaagctcgggcttatctcctccgtctaaaaagtctaagggtggtgagacaaccccgtccagagagaaggcaccaactgaagtggtcattaatctctttgaggaacaaactgttgtggaccctcctatctcaaaaatgactaagtctaaggattctcgaagaggtagctcggacaggccagagcaggcgaggggtagatctgagctaatcagaagcaggtccgagcagatcaaggcccctgctcaacctccagtactgcacacagagactaaaagaggtagagaaattctcacttactatgtgacgtggtcggttcctgaggtgaatgagcagctggctggggcagacaatgacctttctctggagctggttatgggaggagtcctgaaggagctttcgagggtaaatcttttctgagagtttgctattgtccttcttcaattagctcagattttattattctttctctgtacagaccggtctgaagatggcttatgcttattcctgagctaagttggctgctgctaagaacgctgccatttccaacattatgcggatggaagtggacttggctaggaaggacgccgaggaggcccgagttcagctttgggctatctggatagagctgggagaggtcaataagaagcttcttgctactgagaacaagatggcctaactaaccaaggatctacaagccatgccatccaccgaacagcttgaagctgacattgcctccttatctaaggaagtgaccagccttcaagaagagagagaggttctccagactctttttcgcaggttggaagaaaagaagaaaactaaggaggaggagcttagagctgaggttgagaagtataagtcagaggccatgcagcacaaatccgaagtggagaggctcggagggaaagtgaatgccctagagacagttggtctcaagattttatatgattttttaaggccaatcccaaggcaaattttgagtacttgggcaattccaaaggcatgtttctcaaatactgcactactcaggcggcatacggggacttcgaggcgaccacttccacctctccaattgatcaaagtgttgaagtgccccctgctcagacaaatgatcctccagctccagctgacccagttgacccgtacaaagagcctgggactccagctgtttgaattgctttcttttttctatctcttttttatctgttcggccataagaccttttttaagacacagtgatcgaccaatcggtctttaaacttagaattcatttttcattttttggacaactagctgactgggcagcctttaatctcgggttttcatgcttttgttatctttaatgaanttcattctctgtttataatcatcgtgcaattgtgtttgttttattttttaccaaatgctttgtacaggtataagtgccccccaagtgaccgagcagacttataactcttggtcacgttttcatttatctttacaagtacactttcttgtttgttcggggttttgggttcgaccaaaccttttgtacgcactggatggtaaattaatatcatgataatggattcaactcaattttaattttgaaataaatatctttattcatttattgatcataaatatgtatgttaccgtagaaacttacatcaaagctattatgctgatctgatttgatatttagcttaacatgaaataaaacaaattgcagaaattaaaaatcgtactttaaatggtggtcatccgaccaaagtacttgagaactttatccaaacctttgggcgtggtccacccagcaggccattcacttaacaacaaatgttcttttgtttcgtacttgatatggtcatctcacctggtacttctattggtagtattttctttaacgttcccattccaataccttggtatcagtatgagttgcattttttcatcatacttacctaatttgtatgcccctgattctagaacttcgaccacctgatatggtctttcccagt

SEQ ID NO: 27180 - DNA, 3209 bp, Cannabis sativa
tacttattgttcaaaatgtaatttgttaatgaaaagttatagctataattaatagttataactttaatgaaaagttatatttgtgttcactgttaaaaagaacaattatatttgtgttcacttgttgtcattttggcaatttttttttctaatatttacttaaaatgcatgagctaatgtgacttggagcaggtgtttgcattgattcaaatttcttgtgtagtcctgagtttattacttttaactctttgggttctgttttcttgatgtctagattgttggcagcataacggcagtgttgtcttctcttcttgttgggaaggcagggccaatggaaggttggctttgatttttatttctcttttcagtatgaattgtacaaatttaatttgttttatttgtgttttggttacatgatgtgaatacttgttcttattatactgtatgagcccttctaaagataatttctactttaactgagaaaaaactaaaaaattcccaccaaggaaataaatagaccagaaagcaaagaacaactattaaaagcctttctctttctaaattgtcaaactgaatgcagagaaagagagctacttacactgtctttgatgcccctttaccaagaatcttattgtagttagaggaaaaaagaagaaaaaaaaaaacagtaaagattgaacttttaaaactaagtttgatcaacatgtccaaaattagatataaaagagtcctaaaatttaataaaatttaattttacttttatgtaaatcaaataattttttttaaataaacagattgaacttttaaaactaagtttgttctctttcccttttctttcttattcatgtttaagacttcccagttttattttgagtggggcaaaaagagattaaatagattgtagaggtaggtcaagagagcccattctctgactccactgaaaaacatttactatcccatgtccaattgagcaagacacttgtaatgttaggtcactgtcattttttgtagacattcagactaaagcccacaacaatcagtcattcacaaaagcataatttgttttagacatagaatttttttactttggactaatatggtgctaaagttatatatatatttagacttatagctgctaaatgtgtcaaatatatataaaacagatggctattttttttgaatttctgtattaatatttttatgttcataattattaattttttttttttttttgaattgttgagcaaggtttggaagcttaaaggcatagcaagttaaggttatctttattaaagttggtaagctactaaactcttattcttaataatttaaaaatgttatatgagtaatattttagatatcatctgtagtgaagtaggttctgcgaataaatatactgcggtcggatgggtggaatatatatgcatgttagaggagtttgaatatcttaaatattcatccatagtgatagtgttttagctatataattggtaattaaaattattttgtgcagtaaaatacacacataatgtcgatagacaagagttggattaacaattcaaatcgattgtctaatgattatgaaagtggggctttggcttttgttgagagagctagacaattcgtagactcgaggggattggtgaaatgtccttgtaataagtgtgtgaacgtcgaatttcaaacgattgatgtcttagaaagtcatctctttgtaaatggctttttacggagttataccaattggaattggcacggtgaagaggaaataataccaacaagaaccgcagatgtaatagaggaagatgagatgatagatattgttagtgacattatgcaacatgccaattgtgtagatgaagagaacgagcatgaggagattcctgagcaaggatttaatagtagagtagattatagtgatttatttgaggagataggagctccattattccctggatgtcaaaaatacacatcattaaatttcatggtgaagatgatgcatttcaaagtcttaggaaagattcctgagaaaatatttgatggaatattggagttattacatgatgcgtttccagccccgaacaaacttcccaaaacgcattatgcagcaaaagttgatgcgtaaattagggctggggtacgaaaatatccaagtttgtccgaataattgcacattattttggaaagaacatgctggaaaatcaaaatgtcctatttgtggggaggatcgatgggtggacaataacaccaagggtaagaaagtgtcgcgtaaagtgatgcgttattttcctttaacccctcggttaatgcgaaaatatgcatcgaggcatattgctcaacacatgagatggcatcatgaggaacgtatcaaagaagaaggtgtgttgcgccatcctgcagatggggaggcttggaaggattttgatcgaaataatccaacgtttgcaatggaaccaaggaatgtgcgtttaggtttggctgctgatggattcaatcctttcggtaacatgagtcaatcttacagtatgtggccagttgtgttgacgacgtataatttgccgccgtggttgtgtatgaaagagactaatttcatgttgagcctattgattcccggtcctaattcgcctggaaaggactttgatgttttcttaaggccattgattgatgaattgaaagaattatgggtgtctggtgtacgtactcgagatgctgttgatggtagttccttcaatcttcgggcggccttgttgtggactataaatgattatccagcaaggagtagtctctctggatggagtggtcaaggctactatgcttgtcctacatgcaatgtggcaacaccttctattcgtttgcataaaaagattgcttattatggccataggcattttttaccaattaaacatcgttttagaagaaacaagaaagcatatggcactgttgaaaagagaccaccaccggaggaactaagtatggaagatatgttcacacaaatgagttttataccagaatctcttcctggtaaacatgaaagttatggcgggcaaaaaagaaagcgtacagaagaacaagttggttggagaaaaaagagtatattcttcgagctcccatattgggccaacatgaagctacgtcacaatctagatgttatgcatgttgaaaaaaatgtgtgtgatagtttagtaggcacaatagttgggttggagaat

SEQ ID NO: 27181 - DNA, 2983 bp, Cannabis sativa
tttttctatattctaaatttatagctacatgaggttgtctttaccttccttgggcataggtaaaacttggttgggttgtgtttttgctattgcgattcaattttactactgctattagtcttgtctctgtcatggttttgagtttttagttttgtctcttttacatgatttagtattattgtaatgtctgtgtgacatattttttttttaaacatgaaatatcaacttcattgtaataaagcattcaaattactaattggcatgaaaatttgtcagaacatcaatatcatgaatgctacgatcagagtaaaaacaagagcgccgctgatcgtttaattaaacgaatactaacattagatagagaggataataaaattttacaatcatgaatcaaaccaaagacagaagtcatttgttgatgactgaagactgcttggacagtgagtagactatcagtttccacctctaccgtattccaacttttgtccttgagccaactaagtgcttccttaactcccaaggcctcaacaacgtcggccgagaaggacccatgagagtacctggccgcaaaattaatgatcctgccttctgaatcacaagatacaatacgaaacccatatgcatggtcaatctcaaatgtggctccatcaacattgatcttgatcgtattataagcaggtttagtccaatgctcaaagttgttaccatcacctaacatagaagaggataacaaacttgttttatcttgagcttttaaccagtgatcaagagtagtccaagctgaagtgacaacctgagaaggggaagaagctttttcatcccaaactagagaattttttgccttccaaagtgaccaacatagcatcacaacacggcaagagatatcttcatcaaaatcagtgaacacataatgaagaaagtgtcatggttccaacaaagttagcatgggggaccaaatcatccttttgccaacaacttattgcaaaggaacaactaagtaagatatgtgaagcaaattcagcaacatgatgacacacaaggcacatggaagaaacacttacacccttagaaacgagttaaagacaggttgggagcacatcagaaactgcatgccacatgaagttcttcactttaggtggtatcttgagatgccaaagtttacgccaaaaaccggagttgttctccccaggtcacactacaacaaataagggtattaacgacattaaaaatatgtcgtgtgaatcattcgaggacattttttgttatgttgttgaatgggggtgccgtagaaagtcttgcactttcaataatatttttttagtatcatgtttattgttgttataaatttttttaacaacactaatataatgacatacattgaatcttttattgtcatattacaaatgttatgtgttatatttttaactattagaaactaatatggttataataatacacatgacatttgtaaaatgttatgtcaaaattttatacaacatccaataaatgttattactaatggatatcagtgacacccaaataatgaagttaatagactaatatataacataaaaaatgttatgtatataagcttgtacaacttctagaaagtgtcgttaattatctgttaatgattttaaaattatgtcactgaaaatacaaaaaaattattattacatattttgggaaaattgattttgatttgtttaatgataactattttatcttttataatttatatatattataattaaatttttatacaaatcatcaatttcgaaaaatcatattttaattttattcatattaaagttcctcattcatacaaaaaaaaaaagtttaaagagaattctaaatattacaaaaatgaaaatctaataataaataaaaaatacattaattagttaaataataacattaactaaatgttaaatatcataagtattataataacaattttaaaatatcacaattactgtatcattaataatatttttaatatgtcgataaatattattttacatgacgtttattaaaaaaaaatgtcattaattatattcaatgatacttgttaacgacattttgaaaaatatatgtcatcttaattaatattcaataacattagaatgagaatttcataaataatttgtggtgaaaagtacttgctgttgtagtgtcagatattcttctgattttgcagcaatttgtaggccgatttggcagaataatggtctgttttttcaccaagccaagcccaatgatcatcagaagcagagaagctgagaggaattcccaaaattagattcacatccctgacattaaacatgtctcgaacaagagagacatcccaacttctatcatgaacatgaaacagagaattgaccatatgatggttaaggcctggagtagtggtgggtacaaaagggttgtcattatcagggagtcaaggatgagccagaatgcttgtagccgtacatgtgccaatgatcctcctagcaccagagcgaaccaagtgttgggcgttccaaatgctacgccaaacaatgctaggattactcccaagttcagcattaaggtaatcccaacggggggtaatacttagctttaaagacttgactaagaagagaagaatctgaacataacaacctccacccttgcttagctagcattgcaagattaaaatcatggagatggcgaaagcccatgcctcccaagtctttatgaacagccaaccggtcccaagacatccaaacaatgccttgggcactagcactttttgttttccaccaaaagctggccataagtttctcaatgtcgttgcagatttttagaggaattaaaaacacactcatggcataagttggaagagattgaatgacagtcttcaacagattttctttgccagcacgagagagaaactgaccatcccagctatttaaccgattaatgatcttattcttaagaaagccaaggacaacagttt

SEQ ID NO: 27182 - DNA, 2439 bp, Cannabis sativa
tttatttttttcaatcaaatcaatattgtgatttttttttttaactcaaaccaaatcataattattattactattttctttttcatgtttttaagagagacaaaaaattttattgtttagaaaagatttatctttcttttcgtattggcctctcttaatttttcatgaatcttacaaaagaaaaacatataaaaataataaaaaaaaaaattattaagtcaaatatcaatattttctctatcatcataatcactaatcagggccaaactcacatgtagacgaggcagggcagtagctcttgaaagaaaatcaaaaaaaaatatgtgtaaaatttagttagttatgacatatatttataataaaaaataatatttatagacataatattactttagtgtaatgattaaactaaattacatataaagtatatgtcaatagtttaatttccataaagaacattgtttttcctcttactttaaattttggatcggtcattaatcgaatataacaagtagactactacaatacataaagaccattccctaatactaatgttgcaactaaaaaatcgtttaaccggttcacaaaatcataatccgttcgaatacaatttgagatttagaattagagattgtttatgtcaacacaatacattactaattttgtatttgaacatctaattgtaaaatgaatatatagttttgaggaaattttactgtgagagtattaattttgtttgtgttggtaaaaatgtttatttcaagcacttataaaattataactcaaattttcttatgattgtacattgtagagaaatttcacctttttactaaaaaattaaagttatttattgtgcttaaaacaaagctcaaaatagtcaattgtgtataaaaaaatgtgtgcaattaactattttaaattttggttataatatagaaaattatttaaatatttttagataaaagtgataccactattatgtattggtctaattaaatatataaatttgggtttaatgtaatttaaaatttaactaagaaaaacactgttggctaagggtgagttgttgagtagtgaggactataatgaagcatccattaactataattattataagcaatatttctttcaaaatcatagactcgtgataatattttaaatatttcaataataattttgcctattacatcgtgttaggtacaacaaaaagaacactaaatattaatcactatattggggaatcatttttttctcttatgttatgtccatgtcacttgtacatgtccaaaaacaagaaagttgctcccacagtgtgatttaaagaattatttattttttttagttcaaattgcaccgcaaatttttatttatttatattatttgtaagtatttaaaatgtgttttaggctttttttttaataagttaattgttaaaatatattttaatttaatttaaatatttattataaatgtttaaatatcattctttttacattggagaggaagattggaacttgaatctcctctttgtcagaaaaaatgtgaaaccactaagttatactaaataaatgtttaaatatttttattttatatgattgaccttaatttattgtatttttctcaaaacaaaattgcacaaatatttgcttaaaatagatgtttttttatttatttttaacttaaatatcacaatgttaatatattgaaatttattatctttaattttatatttattattatatgcatactttttttattttttttattctctatattaaatatgttttaattattctatttatctattgagggaagggttatattaactaaaatcatgtaacatcaatttaaattaataattttaatttatcagcttcttaataattcgaactacaaaacttctttacatacaatttattttgtcaagtttatccattctaaatttataacaaaaatttaaacctccaatttattagagattttatttataatagaatataaattaaaatatatattacaatttagttgtaaaaataatacaagaacaataaaagagattgattaaatagatgctacaacatatttatgtacactatatatattatatataaaggaaaggtagaagaagaatattacaatacatgtaatataatacatatatatagcagaagaaaaatatatatgtataatatactcattcacaacctttaatgtagattagtggggatcaacatgatttgaataatgtatgacacatttgttcaaaagcttatttcccctatctctaaacactaaggaaacttcctaataaatagctttagaaattgttgctcctaaaatcgcccaatgtacgtggaccaatcaagaagggacacgtggatcaaattacttgggaagaactgctaagtctttgtatggcaccaggaagcattattcgca

SEQ ID NO: 27183 - DNA, 4229 bp, Cannabis sativa
atttttatttatttattattatatttttaattttaatttaatattatatatttttatttgaatttaagtctttttttctaaaaggaaataaataaaatagtccagtctattcttaaactaaatacaaaattacttttagcataatccaatcttgttcagtctagtccaattattttgagttcaatccagtccaatcatgcgtaccaaacagactatgtgtagtaatatttgaaataaaaaaaatacttaaaagttggtattagtattactagaaatttttttttcattaaatttttaatatgactatttagtagtggtggtctggtcaccccaaatagtatgatagatgatacaaaatatcgcgacaataccaacttagatatatggggattggcattgataatggccataatgatagttgatggtggcagttataacgctgttgaaatatataaaagaaaatctctcaatttagtatgatctactataaaatcttaaagtcatttagtttaatataaaatattgcagtctattaatagtaagatagacactctaataatttaataattaacatacatttttcttatatattaaaagttcatgtcttttgacatggtttcttgtgtctgtcgttcttgtgtatgattgaggtctgttttgtctgttctattgttaaggaagtgtgtgtgtgaaaaggctttgtcctgttgctatcgacgtctgttttgtctgttctattgttaaggaagtgtgtgtgtgaaaatgctttgtcctgttgctatcgagattttgttctgaaaaggctggtctggagtgtttgtcgctatttttttgtcaaccagtatggctttgtctagtcgtcatacaggggctgtggaggacaaaactttgaggtttcatatcgacgaagaggatttggaagctgtcacagtcacagcggatgaacgggatgaaggcatagacgatcgtcggtgcctggtagggaggttcttgtccaaccgagtgatcgacttcaaaaaaatgcaaaatgttttagcttcgctatggcagccaggtatggggatgtttgttaaacaacttgataataatcgatttctatttcaattttatcatgaagtcgatatccaacgggtgatcaatggtagcccttggacatatgatcgaatgcaattgattattgagaggttaaaggttggtggtgacccgaagatgttagcgttgaatactcttgatatttgggttcaacttcatgatgttgaacccggttgtatgtcaaaattaacaatccaaaaagtggggaacacaatggggaaatatttggagtccgatcctaagaattttattggcgtatggcaggattatcttcggatgcaaattactctggacattacaaagccacttaaaaggcgtatgaagatcaccaaagaagatgggaattggttttggattaatttcaaatatgagagaactcctaccttttgttttatttgtggcattattagtcactccgacaagttttgcccacgtctttttcatcaaccaattgataggattgagaagccttatggcgagttcatgaaagcactacctcagcggaatcataaaaatattggctcaagatggctccgaaccaagggctggtgtcctccggcggcggcgacgactgaaactccaggtcctaggacgaatgaatctgcctccattaatggtggagattttctagtggctacagccgagaataatggtggtatggccgagaaagagggaggtaatcgtgggattaatttggctagaatgaagggagtgattgtgggtgatggagatagttatttggagggtcaaaggaataataatgctattgatttgggaaaagataccactattccacaaaatgatgggctggttatttatgataataaaaaaaagaaaaatgacaatagacaaccatgaagagaatcctgatgtggaaaaggatatgagtaacctttcaaaaaactcatctttggcaggccttggtattggggctcgccagtcattatgaaaatcttatgttggaactgtcgtgggcttgggccgtcacaaaatgttcagttccttaaggagttggttactaataagcggcccaatattgtgtttttatgtgaaactttgtgtaaaaagatgaaggtggatcatttgagtagagctttgggctttgagggatgctttgttgtggaagcccaaggaagaagtggagggttggctatgctttggaagaatcaagaagaggtttcagtggataccttttcggagaaccacattgactgtaaagtctcttttgaaggacaaagggagtttcgattcacaggggtgtatggtgaacccaataggagtcttagaaggaaaacttgggatcttttaacaactctccttggtcgttcaacattgccttggtgccttatgggagatttcaacaatgttcttaatcaatcagagaaagttgggggaaccttatccggtgtggcttatcgaagggtttcaggaggcaattcgcttgtgtgatttgagagacatggagatgcatgggcatcctttcacatgggaaaagagtagagactctcctagctagattgaagctagactggacagagctttggtgaataatgactggttgagcatttttccaatggctaaactcactaacttagaaatttctccttcagatcattctccgttattcctggaacttcagatgggtacggttcctacacatgactatcggtttaagtttgagaattggtggacgacgcatcaaggttgtgaggaaattattcgaagttgttgggatagaatggaaggccacgacatagaggaaaagattgaagagtgtggccgagagctacttcaatggggaaaagatgtttttgggagtttcgcgtcttgtatcaaaagctgtaatcgtgagttgaagcggtataagagtagaagggatgatgaggggaagcaacttttttatgatgccaaaaaggagctctttgcggtgctcaatcaaagggaaacgttttggaagcaaagatcaaaacaactttggttgaaggaaggagatcaaaatagtaagttttcccactccaaggctagtactagaagacgtaacaatcatattttctgcttgaaggatgatgatgggaatttgcgtcattgggatagcggtttagataatgtcattgttgatttttattctaaattgtttactgctgagcctactagatgggaggaggtgcttgattatgttactccaacagttcgtgaggatcataatgagatgttgcttcggccaattggggatgatgaggtcaaagatgcagtttttcaaatgcaccccgataagtcatcgggccctaatggtatgaatcctaaattttttcaaaaatattggtcaattgttggtaatgatgtgatcaatactgtcagagtctttttctgtaatgagtacatgccaaatgggatgaatgacaccaatattgttctcattcctaagaagaagaaacgtgatcggatgagtgagctgcgtcctatatccctttgtaatgttattgttaagatcattactaaagttctggctaatagaatgaagggattattatctgagattctatctttgaatcaaagtgcgttaattcctggaagattaattatagataatatcatggttagctttgaagtcttacactatttgaagaggaaaaagttggcaaggatggttacatggcgctgaaattggatttaagtaaggcctatgacagagttgattggcattttttgtgtgatatgttgagacgaatgggctttgctgataaatgggttcgccttatatttgtttgtttatcatcggtgcagtattagattgtaataactggtcatactttgggaccgattgttccaagtagagggcttcgtcagggtgatcccatctctccatatttgctccttgtgtgtgctgaatgtttttctgctgtcatcagaaggtttgaagagaagaagtggattcatggcatcaaagtggctaatggagcaccgttggtgtctcatatgttatttgttgatgatagcttcctccactgtaaggctacaaatggggaagtcactcgtgtgcttcaattgcttcaactgttttctatggctactggttaacaagtgaactttgaaaaatcttcggtgttctttagtactaattgttggaaattatttta

SEQ ID NO: 27184 - DNA, 4036 bp, Cannabis sativa
  modified_base (41)..(41): a, c, t, g, unknown or other
ggtcattgtcatatataatctttattatatacaacaccttnactttgatgtcatactacatccgtaatctgaatcgagattacttgcaccgaagaacgaacatcagtgaaccatacacgcaaccattaattaaagattccataactttaatatgttgttgactattttattcatagctaagtgatcttagttctccgtacaactacaagtcacagtcttgtatatgaataaggaatttttccatatttatatataaattattcaataataaatattaataagttaacattcatgctcatattataatgttcaactctttattaataatcaaaaatatatttatagacttttgagggtataaaccctaataatatcccacttgccctaaaagcaaattgacaatcttccttagtcccatattatttatatgacccataaaagatttcgcgggtagcatctttgttaatgaatatgtcaagttatgttctcacgcaatctttaagactgttacatcacctctctctaatatatctcatagtagatggtatgtcctcttaatgttcttgcctctcttgtggctcattggttctttggagttggccaccgctacattgttgtcacagtagagcaccagtggtttttctacttctataactacttccaaagctgtgtagaattttttcaaccaaatcgctttcttagctgcttcgtaagctactatatattcgacttccattattgaatctacaatactagtttgcttaatgcttctccagactacagctcctccaccaagagtaaatactgaccaagatatcgaattttaattgtctttgtctgattaaaaatgagaatcagtatatcgagtaggattcaactctccaccgaaatatacaagcatgagatctctcattctccgaagatacttgagaatgtgctttacagcaatctaggtgttctaaacttgaattagattgataacaaataataattcctacagcgtagcatatgtcaggccttgtacacaacaatgcatacgtcaagctcccaacttctaatgcataagggtactttctcatgtgctctttctcttgacgagtctttagacaatgatccttacatagagtaattctatgtctagacggtaactgttctttcttggaattctccattgagaatatttttagcaccttatcaatataagtagcttgagaaagtagggatgctcaacaaatctaaaaaaccaaaaccgaccatcaaaccaactagaccgtaactgaattttcaattctacgtcatcactgaatttggcagtcggttttggttataatttttttgatatggcgatcagtttcagtttttgaaataaaaaaatagttaaaccaaaaaattgccaaaactgctaaaaatcgccataaactgcccaaaaccagctaaaactgtccaaaactaccaaactgaaaaacttctaaaaatcgccaaaaactcgatggtcgatcttatacagttataatttctaaaatgtcggttatggtttttgttaaccataactgacccgtcagttacaaatttgtaaaaataaaccataaccgaccaattttcacccccatgagaaagtactaatgttctccgctttctatctctatagattttgatctcgagaatatagcttgattctcccaaatccttcatttgaaatttttcggctaaccacttctttacatctgataatctttctacattgtttccaataggtagaatgtcatcaacataagtaactaggaataccactacattccctttaatgtatttatatacacgggcttcgtctttattttgttcaaagccatattctttaatattcttattaaaggtgatattccatgatctagagacttatttcaatccataaatggatttaagaaacttgcacacctttcgatcttcacctggtaacacatacccttttggttattctatacgaatgacttcatcaagactgccatatagaaaagtagtcttaacatccattttccatatctcacagtcataagtgatagctatggaaagaagaacgggaatggatttaagcactgccataggagagaaggtttcgtcataatcgatgccttctcgttgtgtgtagcctttggctataagcctaggttaaaaagtctctaccttcacttcagcatttctcttcttcttgaaaatccacttacacgttatgggcgtaatatcctcaggtggagtttcatactcctagactttgttggtgcgcatagaatccatttcttgatccatggaacttgtccacttgtttgagtcagggtcttccattgcttctttctaagtcaatggattatccttgtttgtgtcagagataagaacatgtgcttcatgttcatagcagacatgttgtctcataatcctcccactacaatgttttactggggtatccttttcaggaactgtggcaatcgttgtcggtcgttcaactaatggtgctgaaattggtggttcagatatctgctcatttctgattacctagataaccacttgactatgtggtttgtgacttttcatatagtcttgttcaagaaaagtagcaattgtctatacaaatactttgttgtcttgagcacctcgagtttcatctgaatatcctacaaacctaggagcaagtttcccagtcttaggtttgagaacatgagcaggacaaccccagatacgaaattatttcaatttgggttttgtcccattccataatttcattggggtattgcttatgctcttcaagggtactacattcaaattgtagatagtcgctaaaagtgtgtatcctcaaaagtttagtggcagtgataagtaacacatcatcgatctgaacatgtctaacaaggtccaatttcttctctctgcaacaccgttttactgaggtgttccaggtatcgtaagttgggacaagattccttcttccaacaagtagtctttgaatttgcaatccaaatactcactaccacggtctgatcaaagtgtctttaatgatttacctaatttctttctaacaatagctttaaagtctttgaactttctgaaagttttagacttcttggccattaggtaagtatgactgtatcttgaataattgtcaataaaagggacgaagtatttataaccacctcgagcttgatatgaatagggttgcactcatcaatgtgaatcagctcaagttgttctttggctctattgccttttgcaaaaaaggtcttttaatcatcttgccttctagacatgattcacatgacgggagagttcaaacttttagttctctcaaaggaccatcctttgttaatcgatttattctatctagactaatatgacccaaacgtagaggccatagatacgtttcatcatcatcaaaaactttttgcctcttattttgttgtggcaatgctgctctaaacaattctttgtttaaaattaattgctcacttgccttgagcacataaagtctgttactctgttttgcagaataaataggcataacattcttggaaatagtaatctcattattaataaaactaacattgaaaaattgttcatgaaaaagagatgcagaaataatattcctagtacattcaggaataaaataaacatttttcaataacaaaaaaattattattaaattttagaaggactctaccaacacccttggtagacacttgtgctccattacccacacgcacagtcacgtccccatcagccagctcccttgactattcaagtatccagatgcatagaagaacaaatatgattagtggctacagaatcaacaatccataagaatttatcatcctccactaagttagcttcaagaaaaaataaatcacatttaactttcttaagctcggagagagatacttgttatatttttcttccattgtcccattacatcacaatttaaatacatgcctttcacctttttttccttggacttggggctgcctttgttcttcttggctttgcgtgactt

SEQ ID NO: 27185 - DNA, 2921 bp, Cannabis sativa
tatttgtttaatttctaacttttttttctaaaaaaaatagttttatatttttattgaatttctaattatttttctttattttttaagatatgatacaaatataaataagcttgattttttcttcacaaaatcttagtttgtttaaattatttattaaattttcaataattttagtttgattttttaagatatctattcataaataaaataaagtttagaaatattaatttttgaataatttaggttttttaagtaaactaaatatttttttaataatttaatatatttttatcaaaaatttttttaatatattttttaataattatattttttttaataaaaaaaagtgtaaaattttgtattagtcaaaattcagggataaacatactaacttttaacggtaaaattaagaaacaaaacttaataaaaataacataagtatatgtaactattatattttaagaaattttttaaacaaaccttatattttaaagaacataattaagtaatgtcaaaagttgaagtcatcatttaattaagtttaagagagcccaaccaagcctgctcaaatggaaaggaatctaattctaagggagagtgctttgtaaatagttctcctatatatgacaaatgcagactttttatatttgcacaaaaaaaaaaaaaatagtcaaagaaatatcacaaggcaaacaaatttattcaacacatatgcattagaataattaagataattatgtatgtttatgttttcgtacgtaattagcttctactaagaatattattaaaggacaaagcatatatatatatatatagaagattaattaattaattaattaaactctttcttattttttgttattttccaatattacatgtatatatgtaatatacgtaatagatgataagtccctttaaccaaccatgtatgtttataattgttctaattttattacctatatatgttgtttagaattattaatgatttaatttaatataagtatatatttagccaacttgctaattatattactttacttttctctccattaattaatgaacccaaacagtgtgacgccattttgccgtcttcaccatttgaaattaattctactctctcacagtcccatgtacatatatttaataattatttttcatttattttttttaaaaaaataattggaaaggcttaaataataatatttttctttataaactatcaaagtaaattttatttttaatttatgttccgcagcgatcatgaaattatgccatcattgatgtaaaatttaaataatttataaatatatatacaattaaaaaaaattattaaaattataataccgcatattcataaatcaacaataaaatatatataaaatataaaaatataagggattaaaattctctcaagccttcatatgtgtatgttagtatttatacttttttttttcttattattaatatgaatataataaattaaagtattaaaatattaatattaatataataaataaaaatattaatataattatttttatcaaagtattaaaattttttaaaaaataaaattatttgaatttaacacaaaaaataaattaaagtatgtaaaataaataataaaaatgtcaatatttaatagtggaacttaatattgctaaagaaagaaaagtttggggactaatttatcaaaatataaaatttggtgatcaacttgcaaaaatttatatagtttggaaactagtttattcaaaaaaaaatatatatatataaatatatatatttagaaacaaacttatcaaaacatatataattagaaattgtataaataagtctttaatttttgttgcgactaaaattctaattttttgtagtgatcccaaaacttgaccattatgctcccctagtattcaatcccaattatcatttcatatttcaaattacttaattagttaatcaattattttatttctttaattagcatgtagtgatgatggatgatcttgtaaacattgtcttgtcaacgatatatagctaggtatagggtattcttttaatcatgggccccaatatttcatcactaattaatataattaacattaattatgacactgtaattacttattagtgtagtgggccagctctaactataaaaataggagcttaataaatgctttgaagcctttagtaatgtggtgaaggaaaattggaaaatgggatagacaaaggttgttagtgtgtcaataataataataataataataataataataataaattgctatgaacttaatgatcactatctcaaaaaagttgtgtatttgttaaaatgagaaatattaattattctaatattttcaactacaagtgatgccaagttgaatgagacaagaaacaatctcatttttgtaatatttgacgttaccatcaaaccatatatagcttaattgggatcacaagtacctaaatattaaaattattggaatatataacaggatgtataaagaaccagttcttaaactaaattaaaaatgtttttttttttcaaaaaaaaaactaaattaaaaatgcattaactattacaagaaagatccccaaacaaactcgaaaaaatcaccactagaattattttttaaacctaccataattatacacgataaatggtaaaatatattgaatcatatataataaaatagactattccatttatcacaaattaatttttaaataaaacccataattaatactatatataaatatataatattaagcatatattaaataatggcatattagattcaattaaagatacataataaataataatatgattagtacttttcaacaaattaaggagctctattttacaattaatataataaagtgttatttttttctactaaaattaatttttttttttt

SEQ ID NO: 27186 - DNA, 1768 bp, Cannabis sativa
tttattaaaagataaaaaaataattaaaaataacacgtaattaactcacaataattataaattaattataaaataagaaaaagaatatcataaaattattaaaagaataatttattatttaaagttatttttgtgtaaataaaaaaattaaaagaaaaaaaaattatattgatgtattttataaaaaaaaattaaaaataaataataaaaaatgatgtgtaagtgggtccctaacacactattatagacccgtatatacctattatcacctatgatgtatttctttttaaataggtgttttttcttttgctgacataataaatgaggcttttaatattttattgctttaaatggaaattaatttgatttggtcactccgaaagttgaagattttcttatcaaaattcataaagtagaaaagattttttttttgaaaaacaaaggagaaggatgaggagagaatgtggatatcatgtgatcaatttagttacgaggtatttctatatttctctttttatttaattttaaggcttgaaaagacattgatggacatgagatagggagagaaaataaatggttcgaaattcgaatccaattataagggacaaaaaaaagtaatgtgttaggaaaatgagtggctggttggaaaaaataaaataaaatcaataatagaaataaaaagtatttattgatacacacaaaatgtagtagatcacagtgtagcaggtaagatttttaggagaattgataaagcaaaaataaataagagaaaaataaatgtgttttttttttctttgaaagggaaaataaatgtgttttactagttatgaaatgttttttacagttgcatacatttattgaatttagctcgtaaagtccatttatgagttatgtaagtctttcagaataattaccctcaagtaaaatgatgataataataataatattagacaatataataaagatgcagaacattacatatgtgaaataaaacgaattgtaataccaattgttttggaaatttttttttttttggaacataatcgtagatatatattaaaagaaactagacctcatggtcgttacacaataagttttccgatacagagttgatcggtatcgatccatacacctggtgggtgaaagcccacttagcaacattgtgagctacagttcctactaacattcgaaaaataacaacaagagaaataatgagaagacttggtacaaaaggagacgtagttctctagggcccaatgagacgtcttctcattgagagcgttgattactagtctcgagtcactctccacaataacatacttatactttagatccaaagcaacagacaccgccaagtaacaggccgtcgcttctccacaaagagcctccgtgaaatccaaccgggatgtgtgaatagaaatcaccctccccaggtgattcctaaccacaacagcagtacacatactctccaagcccacgcgaacatcacaattcaattttatccaatccagaggtggaggcatccagcaatccttcacaggcaacgaaggactaggcaagagagaagtatgtgactctgcaaaagaagaacaaatttagtcaatacattttacaatatcaggagaactattattatgtaccgcctcattacgcattctccatatattgtcaacaacaaaagaagcataaagaaagacatcttcaacccggatgcccctcatattaaggctccaaatgaacttcacccaatcccaaactcgaataccag

SEQ ID NO: 27187 - DNA, 2282 bp, Cannabis sativa
tgtagtaaaggtaatatgattaatatgaattagtggataacttaaaggaacttagaagaaataccttcctctctctccaattatctttttctctctcgattgtttaagaaggtagctaaggtttggattgttcagcttatttttgagaattcgagaaggaattaagagctctagttcgaggtatatcactttttccttctaccttttaatattccttagctcaagtttgggttttggtgtttgatttaaggatttaggttctgcggttatgcaagtagtttaattttatgctttgaagttaggataggtttatttgtgtagttttatcttgtgttatcatattgtagggtggtttgtacaaaattgaggttagagaacttgaattgggtctctaatggtgttttttatttctgggcatgttcttgaggttttttgcttgaattggattcattatggtatatacaggtgttctggaggcttttggaaagtttgggattgaattgtggtgttgggattgattttggagtttcctgcacaaaactggtcgaccggttgagggggacctaggaaatcggttaactggttggtccccaagaaaccccactgaaccgatttactagttgggacaactctaggaaccctaatttttttctctttttgtgatgtttggggtattgtcatgttatctatcaatcaggatatttttagttttgattttaagtccttaggaagtgttttagcgtgtatctcatcaaaatttcaaatattgtaatatagggccctgtaaaacgtcgagctactgttgcactcaggctgaccagcacatctgagcacggaaacgaggtaagatagcataaagtatatatgtaaatgaatgcttgttattatttgtttacactactaatattgaaaagaggtagtttaaagggtgttagaacagtgtaggactttagggtagttaattgttaccaatacaagtaccacggggtacggagtgcatgtggtacaacactcagtaactcttgaaagtacagtgattgccttaccaataagagtactgagttggcactctagtgcatgtggtatagcggtcgtacttccgttaggaacattcttaaccacttggtgagcttaacaattggctcagaacgacttaatcataaagtcggtatcgcattatttatatatgtttatgcatatcttactgagtcggtcgactcatcagcttgctatatttgtgcaggtaagggtaaagctaagccagaggagcagtgagacgggcttagcaggaattgtacatatcgcggcagtgcaacctggagggtcccgatcttactacattttgaattatttttggtgttgcattttgtaaaaataaaataatatttatgtaactatatatattctatgtaattttcaacaatggttttaaactcaagatcttgacctgcgaggtttataaatataataaaataagtttaatctcaaattaggaaatttttaaataagggctttacaattttggtatcaaaagccactaggttgttcactaaaggtcgtcaagatatgtacaatcaaggctagtatcgtgctcaactcaggattccgtaagcttttatcttttagaaaactgtttaagttatattgcctttacgtgagaaatgttaattaaaccctaaatgtggtcttggaaatatattgaccactgtctaacctaaatgccttgtgggttcgcaggctaagtcctaaataatggacgcctaacaaaacgtaagaggacagggtgaaatggttgagactggaggtggtcgggttagtagaaattcccaaaacccctatggatgcggcagaggtcgcactcgttctaatagaggtggccaagagaatctaccccaggctccttttgattgggagccaagatttgttgagatgcaggcccgaatcactcaataagaggaagagattcagagacttagacagcaggatgctcctattaagcctcccccacaaccacatgctgttatggtgcctatggtgccggcagaacaagcacctctagtatttttgcgaggtcccaatgttcttaaggcagagtagtggttgactgtgattgagagaatactgaatttcatgggagtgaccgaaaatgacagggtggcatgtgccacgtttcagttccaggaagacgccctggtgtggtcggagatggtgtccctcacacgggacgtcactagaataacctcggaagaattcgaagatttgtttaatgctaaatattacaa

SEQ ID NO: 27188 - DNA, 4230 bp, Cannabis sativa
ttatttcattccattcctattccttttcacattcccattcctattccttttcacattcccatttctattcctattcacattcccatttctattcctatattcccatttctattcctatattttcattcctcccaaccaaacgccacctatactaatgtatatctataataaattaattaattaaaaaattagcatttattcagttctaaataattagaataattataactttataatataattttgttttatcttattaagagtaaaaaaaaaaattaaagtttaatagaataattactcatactattaaaaaaatatacaaaaaatatcaaaattcgaatacaaaatttaatataattttatgattctgcacgcgaagcacgatttattttatagttatcattaactttaagccaagtcccaaaacttggcattttattcctagtaccatcttaattgtttgaattggctccgaacacacccaagcctcatgtcccaatcgaccacagttaaagcacataaagggtaaggatcgtacctcaaagggagccaaatcttgcaaccatcactagggaaaagaaaccccggacaaagaggtttaaaaatgtcacaccatactttgaatgtaaagaatccctttgccacaattctagaaatgtcaaccttttgaacctcgatgatgtcccctgccaagctcgccaaacgttccagatttttttgggtaatggagcgaggaggaagatgaagaatacgcccactaatcagaaatctgattaaaacaatctcccaattgagtggcatttgatccatctttccaagattagagtaccattgttgagaaaccaatgattcttggttaaaattctgttcatgtccaaagttgattgaaaggagaagactaagaacattgagtccttagtgatgagtttaatctcaactccccaattcttgtttgaaatcccccaaactcgatcaagaatcgtcttcagaagagaacgactcattgaacgattggagaacagacgaccaatcgcacaaagcttttcaacctcggcaccccatcttcattaatttcccatccatcttcatccaaatcgaaaggttatgagttcttgaaagcaggtcgtccatggcgatttcaggcgtgttaggcatcctttcaggaaggctcttctcgcaagagagtatgtttgagtgtgcccacgttgtttattatttttcttatcttattaagagtaaaaaaaatgaaagtttgatagaataattactcatactattaaaaaatataaaaacaaatattaaaatttgaaatacaaaatttgatataaatttataattctgcacatgaaccacggtttgttttctagttatcatatatatgcatgcacgattcttacttataaactactttgggatttctctactaattatttatttttgaacaaataatatttttaaaaattctcaatcaatttattcaaaaaaaaaaaaaatctcaatcaaataagatgaaataagcgtttgtttttcaatatttcttgatatgaggagtataaattacaaattcatattgcaatcaaacttgtattttcaaaaataattatcacatgtgtttttaattcatacaatgaactcctcaaaaaatgatctttgttatacaatgtgcacgattttaaattgatctcttcttcaaatgttaaattcttctaaacttttcgaagttgcatttcaatttggatggtactaggagctccaaataaaaagtatcttctccattcacttttaaaatttccattatacaattgtatatatacaacacatatgtactgcacacacaaaacaaaaataacaaaaacaaaaaaaaaagttgagattcaaagtttaaagtcgagccttctcaaccaaatggagtgaagcaccatatgaatcatatcaaatggttgggctggccggttcaacacaaaatgtctcttaaccttagatactctcttgtataattttaggtacttctcatttggaacagcttgtaagattttcttaatgtctggtatctttgagattgggatttcaatggaaaattggctccaatcaagaacatcactaaatggtaaagagtaactctgagatagaatcactgggacacaccctgcatttatagcctccaccactcttgggcttgccacttcgtgtccacttgggcacaagcaaaacttactttggcccattaatttgtgatagttttgggatccagtgagcatctcgtggacttggacatcattgtctttgtccttccagtgtttgagcaagatctttcttatacctccatgcaccctgcctgcaaagaaggctagaattgggcggttgtttgggccttggcctgcttttggtgggcctagttttccaactggaagtttgatttcaggcagtgaaacatctctgctgggcttaaatccttctgaagtgttggcattgcataaaactctcatgaagtttttgtataggtcaggcttgccacctgaaatttgtggtccctaaatataggaataaagtagacaatacattattcagattggaatctttttctgaactaccccaataatctcactactgaagtacacaaaaagtaaaaaaaaaaagacagaaattagaaaaactcacccaatcatggcaagaaaccatgaaatgatcagcaccattgcttctattccaataagaatacttattggctagaacaccaacatagtcattcacaagtctatgtagacgatctggtttgtaatcatcttcagtaattcttggcttgtaaacgtagtgaatgatgttagccacactaaatggcagaaaaaatgtgtgagcctcctctggatttcttgcccaaaatgggctctttttactctctatttcatctatgaattgtccttcaatcccatatatgttgttcactggtcccatgtggaatattgggttctctccttccttatagctccatactttgaatcttttcaccatctctatgtgactcctatttttcttccataaataattatcaattttaatataaaaaaaaacagctctaaattttaacactgatttatgtttctgaaatgattaagaagagagtactatgtatatacttactgatgaaaagcatatgggtttctgtaaatggaacctcttggcacaaagctctcatttttataagacttaaaacttttagacacagtagctttatgaatagctagtcgagcctgacccaaatcatattcaattctctccaaccttctcttctttttgctcttgataatctgctcaaaaagcacacaacaaaagatggtgtgttaaccaaagatcaaaccataaatgaaacaaaatatattcacaaaaagtaattctccaataatgcttactttttcaccacccaaagtaccatgactataagtagtactattgagtggagtagtagtactactagtactggtactaagagtattattaattgaataactataattgagaggagcatataaagagtgaatgattagctgggtttggtttaaagataagttatgatttagaaaaagaagaagaaaaagaagaaaaggtgaaactaatagtaacaaaattgaggagatgcttaagggtgaggtgcccatggtgtgtgtcggccggagtaagtagttggctaaatggttaattcatttttttcttagtgttgagatctcaccatcaaagaaagaaagactgacaagaaattgatcaaaccacatggtttattgtgggggtttgcaataaatgataacgtatttagcccacatttttacttatattagtttttaaataattttggcattattttaattctaagtttgtccatatctcttttcatggggagttgatgtcagttttttttttcttttttttaataataatattaattaattaataaatacactttgttttagtgaaatgtcatgtatgtctagtatgtctagtctattaataaaatttcaaatcataattataatttcttaaaagttatgtaatgcaatatgaaaaaaaaaattagacactagggtttagctataatcttacctcaaatatgactaataataattattggaaaattttattcacactccaaaattttttaaagacatcctattttaataattttcattttatataaaatttatatctttatttatgctaattttttttttaacttttttc

SEQ ID NO: 27189 - DNA, 2330 bp, Cannabis sativa
acgtcttatctaggcaccactagtacccaatagtaatgctctattttaaataatcagatatattattatttgatataattaattattacatattatttaatttaaatattattatacaaaactattaaaaatttatagtgttgggcacaatatactgtgcctaaagccaactttaataaacgtttaaaatgtcaaatttgaggatctttagcactaaatttatttcaactccaaaaagtattcttattatttagagctatttaatattttttgctccctgaactattatttatgtattattgtgcctctttaacttttcagtcagttaaaatagtttttgaactattcacagtgttataaattgatccttctatcaacttttgtcacacgtgacaaataaaataatagcatgtctgctaaaccaattaccacgtcagttccatgtcaacgctacatgtataattaatttgtaaaacaataatttaattttacgtaatttttttaattattaattaatttttagtttaatgacttttttaaaaagataatttttatttgtttaatgttaaattatacacgtgacactataataattatcttaattagcggcggacgactttgccgctaataatccccaattcgactgctataggctattagtgcgacaatcccctgctattaaatggtcgctccgccgctaataatattattagcgacgtgcattagttagcgacggagtcccgctgctaatgcccgcctaatgcgttttaatgttttttttttaatttttttattgttattagcagcgggatctgccgctaataatgttcgaactgtaaggccagaaattttctcacccacatattagcggcaaactcccccgttaatagtatttgcagcgggcaatagcggcaaacccccctccgctaataatttttttttaaaaaaaatgcactattagcgacaaatactgtggtcccccactaatactgccattattagtagaggatttggtttgccactaataaattcgctgtaaattaattaaattgttgtagtgtgatgttgatgtagtaattggtcaagcagctatgttatcattttgtttgcaacatgtgataaaatttgacagaagaattaatttacaatactatgaatagtttaaggacaatttataagaggtttaaaaattcaaaaggtacaataatacataggtcatagtttagggacaaaaattctaaaaatatattatttacaacattatttagagtgtactgtatgtagactacaccattattattttaataatataattatgatttaataaatagttgaatagtaaagtaaatattatattttattgatataataataatttaataaaaaatatatatatttagtgtaaactttagcattaggattggaattagaaaaaaagttagtgctaaaatttcgctcgttttttgtgttggcttaaccctaaatcaacatttattaaatttaccctaatagctagcaattctccattttttgtttgtttgttttggaataaacaattctcttattttaagctccatttattatcattttcttcttttgaaagttccatctattactttaataagataatgtaaccctttccaataaatttttaaaattactaaatgataaaataattttttttttctgatattaaaatgataaagtacttttttttgttttttttttgacatgaaatgataaagtacttaatattgttcttgtttgacaaaatcatatacacgggaaactaaaaaatgaggaaagcacaaatatgtggacaaacattaaattaaaaataattaatggattacaaatatgtggacgaacattaaattaagaataattaaaatcacttatcttcaaatttttagctaaaaaaatgataaaatagtgttacatcaggtgatcaactaaatcattcttcattttagctcaaacaacattcatattcatgctttacatgtagaaataattttctaaagtttttggacttcaaatatttttcctcaatttttatagatttttctattatttcaacattaattatttgtttattattatctctttcttacattttatttattttttcttattttaattaataacaatcatttaagatataatattatagagaaagtggtgtatggtttaatgtataagtatgatttaaaatagataaaattgattgtcttgataaagtatattgaagaatagaggtagagacgtgatgtgagtactctaagggcccgtttggtacgcaggattggattggattagacaggctaatt

SEQ ID NO: 27190 - DNA, 1750 bp, Cannabis sativa
ttatatatgagacatttactttggtgacttttccagcaagttgacttttctgttgacttttccggcgatgttgacttttctggtgacttttccggcgactgcaatttttccgatgacttttctggtgctggtgacttttcctgtgccggcgactttccggcaaaacttattgttgttttacaaatatggaatttctacttttttttataaaaatatggcataaaaaaaaccatataaatgttaaaaaaacaaaaaaaaaacccataaccacttagctttatttatttatgtcataaaaaaataaactcttacaattttcccatattttggataatttttacccgttaatatcctatgtggcccattaaaatataatttacatattaaaattttaaaattaataaaaatacttaattaatatttactttttgatttaaattaattactattattagttttcagaattactaattaaatttattaatttttcttcaaaaattaaataaatagtcgaaaattaattttattataatattgagtgagaaaaattttgtgacaattaagatttgtttgaattagtattcattcatatatttaattacgtgacaattaaaactagtttgttcaaattttgaatttgaattaaattctgtagtatcattagtaaaaatttacaaaaaagatattagatttgatattgattaaataaataaaagtggtttagatacaaccccacgaaatgggttagtgttacacttacatgcaacatgtagtgtgtatgtcggtcaatttagttggtttatgttacattttattccacctaatgtaaagaatgggttacaaaaatttaagtataatagtgtgtacattggtcggtttggttgcccaattaaaaaacaaaaaaaaaaaatagtaactcgctcaatgaaattggtcggtttggtcaggttaacccgtctatttttttttatttttatattcaattgttatattttagttaattgtaataataagacaaatatatataaattgaaattaaaattcaaatctactaccataaaaaaacatattagttttaactttataatttttaaatagttatataaattatatgatatataaatatataaatatatatataaaaaatcttcttaatcgggttggtcgaattagttcgggttaattgggcgggttggtattattttcaacttgcccaatataaagattggacgggttatatttttgtcgggtttttttatttgtatttttcgttgagttatctcaatttagtttggatagattattcgagtttgacattttaagaaaatttatgtacaacccatgtaccacatattagagcaatcaatcaatagttttttgtgtcattaattatttaattgataaaatagttaaaaaaaaaaataatttttagatatttaattattttaattgatttgaataaatttcaatgagttagattttatctctaattaattcatttaaatatttttattaaaagaagataaattctcactctattagatgagatttgagattgtattattttttttcagtcaacatgttaaccaaaaaattttggcgatgtgtacaaaatttttgacacgtcgcatgaggacaacacgctgggccaagttgggcatcaaatccaatgtccagatgaacctaatcgaggaaattagactttataccatttttatattgtcttcttttatttttaccctctttttta

SEQ ID NO: 27191 - DNA, 2712 bp, Cannabis sativa
  modified_base (189)..(196): a, c, t, g, unknown or other
  modified_base (437)..(439): a, c, t, g, unknown or other
  modified_base (471)..(481): a, c, t, g, unknown or other
  modified_base (1740)..(1754): a, c, t, g, unknown or other
aaaagagattttggagtttatttgttaattaagagattttgtatggtctaattaataaataaaataaatggaaattttatttgataattaattatattattaatgattagttttgacatttataggattgaaattgaaaaaacatggcattattgaaagaggattaaatggttgaaataaagtggcaannnnnnnnctagtgaggcccattagtgtggctggccacttagtgaaattattgcccattattttattattttttaatccatataattaaatcctaaaccatagttgaaatactataaaaggaacacgatgctctcattctcatccaacaactcacttcaaccaactaaatctagttttcattctctgataactagtagatgagagcctcctttatatagtgattttgcaccttattcattgttcttcannnattcgagccatagtgatagagtaccatgcccnnnnnnnnnnngtcaagtactcaatcatagtgcagaagacggtggttaaccaaacctagaggatagaaggagatccaggctcaaatcttattattactctgtgacataaagagacaagggttagagatttgagtggaaggagtaatgttattccactaccatcaatgtaaggttttctaaactcttatgtatttacttttatcgtattagagaattcatatttagggtgttaatgaaacatacatgttagtaaatctagatcctcataaaataattctaacaatactagtctatgaaaccgaatacataaagtatttacactgcacgtatctcttttaaaaacttgtttggccacggttaattattgttttgaaattcttacacacaagtataaatcatttttaataaaatattatgtgaattaatcgtatatataaatattacaatgcagcaaaagaaaaaaaaaaggtatataaaataattatattatttgaaaagaaagttttttatttgaaagggaagtttttttatataactattgcaagcaaagatttttaagcaaatttaataatttttagaggtgcttattgttggaacattatagaacaaaaaatgcctaaaatgatatggaaaagagataaaataaaatattataattttaggttatgtaaaggtttttgaaactttaaaagaatgtcaccattagagcatctctaatggggttgcccattgaagtgtcttgctacatatgcaatgtggtctaattttcaagactaaatttatgtaaagtgttggtcaatatggaccatggccacatgacattttctttcattcattcttttcttttttttttttgaggaaaagttactttttaccctaaaaaaatcattaatttaaaggcaatttttaattatatgcagataaattaattatattacataaaatatgcaaaataataattatacaattctgtacaattttataaatatttttaaataatcatcatattcacattatataatagaaataaacataaatatttacaattttaatatgttgattattttcaattgttttctacaaataaattgcataaagctaaatatgaaaatatataaattaatatttatatttcgatatattactattgttaactcagaaattctctctggtgacgtagacatcaatgtttgacacttggcatgaaggataacgtcacgtagttgagtagacctgagtcatagcagtctgttgggattttatgccctannnnnnnnnnnnnnnaatataatcttatatgttatcaatagaagattagaagtcatttatgttttacatgtgattttcatatttatggtttaatatacaatttttattaaatccagaacatatagttactcacaattatagtgatgtcaacacagtggaaggtaattatgattatatgcttcaaaagtttatgtcccatgattcatcagtgcactgggtttacactgatatgatagtcagcaataaagattatttacaccttggataagtgttatattatttccatgatattggagtatgcttgaactgaattttatactctcattaattgcagggtgtcaaaccgagacttgggtagtgtaatagtccatttacactcatgcttctcacaactcaccccagccgtcaaatcatgagggtttgagcgagttcaatttagaaccatttagatgagtgacaatgcaactcgttttatgggtctataaaacgtctttcatctctctttttcagattttgcaccttcatgccttttctttgaaccccaaactagcaaaaattttagcaccggactttctcctacttttcgttcgacagtgtcaagcacgactttaccattattgcgtaccacttctcccaaaaactcgatcttttcccatttgtaagttttctcttcacttttattattatatataatattttttgatgatttttgtataaataatatccttcttcgatcatcttttgtttattcctaagtcgtggttgtcgtacctaagggttattgaacacaccattttccttatcctcgccttctactccatttctttttgtgtttggtacaattagcactcgacgcttggcatagggaatttctaattcctgaacatgataccatccagagggggcctcttctaactactgagtacattcttgttttttagggaaccccattccctttctggacatagggctt

SEQ ID NO: 27192 - DNA, 2241 bp, Cannabis sativa
aaaaaaaaataataatgaagtgttaccaaatggagcacttgatagctacattttgataatttatttgttgtaattcatatttataatttttagcatcagagatgtgtacctagttttttttttcttagtacattactagaatgatttaaaggatttgtataataattttgtcaaagaagaagaataattgatataaggattcaatcattatagtagcactattaaaatattattttttattaacattttataatataattatgttaaaatattttatattgattaacataattaaatattatttacatagtattattgttacataagaataattgtatctctatatacataatatagtacttattatttatatactactttccttccaataagatacattgcctgttcaaatggtgttgcagcaaatttcattactgaggaacggcggtggaatgtctccatgttgcaacaggttttctgtccacttgatgttgagaaaattctcactatacctttgagctacttcagcaccaatgataaacttatatggcacatcatcataattcgggaatatatacggttcaaagtggctatcatcatgttacttttgttattttaacctatatcggttttccttcaaaaaaaaaaaaaaagtggctatcatctagcaactttcctagaagaagaagaccttaactccagctcctcctcatctttatcatggtggaaattcttttgctccctacaaattcctcaaaaagtcaagatttttgcttagcgtgtcattcatgatgctctgcctgtggctacttcccttgttcgaaggaagatcattattgattccacatgctccatttgtagacaagcttgggaaacaacgggacatgctctatttagctgtaaatatgctaaggctgtttggagagctcaaaacttaaggttcgattggcacgcatgtacatcgatgcgtaatggagactacctgttacatctttcaacaatctacaccaaattggagagggaacacatttttttgtacactttggactatttggagtaaacgtaactaagtggtacatggtagcaaagcaagagccgccaaggacctagccatttttgccactgtctttattcataattttcgagttgctcaacgtaagtctactgctgctgctatatctgcactagcaacttcacaccagcaacgaacaactgctacatcaccaacaccgtggtctccaccaactgcaggcgctcttaaactcaatgtggatgtggcagtcaactcctcaacaagtactactggtgtgggggcggttattagagatgctaatgggcatgtagtggctgcactgtcaatgtcaattgtaggtaactttgaatctcatgaaatggaggccaaaacactttttcacagtcttaattgggctattcaacaacaattgccaattatgcaaatcgagacggatgcactcatggtggcaaatgcattgaaagctccattcaattcaaattcctctttttcaaatttaatagttgatgttattagtcttttatcttttttccctaatataaatgtttcacatgtcaaacgttctgcaaataatgaagcggcccatggccttactaagtttgcattaagggtggatgagacttgtttttgattggaggttatcccaccgtctatttactctgttattgtaaacgaaacactgtttgtttaataataacaagtaatttccctaaaaaaaaattataatgttgattgcgttgtaatgactgtgaatttgtccattagttcatactcaatagtctaccaccactagtataatgagctcaaacatgctcatttacctcttagggtgattaagcatataatgagagttttgggaaatgtttaaatacatgagattataaggtcataaaaagctaagagtttttagagagggttgttcaccattagttctctcttgctcttcaattctatgttcttgttttctcggataaatttgatgataaagaaaagatcaagatgacattagagaacaaaactataatttatgaagtttgttcattattagataaatgccttaaatagaatgtttgatcttgataatgtatgattatgatttggtattaattattgttaataataacatgcttattctgttttaattttaacaaattatgttttttttttggtgaagagaattatgttatttaatataatttattttgtca

SEQ ID NO: 27193 - DNA, 2832 bp, Cannabis sativa
  modified_base (2003)..(2006): a, c, t, g, unknown or other
  modified_base (2136)..(2139): a, c, t, g, unknown or other
tttttttttttttttttatttagtaatatttgagaccttataatatattattatgcatttatattgtagacagaaaataaataaggctaaatcatcaagggccatataatagagtgtggtggggtctataatagggaccccattacctttggaaaacttgactatttaagaacacgtgtcagaaaaataaagagatgagattggatcaatcaaaattagtggccaatgaaggcacgtgcatcacacgcgaggttgatgattttgattgatttgtagcactaaataagatttttatggttcaaaatctccatgggaaaatcctaatgcatagctttacatacaacaaattaacatatcaatatcactatttagataataataactactcatgcttctataatttcatttgacaaaaacattgttttccttttccttttcttgaaataggtatttagatatagatttattgttattaaataaatggaataatgtgcctaaattttatgcattagaaaaactaaaaataattacactaatttaatgtttaatgacttttaagggcatctccaatgctagcaagattggtagagctcatttttattttcttaaatattaaatttacatagtaaccaatcaaagaaaaagtagatatcggtactcctgacagcaaaacattcatattatcaattgaaaaatcaataattattaaagttatatggactcacatttctcacagctacactcattagagttgcactaatgtggttgttttgtttacaatctgaaattatggtttcaaactctaatcaattcaaattaaatcatttgagaattgagactaaataaatagatttatgtaacgtttagttggggaggaataaaaatattaattttttttttatcttgtattggaatggtcattccttccattttaatatggaatagtcattttaccaaaaatgatggaatagtcattatattagaatgacattctaatactttaaaatgtaaccaaataaaataatagaataaaaattatttcttttccattctatttcatttcatttcattacctaaacgccacttaattattaatagtttgatagatctaaagtgcttaggattctctacttacgtcagagagttctaatcaacagttcaaatcaaatcacactgcctactttatatatagttaaaggaagatttaagaaattattttagaaatatacaaaaagaaaatatatatatatgtatatggttgtacaaaattttaaatgtttttacgatttttaagattttatttacataagataatttttttatacatttttatattatactcttgtattttgttgttggttttcttttaattatttgtatattattttgacattgttttcctcaaactttggggtgattatttcgtatttttttaaaaaaaatactataaaaaataaaaatatatatttgaatgtaaaaatatagagtttttaccaatagtttgtgtaaattttccaaaatttaatatacttcttaaatgtaaaattgacatttgataacaacttttgcatacattgtattctagaaggcaacacatatatcttttcgtataaaactatctataattaataattaggccattaggtcatatatatatatatataggtttttcatatgagaaaatgtggtataatttacttttataaggtataaataaataatacaaaaaaaatataaaattaaaaaataattaaagtttaaaatatggaaaaaaaaaatcataaatgaatttaataaaacttattaagttttgctagaaaagttgacgatgccagaaaagttattgccatcgaaaagtcattgaaaaagtcacaatcgttagaaaagttaccgaaaaagtcattgtcgccaaaaaagtcattggaaaagtgattagaaaaatcaccagaagtagatgtctcagatttaaataaaaatagaaccgattctataacataatgaannnnaataaataactcaaaccggttataattgaaatataactggttctgtaacataatgaatataaataactaatacaaaataacgtaaaccagttataattaaaatagaaccggttctataacagtgttatannnnataaaaataaataacacgaaataattcaaaccgattataactaagatagaaccattacaagcctagaaagaccttttgattcttggttgtgcattgatttacattagtgtataatattagtaagtatagcaagcatatgaaatattttgagttagtggattaatggttgtaattggcatgcagaaattgtttcaattgttagttaaatgtgttttatggtttcatgagttgaatgagaaaaatttttgaagtgcgtcaagagcataattgagttgaattctggactgttatgcataggtgaaattttttcataatcatgttactgagtctacttgaaaattgctcatgtgtctggggattgacttgtttaacttgtgtttttcaatttagtgtttactcgaggacgagtaaatgcttactttgggggaatttgttagggtgttattagtaatattttttaggttaattttagtgtgtttttaattaagttttacttttgtttgaagtaattttacgctttttgttatcatttatttttgcagatttaaaatagattaaacatggaaaatatggaaggaatatgatgaaaaaagatcaaataaaagatcactgctcacaaaatagggggtcaagcctaggcatggaatcccatgtctaggtccgtgtcgattgcatcctgtaggcgtgtggatt

SEQ ID NO: 27194 - DNA, 2787 bp, Cannabis sativa
agcttttaatctaccccatttacaaccttgttttctttaatcctgatttctaatcaattcccaaacttcacctttgtgtcattctggtttgcgacctcttcattaatcttgaagaactattttttagatcaactgactaagtttgcaaggctagttttagcggtaaaaatggtgttagttatacatgagagtagagtaatagaaaccaatccgaacgttgtttggttaacacattattgaaattatttggcgattgcccaattctttctcaatcaagattcaatggcaaattacataataataataaaaaaaaaaaaattcactagcaaagatgggttataaaaattatgcacatccaacccgactcataaaaaaaaaaaaaaaaaaaagttctgaaaaatcatgtgcaatcaatattgcgtcattgcttttaagtacccattattgggtctgaacaaaaatttgcaagtatggaatttcatcaaagatcaaactacaatatatacataatgtgaatattagaactacaacttcatcaaaaaattgcaagggatttcttcaatacatatttaatctagttctaatattaataatgtgatttcacatttgcccttcactcttaaactaatgacttttggaatattgaaaatgctaaaggcacctggtgcctaatacccttataaagttataatattacaattagtataatttaataataaattccacttattttacattaataaattataaaaaaccactaattaattatagagttatacctcatagcaatgctctttcaaattttgagattgataaaacaaaacccacgtgtacaaactaattaataaataaactacatattatatacacattttaattacaaaataattaatacgatcagacttttatatgaagggactgatcttatatacaaaaaataagtaaataaatattaaatattatttatttgtggcttgttctataacgaaaaataaatacaatttcaagtagagtagtgaaaaattatcttgtgcttatttaaatgcccaatctataactataatatcttctatattgttaggctgaatgtcataaaccattcatttatgtattatcacaaattagagtaatatatcttagtttgttatatttacgatgtcacacttttgacttttgtatatttttttgatgagagtttgtttgttttatgaacaaatttttttacttacaactatgaaaagctctgatttagccgaatccaatgcagaccattcttcaatattgaatttttaatacttggagttggccagacacttgatgcagataaggaagtaaccctattcgtttgctagaattgactcattttccatagtagtaaacctacacgattcacatgaatagatatacaatatttagaatctatagcagacaaaacaaaaagaaaacacaatatccaagcaaagtagaaaccatattcctctgatgtagactcactttcttcctctccccttcattcatttcagtaagaaactattagtgggtaccaatttgttaaattaacgcagataagagtttgaatctcagtcttacacacacaactaattgagctagactcatgtagggtaaacttagttttttatgtgttccaaagaaaagcctttacagcaaattgtttctgttaaaatgctattatataacactcatatagtagtatgaacaaataagtccaacattagacctttattcattttcatactaatattaaagcagacatatcaagcattgagaaatagacgagtggtgtcattagtgggcatattggaagagtataacttaaagcataccttaacaagcctgtcagcatatccaacaaaaagttttccttgccaaaataatacggcagttatgacagaactgcacggaatggatccaatttgtctgggatcgacatgaaattcatccccagagaattcctgcacatcattaactactatcaaaatttttgattctgaaatgagatatgtaaacaaatcaatctcattgttccgaaagaatatatatttcacaggtgtacctgtatattaattgttttgtcccatccaccactaaacagccatttcccttccattccagtagcaaaaatggcaccttcatgcagttgcatcgatttcataagcacctcgttcctccaaacctaaaagaggaaaccaaagacgtttcagtgatgaactgcttggtacattgtactgaattgtcttacattataatttatataacaatgtactaaagattaaaagaagaatggtggaccccaaccccagaagaaaacaaattataagcccaaataaagtgaggttcaaggaaatttaaacctttatgcttccattttcataagctgcaatgaggttgtgcctgtcaacagctagagacaagatggagatcagtgcagatgagtcttcccccactacagtcaacgcagtgtgatcactaagactccataatctgatggtaccatcccaactaccactgtagagaacctcatcacatactgcgagtgtggaaactaccgatgcatgaccgttcatagtgcattgcagggagccatcctaaattaacattagaagaaagatgactatacagttgggaataagcaaaggcaactaaaggagactatgttaagccattacctgtaataaccatgctttaattgacttgtctccgcttccagtataaacatatccatttgaaaagcacaaggcatgtataccactatagcgccaatccttc

SEQ ID NO: 27195 - DNA, 3394 bp, Cannabis sativa
  modified_base (2201)..(2202): a, c, t, g, unknown or other
acttcttagcaacagatcaacaatagtttctttttcagcgtgccttccataaacatcagattcttcaactaaaggagcaggtggcctttgagaagagttgttttgaacaccttctctcaagccaagagcatccttttgatcaagaagatcatctagtttcagaaggatctcagtgacatcatgctgcacagttctatcaaatgtggacaacaaaggtgagacagatttcagttggcgaaataccttggttgcgcggctgctagattgattggatcgcagagcttcatagtcaatcatgtcgaccaaatcgtcagcttgatagatgacatcttgaagcttgaaaagccattgcttgacattgtcatctctcagctgcttgtcctcagcatcattgagcagtttgttagctgataacatcctagtgttgagcttgtcgagcagcttcagaatgggtttctttccttggaacagctgtggtatgtcttgagaggccaatctctcaaacagaacttgaagtgatgctgagagcaaagcaccagcaaccaattcaacagccatattgaatgaatgacaaaagcaagagcaagtagtgtatatatgttttgaatctgggaaatgagaatgaaatcaataaaaaagaagttgttatgataagaatcaatgtgtaagtgaagagtatagtaacaataataatactataatagtagagaccctctttccttgaaatttcagtgatataactttggttcccgtgatgacatttgatgctttgattacttaattggatcttttggtcaactatggtgtgccactattatattaaagaattgatcaattggccaggggtcagagaaagaaaagaaagtaggcccccctgacagacttaattggaaatatatacatgtgcaaaatttattggctatgttttgacagttaccaaaatacactttgcaagtatatacaaagttcacatattacactttgcaagtatatacagagttcacatattcactgaatcttaacaaactgtaaaataaagaacaaacacatatgctttgaatttaagttgatttgaagatacataatcctcttaatatatgctgccattataaaataatttcatcatttgatcaacctccatttacaactaaaatacctacctaacctgccactaactctctacttttcaaccttaatgcttttgctagaaatgattttatcatattttaatctttatttttagaagaataataaatgtcaataacaaaacacacaagaaactaaacaacaattgtagtaagaaaaactaaactaattgataatgctgattggtactaaattagaaacaaccgagtctccaatccagtccgagaatgttgtacctctaatatacctttctatttcaaaatgattcatgtttgtatggggttgtagtgtgtctaatacatgtttttattgtttcagaggcaagcagtcacataaatttatcatttgctacctattctaagattttggattatgtatatattcctttctttcttacatttgtaatgtcatatgctagaacttttaaaccaatatatgtaaatgtatcaaattctagagcaagaagcaaaatctaaaccaacatatcatcagatgcttgtattttctgatgaggctaattgattcttcaagcatctgatttttttttattatgaaaaattgtagaattgtaaaccagagatagtgtatgctacagaaatctaaagaacaacaatttttgatgtgttgagaatgaaaagctcgagggaagaaaacactttgacagtcaggaatatccacatctctcaagaacaacaacctatgacaccacaccagcagagcagacttgagagcaagagcagaagcaggagttgcaagagcaagagaagaattgagagcaagaatgctaaagcttcttctcttgcagtaaatgcactgacaaaaaataagctaacgctaaacctttaccaatcttgctctcaattcttctctccatttagctttagctttagcttcttctattgctcttgcaacttctgcttcatacatatatatatatatatatatatgagtatgcactgcagactctctaattctcattactctactctgtcaactactctctctcgctctatatatttactatgactatgcatactataagctcactcaatttnntatttctctttctatttctcaaaataactctctccctcaatccatgttcacacattatatatatttatatgtatttatacaagcttttatttcgtttccagccaacaacagccagtactactaaggagaataattcaccatcatcatcatcatcatcatctcgaatatcgatgctaataatgagtcgaacaagcagcaaagactcgcttattattagcaccatttgataagaaacaaatgtctgtgataaggatttcagagtaaataataatgtaatccaatgctccatcatcatgtttcatctgtatcttaattaatatatgtataagcttttagttatttgtattggttagtgatttttctgtccaaaaatgagaaaagaaaatgttagtaatgtcaaattaaaatgagtacaattttcatctttttattttttatttttctttttctttttgtgggttatatatagtttctgaattttacaagtttaaaatccatattttaaatattgttcactatactttaatatatcagtgcacactattttatgagtattaaatgggaattttctaatataattagtaaattttatataaaaattaggggtgtgtataaattgatctaatttaatgataattgattgttaaatattagatatccaaatttgattagatcagattagatgttatttttaaatatctaattggtttggatgttggatggaatgtacaaaaatttaatatatctaacatccaatccaactaattagttttttcatttagtttgagtgagtaattagattttatattattatacgtaaaatatttatatatatatgaaaattaatattaaaattttactattttttcttggattggatggatctaatcatattgtacctaaaattttggataaatcaaatccgatccaaaaaatactagttttaaaatatgggataaattctaaataaacacccctaataaaatatgagatctgaataagcctaaaaacattgaatgtgatctaatacatatccctaataaaattatagaaaaacccaatataaaaaactaaaaaaattaataatctaaaacattatttatttataccataaaaaattctctctatatttaagtaagttattttgaaaggttagcatatgattgtgatttaatttagggataattacatg

SEQ ID NO: 27196 - DNA, 1871 bp, Cannabis sativa
ctccatgttataaagtgtaggttacaattttaggttaaataaatcatattttacacaatttatttaccaaacactcaatatatattattcacttaataacatatattgccacattttaatttacatattattatattaaataatataacctaccttacgctgaacagacgtgcttaagggtttaaacccaaaatttcctaatttcaagatgcctcatacatcgattgacgactacataatgagttatcaaatcataagcaagagataagtcaaatctcaccaaaacctatagtcagtccaaatacatcataaaaagtaagtcatcatgccctatgacaaaatttgggaaaatgtgcaaagcatggttcatacaatcacgacagtagattcgttttaccaccattttaagtctataaataccctaatgatatatagaggaggggactcttgggaattctataaaaaaatagaaacattcattaataacagtgactcatggactaaggctcattaatgccccaatcacgtaaaatttctcttctttaatactcatcaattatttcaaacagctctaattactagttgccaaaaatctcgatcaacattttagtgctttcattgagagctgtaggaagcttacaaaaagagaaaatcataactagcctcatggtataatggcgttaataaggaatacttcacatccacaaccgccaaacgacccaaaaggtctaaaagaagaagaggcaacttctagggtgggtgcgaaaggagaaggagacactaatgaccttgagaatacaaaccaagaggaatgcaaagaatacaatgaagacaactatacgaaactagttgagtttaggcaaaaggttgttgaccatgaggctgagttggctgaacaaaaagaataaaataagagaatgcaagaaataattatcaccatgaaaaaggtgatggaaaatgtaggaattcatgtaaacccaactacagtcctgtcggtacaagaaaagataggggaagagctcggcctgatagaggccaaaaatagaaggatagggagcctagtcccatcaagtaccctgtaaagaggcctaccccaaaggagaaccctacgaccgtatctgaaaagagaaacatggcctaggatccacaaaaagttcgttctaatctcctaaaagggaaaggtccacagggtgtaggttccccaaagggaaaactggcccctaagactgtggagatcagaggagtactatatctatacaccaagagttgggaaaatagaggaggtctaccaggaaagacccttcgatcaatttgtgaaaaaaactcaatgggaaacacgaagaccttagggcatgtcttgaccagaaaaagaaagttgctccagcctctgagagtatcctaaatgaaggaatttttgttgaactcactatccttcagaaggacatagcaagggtctcccagagataaaagggagatgactcggagtcaaactttgaagatcgagagccgcatgccaaaaatgtacttgaggttgaactcccatagaactacagaatgcctgaaatgaccatgcatacaggtgaaagtaatccaagtgatcacctatctagatacaatagagttatgacactcatgaggatcaacaatgacatcaaatgtttatgtttcccactgacattaggaggatatgcaagagaatggttcaaaaagttagagcccgaatctatggattgttagaataaattgcagaccaattttagaagacaattcgttgcagccaaaaagataaaccttgaagttagagccttaaccaacattaagtaactacctttggaaaccttgaagaacttcatcaagaggttcaaggagga

SEQ ID NO: 27197 - DNA, 1395 bp, Cannabis sativa
aaggagagaaattgtattatccacgatggaaaatcaacacctttaattgttattttgaatcacatcaatggaaggcttcttgaacttgttgagattcaattgccagctactgctatgctgtctaaatggctctcacctcctgcaggctggattatgtgcaacactgatgtagcaatcggggaggctcagtcgacaggggcggctgtgttcaggaatgaggaagaggttgtcacaaaaattcttacttctcgaatttgtcattgtgatcctctagcaggtgaagtagctgatctttgctggggtttagaggaagtgtataagcaaggctacaagaacgtgattttccatagtgattcaactaatgcagtgtttgcggtgcaacggaaacgccatgaggttcaaaccttgcagcacaacatccaggacttagtgaacaggttccatatatcagcaagcaatcttaacctctgggaggtaaatttgattttgagaaagtgtaattgtgtggcccataatgtggcttaatgggcaaatcgatacaataggttcaggaacattgatttgtttaattttggcagtttcttgcacattggtttggtagatggctgtgagtttaatttcagtttaggttagtttaattcgaattgctttgtttttggtttgttagttttattcactgtctctattttttagctgggcttcgtccccctattttttgttcatttccatttgtaccttgtttcgtttctgtagtgttctggttgctctttgaggcaccatttataaaaaaaaagtaattttttagtttcttgtatacttttttaagagataagtaactaaattttaaaacataaaaattaaaaaaaaacactatttagtaacacatatagtcggttacttatttaagatatgtttatgttattttttagcaacttttcatgttaattgtaaatatatttaagaaattaataattataatcaaatataaaaaattaccattaaataatattatatatataaaaatattatctttaagtttattatcaaaattaatataattatatttatttattattttaaaatataatttattttataatgtttaagatactatttaatatttttataaagaaataaattattttaagaagaatacattttcataagttttaaatattgaaaaaataaaataatttgtttagtaactcgtaaaattgattagtttcttaagttttgttaaaagttaaaatttgataattttttagttttttttaatatatatgaggtaaattagatagaaaaaaattaaaacgttacttttgttttcaatcattttctttagacaaaaaatatatacttcacacatatcagaatgatcacattaaatgaatggga

SEQ ID NO: 27198 - DNA, 1105 bp, Cannabis sativa
aatattattatattcccttaaaaagaaacattattatattaaaggtggggaaggaaaaaggaagtctttaattatttatttgaaatacaattgtttaagcaattaaagctttgaaatcaatttgtggaaggacaaggaaaatttgtaattaatgggtgtctctctaatcatatgataatgctttaactaataccaatctagaattaatatataagcttttattggctcttcattactcctttcagttttttactcccaaaggaaactatgcatgtactactccaaacttttaaattgatttatgtgatcttgttttggtctaatttcactttctttcttttgatatttaattagagaaaattatttgagacgacactttacccagaaatcggtttactagttggtatcctgctcgtataagtagagtattatttgttgaattagtgtttagagtaggtccgtaagaatataaaaatgtgtacctcattcgggtataggacagggtacgggtataggtataggtgtaccctgccccatggacaatttacaacctatcaagcacttgtataacaaaacaagcatgcttctctatttacagagattcaaaccattctctatctatttgacttattttcttaggcaaaaataatcttaacctattctttacatcctctttaatttttttgtacaagagtcattactgttggacttttttcattccataaactatcatttctattttactacaatctatataccatagcagccataacaattgcatatacttatttgcaaaatctacttaatcttggctaagttatccacttgatcaactgagggactgtaatgagctttgtgtgccattgcggccaacttttaacctccaaaatacacttggaaactacactgacagtcaaagaataaatgcttagtagaatctgttaaaaatttatatgaataatatgaagcatatatgactgtgtataaaatgtataattaaatcgaacatatacatgatataactaaaagatcgaaatacctcaaaccattcattctttgagtttcaattctacacaatctttggatctgcaaaaaaaaaaaaaaa

SEQ ID NO: 27199 - DNA, 3959 bp, Cannabis sativa
acactaatacttcggagaacccaacaacaaaactttacactgacctaatgactttgagggtagcatcgacggaagaacgtaacccctagacaccgaattgagacatttccttctctttaacaaggcagaaataaatcaaactcctcatttcttctctcaatctaagagttctttggtaaaacaaaaagagcagcaaggacatacagctaggggtttcagaatcagtttctccgaaaatccccaaagaaaaagtattgaaaactcctacatctgagatagagtggcgattcaaagaacaaaatatatggtagtatatataaatgaagtaatcacgtaccgacttgaaagagacgaccctcaggtgagaaaatcgtaatatgacgatcgtagccacctccgctgcctcgactcatgactgaaaggcagatgtgagaactgaaaatagtgagcaaatgcttcagcttcactgcttcactaggtgttcatgctttgctattggaaaagtgtgacgtgagaactgagcggtacaaaattcaattgaagaagaagcttttcattcaaaaaaaaaaaaatgtaaatacagggagggaaacttaaaaaatactgtaattttgagtaactcttataaaaatattgtcacacgaacaagtttataaaaatactgtataaaatattagtagaacacaaaatataacaactcaaaacactagtagaataactaaaaaaacaccagtaaaacacttaacacaatatactacagtatcaatatgaaacttataatgaaatacggtaaaaaagtcaaaaatactaaaaaaaaaaaaaaaaaaaaattagtataccatctaaatttccctacagccaaatatgatatgttatgggctccaaagtggtatgaatatgggcccccagctttatcgggcctgtaagaaagaaagaaatcttctcttcttgattcactgttggataatgtttggatgttgttatacttttagattgggtaattagttagtgcaattaaaaaatttgtttataatatgtgtagtttgtttcctgtgtggatgttcagtattttgtgattacaaataatgccatgtatataattatgaaaaaaaaattgattaaaaatctatcatcaatacgaaaatagatagaagacgtactgaaataaatagtacaaattttttttttttatttattttaggctatttaaaatttttgtccttaaatgatggcatataaattattcagctcgtcaatttttcagaccgttaaaaataatttatgaactatttacattgttgtaaagtagttattctatcaaattttatatgtcatatcagtgtcacgtgtgtataatttaaaaaggaaaatttgcggtaaaatttttcaaaatgttcactttattgttgattagttcccaacctcgataaataacgacaatactccacaaggtcacacattttgcaagtctattagtcctaaatttatctgctctattaatttatttaaaagtatcacgtgttgaagttttattgatccaaataataattttaattaaaaaaaaaacttaaaaatatattttaaaatcctaaaaaaattatttttctttttctatttttttctcttccgtcttctttttctattttaaagtttattttagcacttaacagactaaatttgaaagaaagagtatagagcaaaatgattgtagagatttaggagttttacctaatttttttcaatttaaggagttaatcgtatcaaatttcaaaattcaaaaaacttggccgcaaattacctttttagttatatttcttttttgtcttttaccaattcttaataaatggccatataaaaaaataaaataaaataagtgattataataattaattaatttcatataacatatataggtataaatattcataattcaatagggtagtattaaaaaaatattagctgtaaaactacatgtattatacgatttatgacgcttaacagcaatattttaacaaaagtataaaaaaataaaatgagagtttggaggattttactgagagcagtatacattgatatttacggttaaaaaataaatttatgaaaaattaaatatcaaaatcgtataattcatataattttatcgttaatactcttaacacaattgtggtggactaaatattgtttgttatgatgtacaaagaatgaaaagaatacaataaaacacgtagatgtgctagttatggtagtgtagttatgtgttgtatatatcacacaactactcgtgaatcgtgatgagtagcagagttaattagttagaccataaacgttgctatatgtgttgttaattacatgaattgtcacactttattattcaaggttcataattataataataagattcgagatcataaagttgtcaactttccttgcactcttctgtctgaaaaaataaactagtaacttgggtgggaattaggtaggtaactaataatagaagaaaaggggaccaaattgtcataatcatagttcctcattccacatgttaaaaacattttttttttcacaaacttaagcagcctaaaagggtcaaagtttagtagaaattaaaccattcacacatcattaccatgtgtagctttaatacagatggagagatattacttttctttctatctatgatatatttattcatatatatatatatattaagttaatattaaattaatgtatacttaattatatttttaatttttattatgtttatttttagttgtatacttatttttttttagatgttattcaacaaatatggagcaatattttgctatgagttgacgtgtccaacatctccaaaacccttattgccttctgggttcctcaccgaaaggagtcacttccggaggtcattgcctctcattgccttttagatttaggagtcattctttttagttacctcagatgatttacatagtgattgtgtccttcccttcgatcatgccacatgtctgattgatgaaaacttgaataacagttagacaaggggacccatgtctccttacttgttcttagtttgtgtatagggtttatctggtttggtgaaacttgattgtgacaatagtttattgtttggttttcttgtggaagaagtggtccgatgatatttcatctcttgtttgtcgacgatagcctcttctttttaaggcttcaaaagtgtgttgcatgagattcaagcaacttctgagttggtatggtgaagctttggggcaactggttaactttgtgaaatcaacagtgtgcttaagtcccaacgttacgagccttaagagagaaagattggtagccttattggaagttattgaaataaattgtcatgagacttacctgggtctcccttattttgtaggccataggaaagcaagcttgttcaactctatccgggacagaatttagaaaaagcttaatggttggaaatccaaattgttttccatggtgggtagagaagttttgatcaagcctgtcatttagtccatccttacatattctatgaacttgtttaaactttctaaatgttttatcaagaatgttcataagatgtgtgctcgttttaggtggggggagagaatgatgcgaaaaagaaaatgcactggtgtacttgggacaaattgtgcctacataaagaagatggtggtatgggtttcaaagatttacatttgtttaaccaagctcttcttgcgaagcaagcagctaggatctacaatgtttccacctctttagctgcccaggttctaaaaggtttgtattttaggaaccgaaattttagtgatataattcggtccaagcaaggctcttttgtgtggaaaaatattttatgggtaatgagctttttgactctagagcagtttggagagttggtaatgggcatactattgatatttattctgacttttgggtcccctcgt

SEQ ID NO: 27200 - DNA, 2361 bp, Cannabis sativa
tttgcggcgttttgttacagtttttttcgacgacattttggtctatagtcgttcgaatgaggagcatcggcaccatctgaaatctgtattacaattattgcgggataacagtttttatgccaaactcagcaaatgccagtttttccaagacacaatcgagtacctcgggcacattgtctctccgcagggtgttcgggcagatccggcaaaaacggcagcaatggtacaatggccagttccgaagacgctcaaacaactccgaggatttctgggtttgacgggttactaccgacgatttgtagctcggtatgcaactatcgctgcaccgttaacttcactcctccgaaaggatagtttccactggaatcacgaggcagccgaagcatttcaacagctcaaagtggcaatgacgacaacaccagtcctccatctacccgatttttctaaaccttttgtgattgaaactgatgcttctaatgtgggtattggtggtgtgttaatgcaggaaggccatccactagctttttttagcaaaaaactgggacctaaatttgctacagcttctacctacggtaaggagatgagggcaatagtcgaagcagtcaccaaatggcgacaatatttgttgggtaggcactttattattcggactgatcaccgaagccttaaagaactgctcactcaagttattcagactccggaacagcaaaaattcctgcacaagttaatgggatatcagttttcaattgaatataagtcgggcaaacacaacgcagcagcggatgcgctctcaagactaccggcagaataccattcgaatctattgctggctatgagtacggggtctttcgactttctggatgaattgaagcaagaaaacatgacatgcccggacctacgacaactacacagccaattacaagaaggcagcgctgatacttcgctgtactctgtcagagacggacttctatattaccgccaccgccttctaatcagtaagcattctaatttaaaatcccagttgctggctgaattccattcttcgcgtattggaggtcatgcaggagtcgagaggacatttttaaggctgggagcaaattttttttggcttggcatgcgtaaagaagtaaaggagtttgttcgaaactgcccaacttgtcagacagtgaagtactcgaccaaggcaccatacgggttacttcaaccattagctattccggagagagtttgggaagacttatccatggattttattgtcggtttactcaagtcaaacggagccactaatattttggttgttgtggatcgatttactaagtatgctcattttggagcacttccaaaccattattcagccactaaagttgccgagttgtttacacatatggtgattaaactacatggattaccaagaacgattgtgtccgatcgggatccgatatttacaagcgccttttggcagaaattgttcgaattaatgggtacttcactcaacatgagctcggcatatcaccctcaatcggacggacaaagtgaggttaccaatcgctacttggaacaatacctacgggcattttcggcggacaacccaaaacagtggacaaacttcttatcgtgggctgagtatcattacaatactagtcatcattcggccattgggatgacaccgttccaagcagtttatgggagaacaccgccaaccattccatcgtatacaagaggggccacaaccatacaagcagtggaagatgatctacttacgcgggatgatattctgcaccatttgcagcttcatttgcaacaggccagacatagaatgcagcagcaggcggataaaaaacgaagagacattgagtttaaagttggtgatttggtgttagtcaagctacagccgtatcgacagaccacagtggcgaagagactgaatgccaaactgtgcagacgatttttcggaccttttgcagtaacagcaagagtcggaaaggttgcctatcgattggagctaccaccaggcagtcgcattcaccccacgtttcacgtctctttactgaaaccatatcatggaaacgactctgtaacttgctaccccttgcccgagcttactgtagccaacaaacctgtgatgttaccgaatgctatactggcaacgcgaatcactgcaggtccaacgggtccactcaaacaagttctagtacaatggactttgagttctcttgaggatgctacctgggaaaatttttcctcattttgcaagacatacgggctgaacaaccttgaggacaaggttatttttgaggaagggggtgttgttaaagaattgggttcggcccaaggaagtggcccattaactttggacttggg

SEQ ID NO: 27201 - DNA, 2226 bp, Cannabis sativa
ttaatggttgagattcaatgttttctccaccaaaatcggtggctggagttataccaccaccttttttttaataagttcgggcacagtgaaataggagaaaaaactaaactttattagtgtataggtttagatattgaaaatgaaatatttaaaaaacaatggggtgaaatggtgttaaaataaaagagatatttagatttttaataaaagtgggtgagggtttcgtcgtattttctgagttctctgatctgtgaatatattgttcttgctgaaggtgaagtaaggaagacgaaggtgtgttctcttttatataaccctatggcgtcggttattatggattaaccgacgcataggtgcgcacgtgtcgtgtaatgagtgcacctatggcgaaggttaatccctaataatcgacgccatagagttaatcaaaaaccctcaaaattatccaatccccaaccgacgacataggctataattaaattctataatgtcaattttaaaccatcgagtattttcacaccctttagcttctcttttaataaaatgggttgaaaaaataatatctaaaggctcatattgtagtagtgtgagtttgtgagagattatggggttgtgaatgacgagttaaatctgaatataagtttttcctaagtaattatattttttttgctagaaaattaattaggttctttgaagaagaagagcatcgagtggggttggggattaacaataggattttgtttttattttcttagataatatttttttaaaaaatttaatagaagaaaaagaaaataaatataatattatagtttttatgttttatgtataatttctaattatttaaattttttaataatatttattaacaaatattattttaacacgtggtaattgtggtagtaattaatagaccatttaacagactaataaaaatagtgacgttgagcactattgtggtcaatttttcaaattgagaattaatttgcaacaaccctaaattatcccataaaataatttactctacgaacgtacgcgtgcaaatgtatcaaattttactacagacctgatcgataagaatataatcaaattaatattatcctaagtgagataattttgtcatgtatatgacaaactcttactaaaccaacaacatcgatatttttactcaataggacaaaggagagtttttattattaagtaataatatcatcttaaacgttgggaaggtaaaaaaagataaaaagaacagcatatcctatgtagaacttattattcctatgtgtttagaccctaacaaggccaaaataataggtagaaaattaagagagtgattatcggttgtcaaattcgctttggacattctgtattttgtaataagggaaaatgggtcacctaagttatcccaagttttcttctttctagattgatatatatttattaatagagataagaaacgtgattgactaaacaaaatatgtatatatgtaataaatatttgagtattggtactaggcactaatagtgcttagcactttgtcacgttgcgatacttcttttaaaactattatattaaattatatggaacctaatatttagttgcaccaataataatattcacacataaaaaagtatttagcactattagtaccttttattatttctctaaatatttataggaaaaaacatttttaattttcaaacgtgagttttatttgatagtgttattattttttctaaagtatatgggcggcaatttgagcatgcaaagaatctgagaacatgactatctgtgttttgattagttcttattgttgttttctttggaaacagcattgtccatatatatatatatatatatatatatataaatcatttgtgtgtcttgcaaaaaataaataaaaatctattgtgtggcttatgtttcttcagatgcagtatatttcagagaaatatgtgattaacatatgtagagattctcatagcagctaactttgactactgtaaacaaggacaattcttaaactgattgtatttataataacaactaaaataagaaaaaggaaatattaaaatggatttttttttggtgatcgaattagtgttgagtgattcttacttatgtcatgagtaaaatgcatgtccaagactaaaagtcttgacaaaaagtttataattaatatattttgccttataacaaggttttttttaagttatttgttgatt

SEQ ID NO: 27202 - DNA, 1726 bp, Cannabis sativa
  modified_base (823)..(831): a, c, t, g, unknown or other
gtatagagtataatttcctccatgtaatatcagtcatttagatatagcccgttgttgataagattaggcccatatacttcgttgggctaacatgggcaatcgaactgacaaccatctcatgggcaatcaaacgagccttttgtaaattgattagggcttttgagcctttataaacaaaaaggaataagttgaagaatatctcttttttgtatttattaataaaaaaatatcatcatattatattttattaaattatacccacttttatgagtaggttttttaatatatcctcactctctacttaactctaacatataatttacattaacctaaagagtctaatagagacatcatctataaaagatatattttaaaaagtatgaaaatgaaggtaagaattaaaacaagtaaagtaaaaggggcgtataatgtaatttcctcaacaaaaagtgaagggataattacataaaatatcattttttgtaaaaagttacatttttacgtttttagttttttttttgtctaataaagacatcatctataaaagttaatatattttaaaaaatatgaaaatgaaggtaaaaattaaaacaagtaaaaggagtgtacaatgtaatttcctcaacaaaaagtgaagggataattacataaaatatcattttttgtagaaagttacatttttacgtttttagttttttttttttaatatttttatgatatttttaaaaagtactagaaaataacaagaaaactacgtgaaagtaagaaaaataaatatcaaaacaacaacaacaaaataacatcaaaataatatacaaataannnnnnnnnaacaacaaaataacaaaaatacaacataaaaatatataaacttatgtaaatataatctataaactgtaaaaatatcaaaaattctgtacaaactacactttttgtaattttttttttatttgaaattatcccaaaagataaccttggagtttaatacagttttctcaactttgcttacaaaatatattaagtatgttaacagcaatatcattatccttttttaagtttattcatcatctttactaatattacatccttacaaatcatagagatctaccttaagatcattatttataccaaaaaatattaaactcacctgaaatcgggccgaaaaggctctgttaaaacagtgggccgaatagaattgggttgtaaaattaaatgggccgattattttgagtcggaatcgggctgggccctctatggcccgtgtaacccaacccaacctgtcccggtcctctgctccctcacttctctctctttctctctttctctgtctaaaactatcagaaagccctaaatcataaaacctcctctccatcctccgcctcgctctctttcctctcttcgttccgatcacacctttcaatttctcggatcttggtaagtgttttcatatgattcgttaattttgtacagacaactgattcttctctttgatctgattgaatttatggtaaagagatttgattactcttgataaggcttatagaagataatgctgttaattcttgcaatatgctttatcacttttgtgatttttggtttttcctaattctgtaaataagagaaacaaaaaagggatcagaattgtcgatgttggaaaaaaaacatgatattcggtaatggagtattgagcagtactgtatttgtatgatgttgcagccgccagccg

SEQ ID NO: 27203 - DNA, 8725 bp, Cannabis sativa
  modified_base (83)..(101): a, c, t, g, unknown or other
tgtaaggtttctcatactttatatgtgtttacttataatcgttttagaagttcatatttaagatgttaatcaacatacttgtnnnnnnnnnnnnnnnnnnngtaaaataattccaacactaactttaactcgaaggccctacatgcactgtttaatgttgtctctgtgaaccagttaaaagttatagctaactgtgaaatcgcaaaagaagcgtgggagaagctaaagataaaaaatgagggaatagatgctgtaaagaaatcaaggttgcgagcgttggccaaggcatttgaaaatctatccatggagaaagattagacagttgcagaatttcatgctaagttgtgtgatatctccaatgagtcctatgctttgggaaaaacctactccaattcaaagatggttttgaaagtgcttggagtactcccaagaagattcatgtctaaagtgacctctattgaagaaatgaggaacattgaggaacttaatctcgatgagctcattgggtccttgcagaattatgagttgtcactgtccagatggaagaaatcaaataaacaaaaggatgcggtcaaggatagatctgatgtgagtatcacacttattcatcaagaaaataagaaaccggctctagaagaaattaatggtatcgttgatgagactgttgccctgttaattagaaattatgccaagttcttgaaaaagaactacaagaagaaatttcctattgataaagaaaatgctcctaagaagaacaaaggcagaaatttcaaacaaggtcaaccatatactgatcaaaagaatcgaggaatcaagtgtagagaatgtgacagaaatggtcacattcaggcagagtgcgtgaacactctcaaatagaagaaagcccttgctgcaacatggagtgacactgaggaaaaaaataactctactgcaagtgaaagcacagatgaggacaaataggtattagcgttcgtggcccaaagttgtcactcaattgagtctgaagataatgcattatccactacatcagaaggagacaatgttggtagacaaaatgcttacgaggagatgttttcccaatgggagtacatgactaaacagattagtggtgtaaaacgcaccttggagcaagtggagaccgaaaaaagtaagctagaggacacagttaagaatctcaattgacttcttgatgagaaggagaatgagatatataaactcactgcaaatctaagtagagctaaataagcactgcaatttattccctcaggcagagctgctatcaatcagaccctacaactctagaaaccttatggtgatcgtaccttcataggttacaaaatgttgtacaaatagggaaacgatctatctgttgaggattcacacacctcaactgtcgatctgaccaaaaaggatgattggaaaccaaatatccttgctacagttaacgagccagattctcttgtgagtagtcatgttccatctagacccactaagttgaagtttgaagggagaagaattgtccctggaaatctatcacaaaatgaaaaattcatttcaatatgtcatttttgcagcaagaagggtcacattcgtcccaattgctataaactggagaactacttgaaagcgatgattaatcgaccaaatagtttttcacaaccaaataaacgtcaaggtcgcgaaactcgtcgggaatggaaaataaaatcaaaccttagaccaaatgttggattggtggctaaggtgtctctgtttgcttttgtggagggacgcatgactggaaacaaaaagttgctggttaattacaaagaggaaaaggagggggctatgacatttcgtgatggaaacaagggaaagattgctggtaaaggtgatgtaaacctaaatggtgtggctcagttaacagatgtcttgtatgtaaaagggctcaaggccaatctcatcagcattggtcaactgtgcgacaacaacttctctgtaagtttttctaaaactcgttgtttagtttcaactaataggtatgttgtcttaataggaaataggactatagatcagtgctatgaagtgtgcaataccatcgtgtgcaatcaaaccatcctggataaactggacttgtggcaccacaggctggggcacctgaattacagagacctccaaagactgatgaagcttcaagcagtataaggaattccaaagatgaaagtatctagggatagaatttgtggaccatgtcagctagggaaacagattaagctatctcaccctccgatcaacagactattaacctctcgtgtgttggaattaatgcatgtggacttgatgggacccatgccaaatgaaagcctcagtggaaagagatatgtaatggtccttgttgatgattattcacagtacaccttggttgagattcttagagaaatatctgagacctttggactactctcagctctaatattgagacttcaaactgagaaagactccaaagctggaaaattttttatgctaaggagtgatcatgggaaagaattcaaaaatgcccttttctcagatgttttcaatggaatgggaatacatcactagttttctgctccaaaaacccctcaacagaatggagtggttgagagaaaaaataaaactctgcaagagatttctagggttatgatggaagccaaggacatgtcaaagcatttctagactgaagtagtcaatactgcctgctacctttgcaatcgagttcatctctgtacaaggacttcgcagatagaatatgagttatggaaagggagaccaccaaatgttagtcacatgcacatttttgggtgtacctgctatgttctaaatgatcgtgatcacttagggaagtttgatcctcgaagtgatgaggggatatttcttgggtactatatcaacagttgtgcttacagggtattaaacaaaagaactcactcagtattagaattgtaaacgtaaagtttgataacttagaaattagtgaagaagtaagtgtcgaggatgatgccccagttctgtctggacctggatcaatcaccactaagcctactcaggtttatcctaacactcctactgagtccctaaacattgaacgtgcgtcttcaaataagttagaagcagatatcagtggtaagaatggtaaatctgaagtcagcagtgccatgcccaaagaatcacaacatgcaaaactttacaaagatggaccaccctcctgggtccaaaaagctcatccccaagctgtggttatttgaaatcctaatgacaccatggtcactagacaaaaactgcagaacatattggcgtttacatgttacctatctcaagctgagcccaaaagtgttagagatgccctcttggcaaattttcgttggttgcaatgcgagatgaaatggaaaactttagaagacttggtgtatggattatggttcctcggcctgatggagcgaatgtgataggaactaaatggctatttaaaaacaagttagatgaatttcggacggttacacgaaataaagctagacttgtagctcaaggatacaatcaagtggagggaattgactttgatgagacttttgcacctgtggcatgattagagtccataagactcttactcatcgttgcatgctttctgaagattaaactcttccaaatggatgtcaagagtgtgtttctaaatggagtaattcgagaggaagtttatgtcaaacaacctcagggatttgaagatccacaccatcccgaccatgtgtacaaactcaacaaagctctatacggactgaaacaagctccacatgcatggtatgatcaactcacctcattcttcatttcccatggatttacacgaggtactgccgatagcactctattcatcaaacatcttgaaaatgggatttttgttgcccaaatacatgttgatgacatcattttttgttcaacttgtgaaagagaggtaaacacatttgtaacattaatggtcagtgagtttgagatgagtttgataggggatctaagttttttttctaggactgcaaatcaaacaattagatcatggcacattcatatcatagtcaaagtatgtcaagtctatgttagaaaagtttgggtgttcacaagtcaagcacgcacacacacccataggaacaacaaccaaattgtcgcatgatgagtctggagaccctgtagaccccactctatacaaaatcatgataggcggcttactgcatcttacaactagtcgtcctgatatctctttcagtgtcaatctatgtgctaggtatcaagccaacccgaaacagtcacatctctctgcagtcacaaattttcaatcaccttgcagggactgttaactatggtctctggtatacatgtgataagaacaccactttggtaggatataatgattctaactgggcaggatgtctagatgataggaaaagtgcttcagggggtttttttacatcggtaataatctggtctcttggtatagcaaaatacaacaatctatttccctttctactgtcgaggcagaatacattgtcgccggtagctgttgtactcagttaatttggctgaacaaaatgcttactgattatggatacccacaacaaactttgaccatcttttgtggtagtacaagtgccataaacatctctaaaaaccctattcagcactctccaacaaaacatattgacatcaggtatcatttcattcgtgatatagttaattcaaatatgttttcaatatctcatgtgcccacaactaattaattggcatatttattcactaaagctttagatactcaaacttttactcatttaagaacatgtattggtctctgtaccatctaaactgttcacagttgcatctggtcacatttttttctagtctctaagtaaaagtttttttttaaaattcataacatgagcacgttttttttttttggttcactactatcaccttctcagttgatttatctcgtagaaaattgagcttgtatcttctccagataaaaggctacctcctttagatgcaatgggaagagctctcttaaacccatctactaataagtagtttgctccttctatattagttcttgtgatctaaagaggacggctacatctctagaagagaatgaaagccatgtttgggtactatagaaaaagctagattgtatcttaaaaaaaaaggcataataataaaaaaaaaaaacaaaaaaatgttcctttgagggagtggtctagaagatctttctcttcctggtggaccacatgaggacactttacacacacctatggagatacaggtcttgtgtagcttttctaattggagtttggtgtgcttatgtggtacaaaaaattttgttgctcatgttgtgcattttttattcttgctcagtggcttcattcacttcattgaacaaatgttaactgtccccttttcactgcaagatattgactatctctaagcttttatttcttatctctgttgggaaagcctgggcacttgttacatgttgttggcatatttttacattagatctttatgctctcaatatctaatgtctatttgtttgtttcattttttgtgccaaaacgtgtggtgaaaacagttctatttgggtgtgtatatttcattttgcaaagttaaaaaaattaaataaatatcatcatttttttctttgcatggttaaactttgctagggtattttctacttaaggccaaagaaaagtgaatcggttctttcactttattctcttcttcaagaaaccctaaagtctgaagctctcaattcactttgctgatctaaaagactctctctcagtctatcatgcagaatgttggttccatgtcgatttcccctgaagccatccatattccaacattcgtgtctcatgtcgaatcagaagtcgtgacttgtcctgctgaagaagtattcagcgatgcccatccgtgtctagccattgtcccttatcagttgatgattgatgattctccttgatctctaaggctagtatctccttcatcttcgttgttgcctcctgtcattcagcagcctcgcacatttcaaggtaaggctcctcctctttctaaaaaggcttctactttgccttcacttactcagccagtttcaaagagagtcactcgttccttctcaagttcaaagtctcctatgtctcctgtctagcctacttctttgcctaaatttaagccgataggtccacctcgtcctccctctaaggtctctataccttcccaaagtaaagaaagaagtcagtcaataacccatgcctcaaaaagaaaatcatcgagtgataccacttatcaaccatctgtcaaaaagtccaagaccaagtctattcctgtcccatctacagactcgtctccaaaacattcttcaaaaggttcaaaaaagaaaaatcctccaaaatcccctatctcaaatgtcgacacatagactatttaatattttgttgatgcctccaaagcgtctgtttaccaacgttggtttggtagttgagttatggttcgaacaactagtggttttagatgactttcctgaacttcatgcattttaacaaattaggaaatgggttcacactatctctaagtggtctgcacctcatcccattttaattcgtgaattttatgcaaatcttgataggactgttattgctgagggtcagccaggttgtgtgagtgcatttgtcaggggtactcgtattccttttggtcattctaatattgcatgcattttaaagttgagtctgtcaaaaatccaacacatgaaaacagtttaatccagataaaactatgatcggtagagtgctaacttgcagggatgaatatctttgggaaaagcaggtaattttagctactcatttaactccattctatagggttcttcatcgggttgctttgtgcaattagtttcctacctcccatttttcctcagttactcttgatctcggaaagtttttgtatgctgtgggaactcatgtatccattaatctgtcatctctaatttttgaaaggattctcgaagcctcagaaaccactagcactcgtaacaaactcccatttcgaagtctcatccaacaagtgctcatgaatgctcatcctcctcttacaacccacgattatcaagtttccaatcctattctcagtaagagttttttgtctgttgttcacagacagcccacttcgactactccttctgcttcaaagatgaacaaaggcaagtcccctctgttcaaagggttattgaactctagctggtaggttcagatgtttttttgaatttaaatcatttgtcaagagatataagaaggatcaaaagcgtcatcttgcaattgaggcctctatgtacaaaatagtttgcatcatcaagtccactgttctgcaaaatcactatagagaacctttaactccatcaattgatatatctcttcctaagtttcatagagattcatttggtgcatcctcagatgggtctagtagtaccgcacatgttcagggggagccgtctatttttgccccagccttaagtccagtgcctcaaaatcctcctgctgcagctgaaccgtctccagtgtccactgctcctcatctggtgtcttcagtgccactatcccagggggaatttgacaaagatgtggtgcaatctgctcatgttcaatgaaggggagatatatatgttctcaagttttcttttgatatggattatggattgctatgtttctttttgcaaagacaatttatagttctatagtttcttgctattggataactttttggatcttcgcctttattttgtttagtagctattattagtcttgtgtgctcattgaacataatctgtcaagggggagattgtaaggttcatatttttgacaaattatattactagtgattctagtcttatctgtggtgttcatctgttgtaactacatgtgaatattctgttagtgtccacattagtctgttatgtattaacaattgtcctaaaaatgttgttaggttgattagaattgtttgtatatatagctagttctattctatgacttggttaactagcgagatttgcccccaatcagcataatccacccccattttgccaaaaaagcctagttcatttctctagtctttcggaaaccaagacccccaagagatttaggaagacacaacttatcccaagctcttaagtgcagaccatggttccctctttataatccccactaaaaatcacacaccaagccatcaatgctactaacaaggcaatttgaaagtttgatagtttgcatagcatacataggcatagacagacccacatatttgataagggtagcatgccccgcctttgacaggatttttgccttccagccttgtaacatagaagtgaggttatccaggatgaagttgaagtcaacatccttctgtcttgatctaaataacgggaggcccaagtatttgataaaaactaacagcagatccaattcccaacgcatccttaatccctcttttcatactaggaggagtatttttgctaaagaaaattgtggttttcagctcatttacttgttgaccagaccaagcatagaatctctcaagatagtgccaaataactttttcttcaatcacattggctctaccaacatgaattaggtcatccgcaaaaaagatatgagagagaactagctcgccctgctaagtctta

SEQ ID NO: 27204 - DNA, 1968 bp, Cannabis sativa
  modified_base (630)..(630): a, c, t, g, unknown or other
tatataaatagtcacatagaattctctgacgtagatacttatctattttcatctccattcctgacggtgattaaactacatttggggctcgtttggaactctttatctgttttagatttttttttttaaaactctttatctgtttcagatttttttttaaaaaaaaataatttatttttagctatttgtaaatttttaaaaaattctgaatagtttaccgtgacaaaaataaaatttgaacaataacttagcacacgtatacaaaaaaacaatcgaacgtgaaacaattatataaattttattttcagtattgtaaactattttaaatttactaaaaatttacaggtagtattaaataactatagcatacacaatcataaaaaacagactaaaaaaccctcattgatgtcaaaacaaataaaaaatctactaaaacatccatttaaaaaaaaaaaaattgcggcataaatatctaagtttgacttctaattgcaaataaatacctaagtttattttttggcggtaataatatctaagttataattttagagcttttgtaggtactcagctattaaatgtaaattgttacgtggcaatccctgatcggttaaagtcattaaatttttattntttaaaaaaaaaattagtttaaatgtaccaataaaaaaataacacgtggataataaattaatatttaatggtcaagtacttacagttacagaattctagaaatataacttaggtatcattaccacaaaaaattaaacgtatatatttatttacaactgtaagttaaagtatttataccgtaaattactctttaaacaaatatattatagacttaatatattttatctccttaagaaaaaagtctcactcttatccacacttgttattataaagatttgatatatatttcttaaatgcttgtctttattccataattatacgtattattaatatcatatttgtgtaatctaatattctaccaaacataaagtagtattaaatttatctcaatccataatccaaatccaataaaataatcttatatcctaccctactttacaccactcacatcaatttatttattctattaaaataccattttaagaccatatttaatcctaactttactttaaatttttttttttttattttttaacatttttcactctaaactactatttcatctcccaacactattttaattttacttcatttttttcttttgaatggaaaaaaaaattgaagtaaagtctaaaatagtaatttagagtgaaaaaaggttaaaaatgagtataaatattaatgtaaaattctataatacacccccttcaaataagtgtatcgatgcactcttatctgtttcggtatctaaaaaaatatttagtcttattttttttataatcgtatacattatagttatttaaaacatttagcaaaatttttagaaattcgaaaaaaaaattaacacgttgaaaacagtggtcaaagtgtttattgtacgcatgacttttttattttatactcgtgtgaaatagacggtttaaacattaatttctatattataaattattctgatttttttttgcaggatgtcttaaataactataacatacacgattataaaaaaatttagagtaaaatattcttatagatactgaaatagttaagtttgcatcagtacacttatttaaaagggtgtgttataaaagcacctaatattattaattttacttcaaattttaatctaacaaggatattcttttttttctctcttaattcatcaatattattgataaatatttatattactaaatatatttaattaattatcataaatttaaaacatgcagtattataactgttgtagtgaataaataaataaataaatatgcttctagtttatatttgtaatagcagtaattgttgttacttatctttttatgttgtctttttaattat

SEQ ID NO: 27205 - DNA, 7189 bp, Cannabis sativa
  modified_base (4366)..(4372): a, c, t, g, unknown or other
  modified_base (4881)..(4887): a, c, t, g, unknown or other
cgaatttcgcgaaaaccgacgctgaaagggcttaaaaaccgcctctaaaggaggtttttgtagtagtgattgtccattcatcaatttgatcatttaatgatctcttaaaattcaatattcaaaaactaagtaatatcaaaatcaaactaaataaccaaatcatcaaaacataatattttttaccgagctccatcttgcaatgtttgttccaatcccctctgcgcataatgtaataacatcataccattgcttgtccctaaataactcataccaattcatcaaactttaaatacttgtgatagcttaggtaatgaaatgtgcataaatttaaataaaagcaagcaaaatagatatgagtcacgttcaagatatataagagaagcaagacactatttaagttaatctttgtaaaggaaaaaaaaaataagaaaagttatagaacaataaaaaataatcatcaagtatggagaataacccatcaagtgtaggccaagtattcaaaatcatcctcctcaaatgaagaatttggtgtgtcattgtgtgattgtgatcgagaaccattcatttctctcataaatttttcaaacattagttgcattccctcgcattttgcttgcaaaacatcacatttggcttcataatgtgctgttattttacttaatttttcatccatttgaaactttattttttctttcattttttgcatttcttgtttctttgctgtcattcaagttaagccaaatcgttgtaaacaagaaagtttttctgaacccaaaacagatgagaaaatctcatcttcatttgttgaagtagctccatcctgtgagagtttactagtaacctcatcattatattttgcctaaaaagattaaatataacgcatgactttatcaatactgtgagaaagttacttgttcaattaaggtgagttccaatcattcttagaatcaacccaagatccatctttttttttttttttgtgagttataataaaaattctctagcagaaagctccccacctttcaatttttccaacaataacaataaagataatatttaatctatatcaactataataatagaaaatttaaaatattatcaactctaatatcaaaatagatgaaaaaaatagaagaactcatcaaaatttataatattttgtaaagaaaatatatattaaatacctgatcaactttaattcgcataaaactcttagaaccagaagtatgtgccatatccacatgagattgattatttatatttcttgaacttatattctgtaaaattatacttacaagttaggaaatatgattatagctaatatgttctcttttttggattatggttaagctaaacatacaacaattcaatatatagccatagaataaatctaattctaatacaaactagtaaaagaccaatagaaaacaagccatttccattgttcttcaggaatcaattttcgatgactttgagtcatcttgttgtcaaagtatttgactttcaacttgtacctcctactttggtacctctcacgacatagatccatgaaaacttctttgtcttcctcttttacttcaaatatttcttgaaataataaaaattttcaattaagtaataagctgtatcatgcaaatctaaaggggaggtaaagaaggttttttgtagaaggaagtattaaattatatatttttaaagactaaaaagcttttcccatattggattgcaatagtattcaataatctttgaaacttacctttacaagctcccgaattttattccttttggattgctcaatacaatcctaagttttaacattcaatggagcatttgaagtatttttcaaaagctctccaagttgagtaataaaatattaagcagttttctctacaggttttcccatcttgaattgtacaggtactttcttatttttgaattcttctaacaccttaagattgcgaatttcaaaacgaactttcttctgactgcatctgtttttcaaaatagcatatgttatttaatataaatgacctaaaatgatgaacaaaaaaaattgaaagttcttattagatatagtactgataaaaagccttgacagttaaagatgcaatacttagaagtatattcactctatgcatgatcatttttttttccatacatcttgatatgtttgatgcataaccatcaggaaccttgatttcctttaaaaacttgcacaaaatacttttctcactagatgataatgtgtaacacgcggttggaatcaaaagtttatcccccttttgtattggatgaagtgcttctctaatacacatgtctttaagatctagttaagcttttacattatctttagattttccttcaacattcattataatgctaagtacattttcacatatatttttttcaatctaaattgtttcttaacaacaagtatgccaatacggtaactcaaagaaaatacttttcttcttccaactattttgatgtaaagattcttctcattttctttttccaaatggagcaaattgaagataacgtaattgattgagcacatcatttcccaaaagaggccttggtgcgctattcttgtcattagtaccatcaaacaaccaatattgagtacgccatctatgtcttataggtaaaaagtgacgatgtcccatgtaacactccttattactgtactttaagcgtctaaaatggatatctatattacaactaggacaagctaacttccctcgatttacccaactagataagtttccataagctgaaaaatcattaagagtccacaacactgttgcatgaagattaatattcaattttctaaatgcatcatatgtattaacaccaacatcccatagcattttcaattcctcaactaaaggttgcaagtatacatcgatattattttctggagcagtaggaccaagtattaacaatgacaacataaaatatggttgtttcatgcacatccatggagctaagttgtaaggaactaaaaccactggccaagtatatactatgactactactcatacaaaacgaattgaatccatcacttgctaacccaagtctaacattacgaggttctttggcaaaatttacatgcatcatgtccaaatattttgtaaagaccgcttagctttgttttagaaataagcagataattagggtttaattatgaaactataatattaattatgatttatcattttacggagatttatttgaattcagggtgtattatttatgctacatatgaaattttatgtttttgcatgttttgtgcctgacaatattgaaacgtggcgtttgaccaatggaatcacattttagtatttttgtagtcgcaggcaacatagttacacattgggaatgtcgggaattattcgagttagtaaaatgaccaaatacccttaagtgacaagtgtactttttggtatatgggaaggcaaaatagtcttttgccaaggagtttcttttgtctttagtgggattatattaaattaataatctaattttaaagatttatattggataatttttaattatctcattgattttacaaaaagagaaccaagaaaaacatttaactctctctctccaaattcactctctttctcgagctccccagaccccgctagggtttgagattttccaaccttatttcagagatttctagcaagtctttagtgtattcaaactcaagtaatgttctagctcatctcttgttgatttctttaagtttcaaagttaggttttgtatgattttctttaagttaggttctatagttgttcatgttgtttgagattatattctaaggttaaaattatgttatttcagctgaatttatgttagtttgtggcttggtttggttgttagacaaagtttgagctttataactcaaactttggtcttaaatgatgattttagtttcaaaggttatttattgcttggattatgttctttatggtgtaattagcaggtctggaagtttgtgtgaagtttggggttgaattgagttgtttgggaagtttttagtgttttctgcactgaaccggtcgagtagttcaaggggacctgtaggaatcggtcgactggttggtcctgaagaaaccccacagaaccggaattccggttgggaaattttagggaactctagtttttcccatttttgtaatgttatccatcgatatggaaacttttagtttaaattttaagtccccgaaaagtgatttagcgtgtcacttaccaattttacgaataatgtgatctaggggcctgtaaatcgtcgggtagttgttccacacaggttggccggcacacctgaatttggtaacgaggtaagattagtataannnnnnncatatgtgtttacatgtttagcgtacatgtttgttaagcatgttagattacattataatagcagtatcagtatatttagtgttatattagatatcgataaatgtatgttggcttaggtactattcgacagtatcacatcggtacgactaaagtatgattagcatgccgagtataggctgatattatggtcgatagtactgtactacttgacagtatcacatcggtacgactagagtatgactagtgggatcataagggtcctcacttctgggtacataatcagtattaggattggtttcttcattcattccttctgggttttgataattaccaccttggctccttcttgaacgtgttgttcctgaagtgggtggcctttgtgaacccattggttctttcccaggacgataagtagtctcttcaggatgactattatcgttttgattataatcagccatggacaaatttttgttggttaggggggattttttctgagttttatcacgtannnnnnnaatgaaagcaccaaactgttaacgtagattttcgttaacaaataaagaacattttttgtaataaatttaacacacatatataggaaaattaataagtataataattataataataacatcaagtattttacgtgattttgcagttaaatctgcatactccacgagtctatcttattcaagatatttctgagtatttaatacaatattacaattagtgatctttttctctcaaagatttttcgttcctttttttgtggaatcttcccctatcctatgtatagaggaataatataggataggttggtagttatttacatttaaatttaaaatacataactatcttatgaaacgtgggaatgattacgtttcattttaacacgtgtggataataattgataaccatataactgcttatcattcttatctttaaggcagttgacgctgacgtgggtaatggtatctcgctttgcatatagatgaccaataatgacttggtttaatcatatgccttccagcaatggcatgagctccaatgtactgagcaaacttaagaactgctatttgaccataaggcctcgcagtctggacaatcatgtcctacctgtttctaagttgttacacttagttattataatgtggaatatatgctaagtgtttaacaaccgattcttctcgtcaatatttccttatgtgtagcgaggtggatgtctcgctatacattgctcgtagttaattcgaataattttacttaaaaacgaatcttgttctcgggactgtgtcttccgaggtaagatggtctctcatcaatacaagaattaatagtttgtgtatccttgtctcgcctaagactatacagtcagcgagttatgaatatactctattaattctatatttaatgagttattctattttgcattaaatgatataatcgttattatatctggtggttcatattccacttgattgacacgtgtcactctctgaagtgcagccaaatttcgggtataacaactgttttaaaaaaaaaaatttgaaagtgactttttttttttattttcaaaattttaaaattttgattctcaattaaaaaattaaaaagtgaaacaattttatagaacataattttagaaaatattttcatttttctaatttaaaaaacaaaaaactggttaaaaaagtgttaccaaacgtatcctaaggctactgatttttatgtgttagtttttaatttagttactctacgtaactaattttttttatatcagatttttaattagttgtttaatgtaattatagattttgtagtatgtcttattatttattttttaattaactgatttttatgttctaatttacttttgaatgtttaggtgtcttatgtttttgtttcagcttttcattttgttgtataatcagggccggccctgaaatttagtgggtcatagaaaaaaaaatatttttgggccttcatttagaaaaaaaaaatgtggtatttttcaaaattgataaaaaaaaatgtgatattttaaaagggaacaaattttttttgggcccctgagctaggtgggccctaggcacaggcctagcccgcctatggtcagggccgacccagtgtataatgtaactggttattctgtttaattattggttttatttattacgtaactgggttttaagtttcagattttgatttagttatttttcggtagctaatttttgtgtgttagtttctcatttggttacttcacgtaagtgatttctttgtgtcatatttttaaggagaattacccagccatataccattttttatctttttttaaaaaaatttactgtttgggttgctccggtagtttgctccaataatttttatgtgggttgctatgtagattttggtcgtgatttaggttgttccgttggttgctatgtggatttccgtaaaaatgcaaaaagaaactgctttaaagtgtaaaaataaaaaaacaaaattatattttcaattagttgctaaatgtaactggtttccatgatttaattttataaattagcttaatagttttttgggttccaatttatatttttgattatttcaggcatcatatgcttttatttcaagttttagtcagttgtataaggtaactagtttttgtgtttaattattggttttgttattttacgcaaatgagttataagttccagatctggataactagtttttatgtgagattttaatttcattgctttacgtaagtgatttctatgtgtcagatttttaattaactttttaatgtaactagtctttgtg

SEQ ID NO: 27206 - DNA, 3113 bp, Cannabis sativa
aaaaaacaaataaacacaaagatgaagatgaagacggagacggagacagaggttcagggcctctgctttttttgatgcttgagtgctatggaggtccgaccagtcttgggcttctaggtttcgtctgggtttttgggtagatgaggaagttcgttggtggaggaaaggaggttcggtggtagtggtggttgtttggtttcggtgcctaggtttgggttggtctcggtggtgcgaggaagaggaagagagagagagagaggaagagaaagagatagagagagaagaaaaatgaaagggagggtattttgggtagaaatttaaaactatagcatttaattgtataaattaattaggagtctaaattttattagagggtatttttttaagcattaaaaataaaatttcccatagaaaattaggtaaatgatattttgaaaattatgttacctaatatatccttatgtgcttattcacgtgacaatgattccaaaaaaatattattcaccaaaatcccccacttcatctcttctatttctcgtttggtatattatgtcatgcatgttttagaaatttctattttatttaatgaaattttttatgtttttctatttattaatttattaataaacttatactacttaaatattatattgtactttttttttagaataaacattgttatcataaattaaagataagagtcatttacaataatagagtaaataggtggagagatactctccaactaaaagcaagcttcatccacccctaattcaaattttgccaactcgtgggcagccatgttagctgtacgtttgacatataaaatttttacatcaggaaaaaaaatattaaacatctgcaattagatcatgaaattgaaaaattacagacaaagaagaacacagagcattaacaaccatcaaggcattgaattcagtgtatttgagcgggagctgctattgagaagcccaattcaaatcatgaaagagggcctttacttctatctcatgagatgcataattactaataattggcatagagagggcaactacaacatgtctgaagtgttgcgaacaatagcacccacacctatgatatttttttatatgagtactgtagcatcaatattaagtttgagcgcatcaaagttaggtggctgccaaggcgtaggtgctgttgttgaagatgattgactgagagttgcagcaacttctagatggtatggttcatgtgttgttcaaaagttgtggatgtagttggtggagaagatagcaacattcttggtaggtttagctgagtgtccatgaataacctggttctgttttgtccaaattgaccatagtgtacatataatgtgttccatttcagacttagagtaaatcgatgatagatgaaccaagtaatcccctcttttcatggaagaagatttctgccagtcaaaagacagatgtgaatgtttccatatagctcgtgcatacttacatctaaatagtgcatgtccaatggtttcccatgctcctctagatatcgaacaggttgaatcggtgataatttttcttcttaccaaagaggtggcaactgataatgcatcgtggtagactcgccaagcaaagattttaaccttctatggtagttggagtgaccaaaaataccaagatttactagtggaggatgatgatctaaggtccaaatcctcaaaaaaagaagccaagtgataccctggttttacagtataaatacatgagtgatgatggtgccaaattagtttgtctccatatggaaagtagcttaagggaatagtaagagtcttgtcaatgtcaatttgtgagaagaattgttccagcaaaggcaattccattgcctttcttcaatgataaaacttaacaccataatatcattaggtctcaagtaataaactagaaagaaagagccatatccaataattcatggatccgaagcacaatttattctttgccttttaccaatcttccatcttaaacctttaaagagtaattctttaccctaatgaataccttgccaagaaagggagggagaatgaccaaggtttatatcaagaaaggagctttggggaaaatatctactctttagaatcttacttagaagcgagtcttgtttttcaagaagacgccaagcttgtttagccagcaaagcttgattaaaattcacaaaagatcggaaacccctaccacctttagttttccatagatagagtaaacgtcaagagcgccaatgaatcctagagccattttcatttaaaccccaccaaaattttaccatcatagactcaagctagttacaaaagtattctggtagccgaaagtaactcattggataagtgtaaatgaactaaacgacggctttaagaagcacttcatgaccacccgtagaaaaaaaaaatcattccagttgttcattagtttccaaatttttgccttcatgtcactaaaaagttctctcttgtctcttccaaagtatgatggtagacccaaatatctttcatgaaattttgaaatgggcatggacaactgtcaatgaaaaaagatttgtgcagcaagggttgtgttgggcaaaaatgatagcatcgatttttcccgattgagaagttaacctgaagcatggcgataaatatccaaaactcttttgattacaagacaggatctttcatttgcttgaaaaaagagaagactatcattggcaaagagtaaatgtgagattggaggagcatggtgtgtaagtttgaaaccattgaggtgttcggtattctcttcatattgcaaaagttgagataagccttctgagcagattaaaaatagatagggagttaaaggacagctttgacgtagaccctgagtaggcaccaaagaaccagttatttctccatttaaaagaaaatagaagctattagtggttaagcaccccataattagcgagatctatattttagcaaaacccatttttcatataacttctttaagaaaattccattcgactcggtcaaaagctttactcatgtcaagctttagagatgcaatgtcagagcatccccaagtcttattcttaatggcatggaccagttcaaatgctaccaa

SEQ ID NO: 27207 - DNA, 2361 bp, Cannabis sativa
tttcaccaccaaggccatcttgaaagtgaatcgtattccatgaatatgatatctatccagtatgatgtatgaaatatgtaaaaatggcaaagtgttcgagtatttctattgatcggtcttcttgagctttacttttcaataactagtcatatagactaataccaaaattttatctatttgtagatggaactcaaggattagtttttagtaaggtacagaatgtcaaatattcaatatgattccacaagatctagtttcgttcaaattaatttagaaggacaaaaaaaatcaaattgatatttgataaagttgtaaatgatcctaacaataaagcaatttgaaacaaatctattggactaaaagtaatatgcaaccttcattagtggttgtgaatgactgatttttcttaatctttttttagcattccatttcaacaaaatacccacgcccaaatttcgtagctttaggtatgcgatcccgatcatgatttttctacccccaaagggaaggcccttccctttatggatatttcttcaatttgttctctatttctaagtttgtagtgttcatagtagcttcatcaatgttaccaaccaaataaaaagcctatttaggaagaccatgtaattctctagaaagaatcaatttaaaccctttaattgtttctgctagatgaagatgttctagtaagatctataatacgagtatctttacgctttgctgatgtataaggtgtcattctaggattcatttctttggacagaaaaagattatgtatatacttactcgaaatctcacttatcaactccatcatggaagactttctccactatagaaataaaaaaataaaaaaaaaaaaagaagaagaagaagaagagcaaatccattaataaatactcgggaaggacccttccctttgggggtagaaaaattatgatcgggattgcataaccaaagttataaaattgagtggggtagccaaaaatatagccagaaaggctatttcaatagcagtcaaatgattctctaattatttatcctctcattctattagtggtttctaatttgttatatttcttgttcattctaactttacaaccagaactactggggtatctaatcccatttgctcccctagctttcatcttctctcctacattttttttgttttcttatatacttattataagtaataagtatttcacatttaacatcctgtaaaagaagtatttgctgataattttcaaactaacctactttttttaggccaagaggttgatagcgagatctcaaatcaacttattggtcttacagtatatctcagcccacgtctaaattccataactttgggtctgcaatcccaatcatgattttcctagccccaaagggaaggtccttccctttttggccagttgtgggcgaggagggattcaaacccccgacactgtgattcatagccacgtgctctaattttttgacccatttgtttgattaaggaagccacagaaaatgaatttgctaatgaaggttacatattcgatcaagaagaagaaacctacaatattgagttggaacaaattactataattcgtcctcgcctacggatcagtcgacatttttcacaaactttacgaacagatgctctgattttcattatttaaatgaacctaaagtataccatggggaaacggtattttcttattctagatttctaaattttcatgtgcccctagcctgttgaataatttgtatggattatgtcaatttcaaattcaaaataaatgaaaacgtgactgaaattggtcctagttactcttcagaatgaagtggaattattgttctccatattttttttttaatttaaaaaagtttgttggttttgtacactaggttgaggccacaaatttcttccccaaaaactatattttgattgggcaccaaactgctctaccctgcgctgaagaaaagaaatgggaactaggggtaaacgaggattgaatgggccacttatggtccaaccaatttggagaaaatcaatagattcctattctggataaagccccgtatttagtaatttcgaaactctttcttatgttgagttaacacctccacagtatagttgtctatacaccttgatttttctaacattccttgagatgtgataaaataataaacaatataccaatatcaaaaaattactactagaaaaacatacctttgataatatttgctttttgccttttttttgccttttggtgaaaaaatttagtgttttggtctccttcttgtagccattgtattctagacctttgtttccaatacacttcctctttaaaaagcaaatcattcaatttttcttcc

SEQ ID NO: 27208 - DNA, 3022 bp, Cannabis sativa
gtttgttagtgttgtgatggaaacaccaaattattgatgatgaaggagttcttggatgggctttggatttccaacttcgatatcgtgaagctaatatagaacctgatcgggaggttcgtttgataggaggcttgagttcgggttttaaggtgtttccttgggttgctctggcccttagtcatgtgaagttgaagtactgtgatgtgggaatttgtgagatagtttccaagattgggtgtggagtggtcgtgtgtgatgtgcacagggacggaccaatagcccccactaacaaaaatattatcttttaaaaaattaaatgtaattttttaaatttgataattatagatcaaaatcgtagaaaaaacctccataaaattaaataaatgtagtaagaatgattataatatagatataaatatttttgaatgataaataagctcccacaaagtaaaattctgagtccgtcactgaatgtgaatggtaattgtcttgcttctaatgttgttcggattcattctttggttgtgcaccctatggccgaggttatagaaattctccaagggctgttaatgtgttcaagattgggttatcaccatgtagaagttgagttggattttagtcttgtcatcttggctctctctaacaaaaccttgttatttttgattatctttctttatgttctagaattagttatcagtttatctcaatgtaatatcgagctgccaattctattgtccataatttgactaaagtggctcttactatgtagaggcagagccaagagtgaatgttagtgggagaccaaattatattaaaatttaattaataaatatatttataaatatagataagaatattgctatgaaacagttataaacacttatagtatttagtactacgatgaagtattgtcctataattggttaacgactttttataaaatttatttaagtaaaacaagtgagactcgatattgagttgtacttatagttatattatgccttacaaggattctaaacactatagataccctttaatatttttctataaataaaatagatatcaatataatcaatttatttactaaaatgatggttagtttggtttgaacaaaagaagttacctaataatttattggttaggtgtttacatattattttttaaaggaattttaaaaaaaaaaattagtttgtattttttcagaaaacaattctactgtatattattttatttttttctaagataattacttatattattacttggtataaatgaaaagtaatcaatcacacttaccaactaaaaaggaaattaatttttaaaaaaatgtaatgcatcaactattttacatataatatttattgaaaaattattttatatactatttttaactttttattttaaaaatttacgattttggttactctcgtagttttttcgtggtttttatatgggttaatatgtagattttgattacgatttagattaatctagtaattactataagaatttttatataaatttacgtaaaaaaatatataaaaatattattttaaaatataaaaataaaaaagacaagggggccactaagtactcgttgtacatacaaatataactacgtatatatattaaacaaaaaagacaatatatatgtgttttggggttggggggctagggccaccctaggcttgtatatgcctcccctctctggttctatagtttggtggcctagaactccttgttgcttttaaacttttgctccttatgagaattcaatcacttaaaaaaaatagtaattaaaaaaaatttatgaaaaattggttactttagagcaaacacaatcaaatctttctcccttagatactagccagtatgagcataaaatattattactctaattagtgttgaaaatgagacatgaaattattgggatgtatatagagtgagtcaattcattagctgtttctttatatatatttgactcaaccactaataaatttttttaaaaaaatctttgtccatttctaacacgtcatattaaaatgacacgttacttatcaactataatttaacaaaacattaattattaataaatgaatgatatattatatttttggaaagtaaagataagatgacatcattttatttaattatacatgagcacatcaattttatatttaaaatctcttaataatttactttaatcacccaaatgtaaatagttgcattttgaaaatataaatatatgaattttgtgttttaaaaattacaattacaaatgataatagaaaaattacaattgatatagaaaacaactcaaactcaaactctaccagtattatattattattattagaaaagcttaagaatgacccaacaagtagatctacagataattttttttttaatattttagcttaattctaatattttccaatcatatttattttattttatacatatgtaaaataaattattcaaattttaaatcctctaatataacttttaaaaatttatataatatgttgaataattataatatgagattttacttttaaattaattggtaatgagtgaagtagtacgctaaaaatatgattctgataatatgtgaaaaaatataaaatttcattttaaaactaattagtaataaataaagtagtttatatttttatatatagtttaatatttttacatttaatttaattagtcttagagaatcctttcaatatttttaaaatttgacaagtagaaatgacttttattattaagggtattacttcatatactattttttttttaaaaaaaaaaaaatcaaatttaaagtttaatttccaaattggtttctccagttagtttttatgtgggttgtcatacgatttttaattacaatttaagttagttaccataggaatttgagtaatttgcagtataaatacctaagtttaactcctaattgcaaataaatacctaaatttaattttcggcagtaataatttttaagttataattttagaacttc

SEQ ID NO: 27209 - DNA, 1413 bp, Cannabis sativa
agtccttaattggttaaagtaattaatattttattttttatttaaaaattcatcaaatatagcaagaagaaaatgactcgtgaacttgacaaacttgacaaatagttacggaagtttcagaaatataataagtattattgtcgttaaaattaaacaagtatttatttataattagaagttaaacttaggtatttacaccaacaataatcatccgaatcttttactcaaaaatgcaaaattgatgtttgactatgtcatcattatatggcttatgatttgcagtgaaggagtatgaagaagatatttccccaccctccatagcaaaaattccaaagtcttacatacctagtagtatacctttttcttttgatgaagacataatacctaatatagctatgccaaaggtttcagttcttaaaggttagtttttttctactttgtcaccttttattctcataaatcttctcacatcaaaatctacttgattaattaaggacttataaatctcctcacatcaaaatctacttgattaataggagaagagaaatataacaatattgatgaagactgtaagcacaatattagagccagttcaatacctcgtccaagagctgtcctatctagtcctggtaaagtttgtttttttaagcaacatttcattttctttcttaggcagttttatgagtaactatcattttagatttgtattttgcaaaaagtatcaatcgaattttttgacaaattggaccttttatttatactttgagctcaatttttatcatttttttaaatataactaacctaaaaattagtttctaatacaaatagatgcaacaagaaaaatgtgcaaacacctcaaggtttggttattattaagttttaatttgacaaaaattaaattttaggtactattattttgtatcatttaaaaaatacaaaactcaaattattatttaatcaaataaggagtctaatttgtaacttttgcaaaataatttatatgcatttggtggttgttgacatgataccctttatgggcttcttttaacatctatttttttttttttttttgagtattcagataatgatttggtgattgggaacaaaaatagatgcaagaaagaaagaacaccagcactgaagaatcctaacttgactcaaaataggcatgcattatgtaagataattccaacaaccactgaagatgttataaactccaaaaagtccagtgaagattcaaatgaaaccaaaggaaagaaaggaaaagtaatgtcaggtccaactcaaagaagacaaattagaactgggaaaccaacttctatgagattttgagagtgtcattttcttctgtttctattttccatttgacctgtgtttataaatgaaaggctatactgttatcaatagttcttg

SEQ ID NO: 27210 - DNA, 5515 bp, Cannabis sativa
  modified_base (2137)..(2137): a, c, t, g, unknown or other
  modified_base (2204)..(2205): a, c, t, g, unknown or other
  modified_base (2410)..(2410): a, c, t, g, unknown or other
  modified_base (3239)..(3240): a, c, t, g, unknown or other
tttctattttaataatttaattaaatagaaaattatatttaagttggaaatttgttaatttcagatcaatttaaattaaaataattttcagaatatattttattttattttaataatcattttctctacataaatttcaaaatatattattctaaatgtagatattttgagatttttatttttaaaatttgattaagttgaaaattaatttaattaattttagatcaacttaattcaagtaatattatcattaatgattaattaaaataaatagactaaaatatattatattttaattataaaataagtaattagtttttgaattatctagatagatagtttctaggtagattttttggtattttcctagatatatttaattaaatagaaaattaatatttaagtggattttgttcaatacacttaaatatttaatatttttctcacgagatttaattaaatagaaaaattatatttatgttgaaaatcaatttattaattttagatcaacataaattagattaattattctagttttattttattttattttattttaatgagacttcaaaaatgtattattttaaatacgttggatttcgaattctatcatatatatatttataaaaaattaaatttgagttgaaaattaattatttaattaatttggaccaatctaaattaagtaattttcataatatttattagaaaattaatactaaggatggattttttttttttttttcagatcttcctaggctatagttttataaatattaaattaaaatttatatttagagttatctaaattaataattttaattaaataaatatatgtgaaaataaatagattaaaataagtatcaaacgaaaatacaactctttaaaataatgagctttagttataaggatatttgatctccattgttggccttacatggttaattatttcaatataacctcaagacgctggacttcatctcccttatgatggttatttgttgaagcatttaacactgtaaagatcacgtatgataagtattttgtaaattttcgtctcaattagactctcccctatggtgactacttagagataaatttacaaagtatgaaacaatagtggatgctcataaaataagaataaccttgaccctcgcctaccgagacaacgttagattcttattttgatcgaataaaaggatgctagaataatgtccattttagatgagccggctactctattcaatgaatgatagctttgactctcgcctactagtacactgtataagtttgttggaaaccttagaaattatttaaggtatgatagtatttgtattttcacatgtctttgttacttgctaaatgtatgataatttctgaatgtgtatgaatttatattgaatcatgttattttctatttgttgtagtttcaatttcaaatcttcattgttggtctaacttaacttgttgttttaatgggacaaatctcaaaggattgtcatccattagacaaacataatagttttagatctcgatagataaatatttgtaaatgtaacatctagttgtacatccaaagatgataacttggactagtgtttaaaatatgaaacaatgaagaaatttataaaataagaataactttgactctcgcctactaggacatcgttggatttttattttaatcgaaattatcttttagtttttcctcttagctttttcatttataatttgcttcgatagcattttcattggataaatagtttataaatcatttgcttatgatgtcatcctattttctcctatgaaattgaatgatgtagatgactatattcgcgacattctatcccaaaatgatataaatcatcgatcttagaatattctagatatatatatgtgcttactagaggcaacttaaacttagagttagattattagtggtggtccaagctagaataataactcaacaattatttggtataaatttaagtatatgacttttaattttagattccaaatagaaattttctttcagtttcctagaatgcattgaaaatttagtataactttcataagttgttaatatctattttctgtcaatggatccaaacagtatgtttatgtatggaatatgagntttgtattctgtgaccaggatccacttggactattctaagaaatctttattgtaactagacctaagnnatcaaaagaccacaaccacaattttatatatctatggcatttgcatcttgttcataatgtttttgacaagatcattctctgcaaagagtcaatatgctaatatccacttgaaagtaagattatctgtatttgaatatatggatgtacattcaggagttgatatgagttatcgataaattttttatacgatcactctagattttancttatgcaaagaaatttgaaattgtttgagaaatttcatgaatttctagcaatgttgaaaaacatcaaggtaagtgatcaaagatcttacgaactgatatggatggagaaatatttggtggatacacagttcaaagatcattaagttgaacttcgaatttcatacaaacttacctccccagaaattcaatttgcatgttatatagtgaaaggtttataatatttacatgtttagcgtacatgtttatgattgcatagtagacaacatatcagtaagagcagtattagtatacatagatttgcactgaataccgacgaatatatatttggcaaagtacaaattgacgctattacattggtacgattagagttaggggtgttcattatatcacatccaatggatttttacccaaccggtccaattttatcgaattaagttatccaatctgatctgatccaatagatgtattggataggatcagttccaaccattgaatgcattaactagttttctatttgattggattggaactatccaatcaagtttagctaccatttaagttgatgtcgctaaaaagaaagaatatataaaaaatataatttaaaacctaataatccaacatacataaaaacattaggttagtccaacctaattctcataatcccataataaaactgcaaaaaataaaacttattcaatatgaattgacaattttatgaatgtttaggaagatgagaattaatattttagatctaagattttttttaatctcatatgttaaatatatattaaatcaattaatacatttttaaataaaatatattaaatnnataaaattataaatgtattttaaattatataaatataattggatcactttagtttggttatccattagatcagatgtcctatccaacaaccgatccaatccaattggattttcaaaatttacatctgatctaatccaattatgattggatatttgattctattggatcagttaggattggaccggacggttgtagttggattgaatgacttattgcacacccataattaaagtaccgagtataggcttatattatggtcaatcgtactattgtacgaatgctccatacctagtacgcactagacgagatataagattatgattaggtgtatgggcacctgattataattcgatttatgtttatgttatatttatttttttcttattaagtctgtcaactcgcagatattgtttacatgcataggtaaaaacaaagtaaaggctgaacaatagtaagtctgggctagatgaaggttgtacatatcaaggcggttagatctggaatgttcaaatcttcgagacagttgggctttattttgatggtctccatgcgacaacttttgtagtacaagtattttgtaaacttttgtaacttttaaaacgggatctcatagtattataattatatatttatagtgtaagtttacttataaaaattttaattattcaccattttggtaaactatttgaatagaaaaggagtcaacaataatttaaaatcacgataacgtgcttaatttagtagggcgttacagatattgatgttgtgtccctgtgtaatgaaaatttaattaccggatatgatagtgactattctatttagattagttctctaataatcatttattcagttatgtaataaatatttttaaagagtaatttgtggcaaaatcccctcaactatcaatttacttacaaaaaatcatccaacctcatattttggtgggaaaaccctccaaagtactgttccgtttacatttttaagatgtcttctgtccagcctcgttaaatcctaattttttccacgtggcaatgacaggtcactaaaaaattatcctacgtgaccatatattttacaaaataaaaattaaaatgaaaaattaaaataaaaataaaaactttaagagtaatttgcgacaaaacatctccaactatcaatttacttgcaaaaaaccatccaaccttaaaaaattttggatggttttttgcaagtaaattgataattggggggtttttgcctcaaattactctatatattttgaaaaataaaattaaaaacttaataaaaatagtacaattacttaaaaaatatgaataattataaattctacttaaaccgtggtttcgaacgaaaccaaactgttcttaatggtttggtttggtttgagaaatttattggtctggtttggttttgaatattcaaaaaaccgttatactgatttggttcaaaaactataaaaatcgggaccaaaccaatccgtgaacaccatgttatccatgttaatgctctgcattcgagatgaggtgaaagttagaattttatcaaatttgtctaaaaaatgaaataaaaagacttgaaatgggttgagcaattgtaaatttacaacataattaattttacatattctacaaattgtatagattataaaggccgtaatggtgctgttaaattgtaaatttgagtttatgcaataaaatgattttgatttctcataataataataaaatattcagcaccgcactaaacttcaactataaacgtttaaaggcatcatgtgtgtatatatattttagagtaatttgtggcaaaaccccccaactatcaatttactcgcaaaaaattatccaaaaaactttaaggttggatgattttttataagtaacttgatagttgaggggttttaccgtaaattactcttaaagtttttatttttatattaattacttattttaatttttattttgtaaaacatacccacataggataattttttaatgacctgtcattgccacgtggacaaaattaggacttaacaaggctggacagacgacaacttaaaaatgtaaatggaacaatattttggagggttttcctaccaaaatatgagattggatggttttttataaataaattgatagttagaagggttttaccgcaaattactcaatttcccttggtctataggttgattctcatagggaaatttgattttctatacttagaaaatcaaaaaatttgatttctaaaccaataatttaaaccctaaaaaaactat

SEQ ID NO: 27211 - DNA, 6786 bp, Cannabis sativa
  modified_base (167)..(174): a, c, t, g, unknown or other
  modified_base (320)..(340): a, c, t, g, unknown or other
taacaaataaaccctaaaatctcctttcttcacaattaagtcataacttagtgaaaattcacaaataagacatagtctaatttaagacttatggctgatttattaaaattaattaactgagttttacaagcagtattgtctgaactagtacggggaccatgggcctnnnnnnnnaagcttccaataagtagatctaaatttactaagtaaattctctaacttattaattcctccttgcaccattatagatttggaattgcactctcaattatatagagagcactatatgtttcacgatatagatacgctgtgaattatcnnnnnnnnnnnnnnnnnnnnncaatgatcctctataaatgatctacattgaatatggacaaatttaccattacacccttgaatgtatttgatgtgtgtcgtatgccgtatcacatttcctaatttttttattccaataatttcaattattttagtataattgtaagtgttgactgagattttcagaaaccaactaaatgagataatgatgagagctttgggataattaatgcaggtaatttttacgtggttcgggcattaatgagtcgtagtccacgagtctttgttattattgagagttcttatacagagaatgttcttggtgagttttttcctctctcctttgatcgatcccctttcccattttgttcaggggtatttatagagattgtagggatagttccaaaaagggataacttgtccttgagtgtcagtaatgtatgagcacaagttcccaagaggtgcaaaagagggcatgcataacatatgtcgtaggtaccatagggattaggtaatatttatctttatccttccttgattgatgtgattcttcataatggagtcgtcactagccccttttattactgtgtaattaccgtaaacgaggcttactgtgtctgacatgtcctcttatgggcgttccaagacactttccccatgctgcattaaatgcgaggtgattgttcgagtatttcctcctcctcctggagatgctttgttatatacctaactctcggagaggaagggaatgcttattgtgcttctccgggggctcacttcctgaactatactagtttgtttgaatatgtctcagctagttcttgggtgaggtgtccttttagtccacatgttatatgtgttcgaggccacgtattttgggaaaaacacagggcaatatttacccccaagtcttatttagtaacaggtaaatgagacttgtatgcggcctccagtcctttaataaatatagtggcacgagcccctggcgcgtgggtcacatttatgattgtcatcattgatttttatttccttttgcaggcaacgattcgcttcccgtccattgatagacctttgcattaatgtcgatgtcatagaggtactcaagcattttgaccgtcctttctcctcttaacacctgttcatcccatccgttggatcacggaattcgaatcactacaaattttcaccatacgatggtgtctgatcacagctaccttgcaccccttctggcctataaaagtcagcacctttcctttgctgggttactttcagcactttgcaattttcaacccagccaacacattcaaaaaatttcagacacctctaacttcctactgtcgttcctccaccgctgtcagaccaagcttatcactggacaccgtaaaattctcggttatcatctttgtgtaagtctctattcatattttctctactttttctacatgttgggggaaaataagaatggtgacattctcatttggttgcgcatgatttctgtgatacggtggttatggcagtggccatggtgattcttccccaaaggggggcgtcagatgaccactgtagtatgttgttttatttgcgtgcttactataatttttctttgaggctagaaaatgatcttcttatttgtttgccatcgagtgagtgtttgaagtgacttccacactcttctcttcttcttcttttccctttattttagttttttgggatgttttgcacccgatgtttgcctaggtgaatctctggattccctatctttggcaggcattcggagggggcctctttcgaacggttaggggacccccattccccttttctatcttaggatttggtttgtgggctaactgctggatttcatttttcagatgagtgaagttctccacgatcttcacgaccacagtttcttcggcttcgaccaagaaatcttagaacttcaccgagtccacgccatgtctacccccacttcaaccagagaaaaatcttcaaagaatgggcctatgaatctggccactttagaagaagtaatgaaggacccggtggtctataagaagttcacctatcgctccaatgactgggaggtagatgaattgcactcgaccctgcctgcgcccatcaattggagaagatcattactgttgctgggatcaaaccttccactaccgaggttttccatcaccttccgagggatgaagaaacgcccaatcataactataacggcttcggggcatggagctagacccacatgatgtctggagccatgctcccactccaagactattttatagattttttggtttttgttggccttgcgccttattagtttattccccaagcctactgcctactcttaggcttgtacattttctatgtttccaagaactaggccccacccagtctggctgagaatttatatttttatgaactcgtgtcggtccccaaaaagggggacaagtttaaagatggtttttacaaactccggacccaccatgcaaatgagggtccagtgccttttaatttttagaaaaatgtaaaggaatatcgtcaccgatttttcttctcctccggtttcaaagcctttgagcgtccagatctgctcactgaatgggtcagggttccacccatgcaccgtaccgcccacacccaactcttcttaaaccatgcgaaagtatttgctggttataataaggatgagttgaacatgggggatctggtcacaactgttaactatcggagggccaaattgatctcggagcgccaatgggtggatgacttcaatttttctaaggttctttgccctcatatccgaaatcttgagatcaagaaggcactctgaagggacatcatctcttatgtagaagacaaatacaataagtacaaattcaagaaggagtaggagctagcctataccaatgcgcaggccgcctcggggaggatcctccgggaggaagctgggaaggagaaaacccccattcgccctaagtttcctttctcggtccccaactttggggctcttagtgccaacacttgcggaacctgtaagtccccattgattattcaccatgtcccttctgttcaagattacgttggcctaagactagtggaatttaatagtcggttgcataggtttcggatgctcgattcacggtggggttataataccaaaagtttttatttttaaaaccttagccattttttgggtcggtcacggattggtactggtccccctgcaccatttcacttggaccattcttcatacttgacttcaagttggttccttccctcggatagctttctaggggatgacgacaccaaccttttaatatatacctttattagggcaaaattagaccatcaacgtaagactaatttcactgtgttattcttgcatgtatggtttttgacaatattctgactcatttgtttatttttgaacaacaaaaccagtggatgaactcctggatgcccttgctcaaacacatagtccttaagccaatttgcctgagccacacaacgtggttgtgactccgggaggaccttctgttgaacccctcgaaaaccaagttgtcctgattgacgaggaagaaggagaagaaggagaaatcattcctccccttgacggcaagtgcaaaggtaagatgattgagctggagccttctaagaagccaaggagggcagatactcctagtcccagcgttgattcgagaattccttcagaggtggacaagtgtctcgcacctctaggtattattttgactcccgttcatcccgacgaggaaagggttcagctccgcatcaccaaacacaattatgccttgggggagcttaccaagggcgatgctgaggcggaggctctgaagaagtggctcaaggacgcttaggatgggcctttttggggtgagtatgccggggatgtctgggattttaatttggatcctttgacatactgactggtttaagtgcttgcttcgtgggtggggggggcctaacctagctccttttgcttcagatatgatgagccatttttccaccgatctaacccaacttcccaccaagagatatgcatcttgcgcttctgccaaccccgtgtaccgaattcaggacatgggtgtggcccttactgcactaagttctcaccttttaaagtccttatgccttttttttatacaaggttctaactttttcctgttggctgctagattgcagcagaggccggtcgtctttcaaagactttgatcaaccatgggtttaccatgtctgagtttggtggcacagaagaggtgaagaagagtctttgggagtcagaggagcagaagaaggcgatccgggacgaagcccaatggaaggaggccttcacgtagaaaaacctttgggaggtgttgatggccaaatacaagattatagccacagccaggagggatcttcgagattccagggaagaagtccaagaaatcactgctaatttaagatctttacaggagctacaccaagctgacttagaaataacagctaatttaactattgaagtgaaagagctccgtgagctcaagtaataggcccgtaaggaggcggctaaggcaaaaagggatgttctcctagtccccatcacttgtcaacactgcacgaagcattttgacgatggagtgttcatgtgcttgaaggccaataattttgaaccccgtcttcctttctaccccaagcctgaggaagttctggctcgattctttgagaaaaataaaaagcttgatgctgtattggatgaacgcaggggtcctcatctttctccctgggttgattaagtgatttttatttttcttttatttcatccttccccctaccttaagacaattatgctttctttaaggggagactttttatggcctggccccaggccttcttattatttatctttgaaataacttgtatgacttttaagtttattttgccttttactttcttatattcgccttgttttttacccatatgttatgccttggttgtcctacacgggttattttacagaatataaacgttttcccttaactgttgatagtatttgctgaggtggtcgacatttcaagccctataggtactgtggattattctttttagcttgtaggtcccagagcctatttgtatggcctttcctaatttggcccaagtacccccactcctgggtcttggttggctgggaaaacccttcgtaggactagctcaccaatggtgaactttttatctttgaccttggcgttgaagtatttttccacctttctttggtaagctaccatccgtatctgggactcatcccgcatcccggagctcgtctatttgatacagcgcttcttgtaataaggctttgtttgctgtcggatcgtatgttgcccttttgtgggatgggagcaaggtttctactggtacaatagcttcacattcgtacaccattgagaatggggagagtctggttgtggttcttggaatggtccggtaggcccataatacttgttgcagttctttaggacagttgtttttgcaggtcagtaactttttctttagggtgacctttagtattttgttcacggcctctgcctgcccatttgtttgctgccttgcaactgcggagaagcttttgatgactccgtgttggttgcaaaagtttgtgaattcctcacagtcaaactgctttccattgtctgagactatcttgtgaggcaagccgtatcgacacacaatatttttgtaaacaaaatcgaaggctttcttggcagttacggtcttcatgggctcggcctctgtccactttgtgaagtaacccatggccactatggcatactttaccccaccctttcccgttagtaaggatccaatgagatctatcccccatacggcaaagggccaggggctagtcatcaaagtaattttgttgggcagggctctcggtatgttttcaaacctttggcatgaatcatattttaggacatagtctacacaatccttcttcatagttggcaaaaaatatcattgtctcaatttttctttgagagactcggatctccggtatggtctctatagaacccttcatggacctcctgtatgattcgcctagcttcagggtccgacacacaccttaagtatggcatgctgagccctcttttctgaaggacattgtccatcattacgtatcaatgagcctgatattgtagcctatttgatataaccctttcttgaggcagttctccttgtgttacgtatttgatgatggggtccatccaactcagctcttgctcattagtagctaccgtttctttggttttgatgcttggctctataaggtgctcaataggtactacccccagcctttctatttcgttgtccgaagctagcttagccaagcagtctgcctgagctttcttctctcgtgggattctttccactttgtattctttcaactcatggagcagttccctgaca

SEQ ID NO: 27212 - DNA, 2353 bp, Cannabis sativa
acccaagggagctacaaaaataatctctggattactcgcagcaggacctgctgggctctaaaaaatgaccatgactatctagagctaatttttactattagatcatcatcaacagtcaaaaacatcttatttgtattttctccctatttttgtgggcctccttctcctataaaaagagagctccataagctcatttttcacattcaaaaaattacccataagatcagagcttctctctttagaatttggagcttttgacatttagtctattgttgtaattaccatctcgtgagaaataaaaacgcgaaatagacgtaactctattactatcgcgatataaggagtgaactactataaatttattatgtctctcttataaaaactcaactacttattcattctcactaatctagcaagcgggtgtgacatagaagtctagtccaaatttttaaattaacaattgaaaagattgcaattaaaaatttggtgagataatgaaatagtttttggttgattaaatgctttgttttgcaattaagttttgaattcaatttaattagtattttttttaacggaaatagaacttcataatgaagataaatcgtgtaataaaatcgtcataaattgagcaggaacaacactcacactaaagcttcaatttagaaaaaaacaagaagctctagcgaaactatgagtcactttattagtaggacaataaataaataaaaaaaagaatctgctcaaacaattaatcaaatgtctacattcattaacaacttatccaaaatgagagttcatcaatgactgattgcgaatgacctcaactgccactaaatattttgtctcaagtaccactgccgaccattctttatccaactgaaagcctccttgatacccatactttcagccaacttaggttctacattcccaccacaaaaatgtacgagcttcaacaagatcgcccagatgatcatgagctaccaagctgattccaaactgatgagtcgcaataaacaatgcaacatcaatatttatcttgatttgattctcttgaagctttaccaaaattttggtaccatcttgtaccacatcattaaacagtggtggatagtcatcctttaattggacattcttctatagttcaagatacatttttgctaaaatcaccacatcattcacatgagaaattttcttattccaaataattttttttgctaatttttttaatattattttaataaaagtactattatctttttcattatttgaacaaattaatttatatttaataaattcaaattataaaatattattaaaataatcaaatgcttctttaaagaaaaaatcaaatactaactaatgtagggagcatggctagagcaagaataataaaaatgactctctattctaaaatttttaatagtaaaaatttagaaaatgcttgctgagatggacatattaggtaacaaaatattgagatgatataccattagagagagatggatgtcattttaaaaatttgcatagatactatacaatagcattgatagcattgatactattcattctattcattttttattcatttttttaataaaaaattaaagctaaaaagtgattgttgctaaaaattagaatacatattaaataataatacgttaaatcataattataatattttttaagaatgttatactattgaaatttttataaaagtaagagtgtcacgcttgggatgaggatgttgtgagagatttgtttgtttcacgtgattaggactttattttgtccattcatcttagtgattcgatcgtaaatgatggttggaattagagacttgagacttgtgggaattattcggttaaaagtgcctataaatttttgcaagaatctaaaggtgcttggtgctgtgatgccaatactgatttttggaagcatctttggtcgctacagatacctcctaagatcagaaacttcttatggagggctgctttgggtgtgctcccaacttgtattcagctccataaacgtcatgttcccgtcaatgctgattgtccgctatgtaacgctcatgcaaaaactgttcaccatgcgttggtggagtgtgagtttgctaaagctgcttggaatcgcagcatggtcgacgtgtgggcggaggctacaacattcagcagctggctgttggggatcttcggcagagggcacgaaggtgaaatggaggaagtgactgtggtgagtggggctatttggcgcccgcgaaatgaatttgtttggcagaagaagagttggcctgcttcaaatattgttgcatcagctagaaacatgcttaatcagtataaatttgctcaaggaa

SEQ ID NO: 27213 - DNA, 3988 bp, Cannabis sativa
ttgatgagtattttctaggattcataaaagttcatgacacatcagggcttggtttgcttaatgaacttttagatgcgttgaatattcttggacttgatgttgataatataaaaaggacaaggatatgacaatggatctaatatgagaggaaagaataaaggtgtacaaactaggctacttgaaatgaatctagagcattttacactccttgtgcctgtcattctctctaaatcttttttactctttctgtgatatggctcattgttgtcccaaggctgtatctttttttggtgtggtacaacgaatatactcattattttcagcttctacaaaaagatggaaagtatttacagatcatgtacctggtctcactgtgaagccattatcagaaacacgttgggaaagtcgtgttgacagtgttaaagcaataagattccaagctccacaaataaaagaagctttagattacttggcagagagtaatgaagatgccaaaacaagaagtgatgctgagactttagcaacatataatattcataattttgagttcttggtgagcatggttatttggtatgatttgttgtttgctgttaatattgctagcaagatcctacaaaatgaagatatgcaaattgatgttgctatcaaagagttaaagattctactttcatttcttcaaaagtatagagaaactggttttgagaatgctttgactaaagctactgagattgcaagtatgatggaagttgaacctgtgtttattgaaaaacgaaaagtttacaggaaaaagcaatttgatgaaagtgtcaatgagggggtgacacaatcagcagcagagtcataaaaaattgactattttctttgcataatcgatcaagctatttcatcatttaaaaccaggtatgcatacttttatagtgttttatttaaaattatatttcacttcctaccataatagctaataaaaataattattgttcaactaggttcgaacaatttcagaattttgaggagaattttggactattgtttgattttgagaaattaaagtctgcagatgatgacactttgaagaatttttgtatcaatcttacaaacttaatgaagcatggtgagatttcagaccttgacaatgatgacctataccaagagttatatatgttgcgtcaaagtctaccaaaagaaaccaaaagagctatcgatgtgttgagctatataaaagaagtggatggtagttatccaaatgcttggattgcttataggatttttctaactattccggtcaccgttgcccatgcagaacggagtttttccaaattgaccttgatcaaatcttatctccgttcaaccatgtctcaagaaagattaagcggtttagctatgttatccattgaaaatgatttagttgcaaaacttgattatgcaaatttaattaatacttttgcatctaaaaatgcaagacgcataatatttaagtaatacattgaaaagtttatgtgatgatttattggtttggaatgtatttatattactaatattagtttaattttatttaaaattacatacatagaaaaaaatacatatacaaaagggcccatttttttttaattttctaaaaccgtcttgggcccattttttttcagggccggccctggttacccctggtgaattcagttgctatccaccagaatgacttacccgggaggaatatagggaggtcagtggtgaggacagtggtaaggccaataatagtagatcgactgggataggcgcttgaagccttgagcatatcagggctggaccaatactcctcctgacagagtactttaaagaattcataaaccatcttggaatttctcctttctaattggttccaatctcctacagaatccttgcaagtctaaaggttctgtatcatattttaggatgggagtgtcccactccccaagaaatcatttatttttgttctgttaaggcagtatctacgaggaagcattgtgcatggggtttttattatcccaggactcatacaaatgatcgtaggatcatcgtagggttaccaaacaatgccacttttaaggaggatttccttttagacaactggtattttcccaatcaactcaaccgtattttgcataatacgtaagtaaactctgtcccaaaaacttgattttgagttatttcatatttgtatccttaagctcgccgacttatctcatttatcatgttaacatcagtctcaaaaagaccaattccaactcctgagatggtcgagcggcgtaaaacttttctgggtcttccgttcagactgcgatcgaccgaatttcttcttaacgaagccaatctgaaaactattggccttcttgccttagataagtacacttgtgattacaagtttcccaagtactcttcgtgggagagggttccagttctagccaatgaagagagccaagattatgtggctcgtgtgcattatctcgagagaataacccctctgaaagctaaagaaggagcatcccaaggtaatcaatgtggatggtcacccagtgtgcttagggttgaacgtaccttgctagtacccttccaagatagtcgttataacttttatatttggaatcctttcttaatagattgcataatctataggtttgatagttggtacccacaattccatgttcaacttagttgcactagttcataccatgggattaccgagtagtatgggacaaacttggatagggagagccacctagattcagattgcgattttgatccaattaacccctatgacatatttatgatcacatgatcaagatagtttagtgaatactatattcccccttcttcatcatctgatgattatggtaactttccttaagtggaaatttatttcccatttttctttttatctgtttttgaataagtgttgatgtatttctctgtctcacagatatggatctagagaatcttcttcactcttcgagcaaaaagggtataaagaggattgctaattcggagacttcttcagaggtaaattttgaaccttttaaaagatctagattaaccactgcaaataaaaagggtgcctcgcaatccataaatctcgaatcttctgaagatcaagtttaggttcatactccagccaccgcacctgttatggaactagttcaaggatcaatgcaataggcaaccacgtcctcgggtaaggtgcccgagactttgcccatcgaagctgggggcactggcttagagtattgctcgcaatttgcagtgtcctgctggcgccatttctaatctttccagtctggcgattgagatttggtcaataaggcagtccaacagagatgcttgagaggagtcttaacttcactctctcggttagtcccattcttttcattttttaacacttcttttaggattttgtaaattctgatatgtatatttttccttgtaggcctccttcttatcccatgtagcccagagtcgggttctccagaaggtaaagcactcagaagctgaacttcgtaaaaccattgagcaatgcaaggctgttgccaaacaattgaacgatgctcaaaaggagatatcccatttgactaagaaggctgaggaggcgagaaggactcataagactgaactcgaggcagcccaaaaggaagtaaggacaaacaagaggcttgctagaaactccaagaggaacttaacgtagctactatgaagcttgaaggtggcgaagccaatgctaaggaacggtgcaatgctattgtcgagcattccatttacaaagcttagatgtaaaatcctgacatggacttaagtttcttgggggaagacactgaggaagtcttagcttattgcgagaaggctaaaaaagaagaagaagaagcaggtgagtccgaggaagatgaagacccatccaagtctcctactatgtaggcttggtttttaatttttttttttttttttttttattttttaaaaaatgaaa

SEQ ID NO: 27214 - DNA, 2824 bp, Cannabis sativa
  modified_base (1845)..(1852): a, c, t, g, unknown or other
tcctgcacagtagagcacccgtgagccaagcccagcaagacagtaaaaacataacaataagatgctcattatgctatttaaatagtaatgccattcacatatacatctgtataacacagacctgcatgttgctctcacatgcctatttatgtctacgtggcgtagacctacatgtttctctcacacgtctatatacaataaggcattagaatgattcatctcggttatggttaccgagtcaaacctgattatgccttgaacgcataatccttaaatctcaatataatcatacacttaacatggcataacatttactcatttatatcactaggatcataatcctaggctattaaccgttcctattagggtaataaccctaatctcggttacaattgctcacatataacatattcaacataagcgccaccgcgcatactctacatgctaactgttgtcttacctgttgtcccgcaatagaagagattccaaatccctgggtgctcctaatcaggtaccggtaatcctagtcacacaatctgggattttcacaaatagggttaacccctgatttcaaactcataaatatattcatggcatttaaaactcatataatcacatagagctcgaaacgaggtttccaacggtatatagaactccacaaacggagttcggaatcaaaatatatgcattttcaaagttcgaattcaaaactgcccaaaaactcgagggcgggccgcgacatgcccaagccatgccgcggcacctgggacaaaatcccaagttccaccaacaggggcgggccgcgacatgctcagaccatgccgcggcacataggttgaaaacccaaaaatcagcaaccaaaaactcgaatttccagcctcaattcatcatctaatcatcctatttcaccaccaaactttcaaatcaacaaatagggttgctagtaattaatagatgctcaaataaacatacttcatgcatcaattccagtaataaaccctcaattttagattacaataacaacacaaaacatgctcaaacacttaactcaactagctcaagaacttgagcttaatccaaccattcctatcaatttttccagcaactcaatactaaataaaacatgaatttcaacctacaaaatccccttaaatctcagccacaactcaacaattaaaacctacaacaaattcatgttattcacacccaattcaccaagatcaaacatcaaactcgacaacatgcatactcaagaacaccacacccttttcatgctctacttacaattaaattcagtaataaacaaagattaaaccaaagaaagttacctcaaatctcaattcaagagcaagctcaagattcaacaacaacaaagctttaaagcaagctaagattcaagcttttctttccaaaaatcaagattgaacacaaagagggttgagtgagaaagaggggtcgggtgagaggaggagaaaaatccagaaattcatttcttattttctcaaaaattcaacctttaacaaagtaagtcaaataaggtcataacaccaaaatgcccctaaggccaattctcacatatttaaacatacaagggcataattgtcatttcatgcacatttaattcaaataaaatttagatttctcattatcaaataaaataccaaataattcaatccaatttgcatttcgggcccgaaatacccagttgtgactataccgtgccaacctgccagaacacacctgaaacaacaacacaggcatactatataataatatagttctattaagcacataattaaattaatttcattattttacctttctcgggtcataattactaaaatnnnnnnnnctcaccaacggggtcttaccatgttacaaatcatattaattcacatctattgaactatataataatataattcctcaattattcataattttctaattagggttttgctaatctatttcttaattctagggtattagaactatagacctttgcctgcgtattttcttggagggacctatttttacgcatgtggaattaaaaaataaagattaactttaagaagttatcttgttagcaagtagtttgacgtaatattgaattgaaacaatgtttttattcatcaatttatcttaaatatgtgttgttcctgtgcaaggtacattttttcattctaaaagattacaaatctaaagtctgcttttaaaactcattttttcgttacccctacacaacatatcgggcaagggccaccactgaatagtggtggaaacttagctcttttacgctaattcctatacagtgaactatataggaaccactactaaagagtagtgtttttacaagttggtcattgatagtactttatgagatgttctccattccaataccttggtaggagaactaattctatgttctcattgtacctgccaagcttgtacgtacctttacttgttatctctgtaacttggttcagaccttcccagtttggtccaaaccctcctactgcaggatttttagtaagcaggaatactcttcgaagcactaagtctcctacaaagattttatttccttaacttgtttattaaagtatctggcaactttttgctagtaggcctgcagctttaagttgtcttagtctcttctttcttacattttgtcaatggattctatcagcaatgtgtgatttacttcttagccataggttgtcctcctatgggatagtggttccagttcaacgagtagcattgcttcatagccataggctaatgcaaaaggtgtcttctacttggtggtcctgtgtgaccagagtac

SEQ ID NO: 27215 - DNA, 4174 bp, Cannabis sativa
  modified_base (49)..(62): a, c, t, g, unknown or other
attttgagttttaataaacatattatattatttaatgattaaaatgtannnnnnnnnnnnnnaagttttcaaaatgtataagtttttaaaaaaaaatttttttgcacattttttgtaatacatttatgaaaaaaaaccctaaatttagatcctggtaaaataattcctaacagagtggcccttactcaaagtctacccaactgatactcatatgggtactcgatgggtctatcgcggacactaactgcccaagagtatcaaggacgtttaccttggatgcatcccagatcacccatcaacggttatgctttttttgacacagaatcagatcttgtcccctgagccagaacttggtagtgcccgcacctcacatacctttttgccagacgattattctaagcatttacttttgaaggttgaaacttttggcaacacgtgttcactacgtacaatggtccccaatagtccagctattacacgcgcgagcacaattatttctaaggggtccaatagtcacctctcatttgcatgtaatttaccccattagtaggcttttggcaaaaactctaggcgagtcatgggtatgtccatacccgcccttagcgtataaatacccttctaatttcatacgaaggggggatcacaaccgaaatacccgaagctttgccaatattgttctaagctttcttcacctttaagagaaatcagggacaaagagttagcgtttcttgcaaaatattataaacacatcaaacacaccattagaggctaatagactgactcgtggcctaaggttaattaatacctaaaccacgtaaaaatttccgtatcatttatttctatatgttactattttttagctcctaaatatttattttctaaaaatatcgataaatatttatatataaatatataataaatatatatttttatatttttttcctaacactttttgactctctcacaaaattttattttattattttttattatatttctttctatcttttattactattcacactcaaatttttcatactatttttatataattaatcacttttatataataaaaaaaaatcttaattaatttctttaaacctttactaaaatatgattcttttacttttacactttttctcatattttttaacactcttactctatcttacataggggtgttcatataattcgcaatttgtggttccaaacctcaaccaatcctgaccaaactatttgagatcggaccaaatgaatccggtgtgaatgatttgataaattcagaccgttttaaattctctggtttggtcacgtttttagaaatctaagtagtggttcaaattaaaccaattcgtataattattatatatatatacttaatatattttgagagataaaatattaatatttggaaacaacttcaagtaaaatattgatattgagtttatattgtcacgataacatttttttattgttatttatgtattataaacttttaaaagtaaaaaaaaaaaaaaaaaaaaaaaaaccgaaaaaatgaccgaaaaaatgaacaattattgtaaaaaaaaaaattagaacaactacgaaatacaaaccatggttcgaaccaaaccaatttgttgttgagtggtttagtttgatttggtttgatcattttattggtctggtttggttttgaatttataaaaaaccataatagtggtttgctgtaaaaaaattgaaaattcgaaccaaatcaatctgtgaacacccctggttcttacaaaaaaaaattaggatcactcttcctatatctttctctcttttacatgatcaataaaaatagtatttttttttagatgttttgtagtttattcggagttgatttatgaataatttacacattttaacaaggttgttgtcttgttattttttttcttgatttatagttgtctttttattattttatagtttttttgtgtttttgtttaggtattttatagttgtttttatatatttttttttgtacagctattgtttagtttatgtacattttttatggtgtaatttttcagaatatttttttgttcaacagttaacttttagttattttttcatttatattttttagaggtttttataccatatagtgattttttttaaaaaatattatacttttttaaaaatactgtgtaagttttatagtgtgtactgtgttaagttttcactgttgttctacggttatcttttagttgttctacagtaattttgtaaaaaatccatgtaatagtaaaattgtaaatttttgcttaaaatccaatatttttataatgacccctatttttatggtgtatatttttaagtttttttaagacaatatttttagttgtatgtgtgttaactttgtagtttaaatacatatatggagttatttttttttttacatattttattaaatacaatgataaattttttttaatttttttctaattaattgatatattaattatatattacacattatgtcctatgtccatattttaaaatcataacattttattatttttattattaatataattatttattttttattttaacgctcactaacttagaaagaaaagagaaaaaacattgaaagtaaaaattaaatttcataaaaaaaaataaattaaattatgaaaactaaataaaaaaaatataattttaaattaaatagttaatattattttacatattgcaattatattattttttaaattattttaaattttaattttaaagtattcttgtaatttttttaattttaatttttttaaattatttttatattcttgtaattttaaaactttaaacatatatttttttttaaatttgataaaagaaaaatgtaaaaaaataagtgcgagcaaaaatgataaaaaaaaataccatacgtaagatccccatttatatttcatagatttcaatgcaaataaaaagacaaaaacgatatgacgtcacattagttgccaccgatctttaataataataataataataatagtcaaatgggaatctaagcttaagtctacgatccaactcagcaagctacgtcacaatactcagatagcgtctacgaataagtacaagttgcccaccgcctagtcgcctactactaagctacgcatactccacgaatcttcgtaccaagtctacgacggcaacctctgttactattacgaaacttttaaatcacaaaattacgacaagacgacggtacagtttacacaatttacctttgcatatttaaaaaaaaaaacactcaaatgaaaaaattgaactattttggctgtgagaacaaaataaagactcgattgccacagagtaaaacttttttttttctcttacatgttattggtaagtgagttacatgagactaggagggaccgtggtcgcatcgaacagatgcaaggcagggtcgtgtattctaaaagagaatagaaaaagtggaaaatttaattaggaaagaaaagaaagagagagatcctagtacttacaaactctcacctagacataaccaaactagtaagatgtgggacaacagaggaggaggtgaagagagaatcccccacgtacttacagttctcatgatcacgtttcatcgaggttgaaatcacgtatctttcccgagtgcgagttggcaatacaccagcatcaaatcgatgcaatttatgggaagaactactactgactcgttgtcttttcttggaagacttccacttcaatttggaaaacacattatcctttgatagatctaaaactatattgagatctttatccttcctataatctttgtcactttcaggacctgaatccttgtactgattttcatcttttccagaggttttgttttcgaattttgtaacttgggcagaaacatgatcggacatttgtgtgactctcttaaattctaaactggaacttacaacaggcacaaggtctgccctttctttcatctgaatccactgatttcctaaccattcttgagaatgtctcaattcaagacggctaaaaaaagactcctgcttttcagctgcaaaggtaaagttaagacattgaaatatattaacaccaaaaatagataagaaaaggggaaaaaactgtgtactaactactttccaagagaaatcatgcatacctggaaaaaata

SEQ ID NO: 27216 - DNA, 2755 bp, Cannabis sativa
aaatagcaaattatatttttaattttaatactattactttatttataataacacacacatgaaaatattatattttaaattatatcactcagtataaatataatatataaaaaagagtcacatgagtaattttagaatctatttcttagtggagcaaacgtaagtgatatttttaatatcgggttaattaggcagggtattgattttggatgtatttatactgagtgatataatctaaaatatataattttgatgtgtgttaacaaagtaatattattaattaaaattaaaaatataattaatttgctatttttaaaatatatagaaagttagtgattttgtgaaaaatattaatgattatgaaattaacaaaaaaaattacatgtatttttataataaaataaatgaaaaagttaattgtttctaaatttaataaactggtcttgtgactgataatgtagttattttcaaaagactatttagacttttttgcttaataaaaataaacaatttaattaactatacttttaattaaagtttttatatcttgctttgtggtgttgcatgtttgaatgtcttcttcacagaagtcaatgtagtatgagagctacaaagggaccatcataattaccttttgtgaagactaaaaattgagagatttatataaaaatgttagtgaaagagttttttcatataaaatggttttttttttcatatgaaatgtttagataagaggattgattttaataatttttttgtgaatgtgaaatttataccttaaattgtagtgatgaaaagggaggttatgatccatatgactaattatttctatagtgaaatgtttatatgtcttattatcttgtgataattaattaaaataataagtatcatataaaattagttgtgcaatcccgcgatcatcaaagggtgcataatatgagtttagtagcaaaagttgtgattttagagaaaattgatggctaaactgtcgcaggctgtttgagatgtgtaggatgccaaaaaaaaaaaaaaaccaaagttaaaaaaaattgcctcaaacggacaaccaaatagaaagatattaatgtttaaagtttttgaaaaaactttatgtatattttttcgtctttctataatttttttccatttatttattcggtgccttcacttattgtttcattgtattggtctcgaaaaattatatgaaaatgagtgggcatattgcaaaattagttaagaaatgaaaatattatgtcatttcaaagctactaattactttttgttcaacaccctatcatatattcaaactaaaatctacaccccaactcattcgtactacataactttttttatatgtcaaccttaatttttctactgaaaataacttaaatgtttctcatcatttcattgcatataacttttttatttcattctactaaaattttagtacaatgttcctttatgacgtctcgtacacactttattatttggtatgaggtatgttttctttaacctacttttataagaatattttttttcataaaaatattaaattgtataaaaattaaaatatacacattattttaatattcaatatactaattattatacaaacataacttaaaaaattataaaaataatactaaactactagaaaaatacaagaagttgagtatatggccttgacgaaagctatcaaggaggcactttggttgactggattgatggaagagttaaaactcaaccagaaggttatcgctatacattgtgataaagaaagtgcaaaatgcaatttaccataaattgtgtgcacatgaatgtactaagcacatagatataaagcttcactttataagagaatttgtgattaccaaggtagtgtcaagtagtaagttcgagcatttcctgaagctgattggagttaattgagattcgaaggggctaggaaacaacaatatttaaaacaacatcaagtgacttcaacttgaaactaaggtggagatcttttgattatggttacaatttttcgtcttctgggaagctagttgttactacgtaaagcttggtgctcattcgaaaagctttgttcgtaaaactgtggctagtccggatggttcatatggattgccttttgtaagtaaaatcttctgaatagcttttcatacatctagagacatacttccagatagcttgttgtcagtcttgaacgcccattcggaacatgtgtattgtctttcggattgtccgtacagagtgcatttttgaagctgacgtggaatatgtttctagcgatgacttcaagaatttaagatagcattaattagccatgataaaattgaagttaattttagcaattatagaaatctatatatagctatcacttttgtaattcatggtgaatcagaccattgaaaaacttgagagaaaatcgtgattgtgtaaggctagagagagtctaaactaagataaaatttatcttgtaatctctgtaatagtttgaaaggattcttgtaacctaaaaaatacagatatcaattaagataggattattgttgttctgactgagacatagagcattgcacaagtcttaaactcattaaattggtgttatttttctctaatttactgctttaatctgttacttgtttcttgtgattttctgatagtattgttcttgattgcgtgtttgttggtccaatataattacatttttaattattaattgtatcagcaagatattattcttgaatagagt

SEQ ID NO: 27217 - DNA, 3244 bp, Cannabis sativa
taaatttgaaagaaaacaaaattaaaaaatggtatataaagtaacttcctttatttagattattaacactaaaattaaaattttttataaaaaccaaaaagaactactataaaataatttaattaaatatataattttcaattattatatatatgaaagagatgtatatttaactattaaaaagttattttagctataaataaataaataaaaaaaatgatatttttagttacataaaaatttatatcattattaatagatcatttaaaaggaaatatatttttaataagttttaattattataaataacttcatgtgaagtgaatttttatgtttattgtattatgattaaaatttgtgctaatcacacataaaaatatatgtagaaaatatactatataattttatattattattattaaaaattagaaaaaatagacctaaaattttatatgtaattaataaataaattttaaaaaattattaaaactgcgtgaagtgcagattaattacctaatataatataaatgaaagcacacaaaaagtctaggtggcattctatatttttttattgtttttaaaattttgtgatattttctatttttttagaaagaaactactacacatataaactaaaagtctcacatagtttagaaactactaaggtgttactcatatagattataaatattacttttgttatgttactttctttagtctatgaaacatatattttttataggtaataaatttatttcttttctaataaattttaagtttttatttaatatgtactaataaataatatattgtatatattatgaagtatgactacagtacatataaactaaaagtccggtttagaaactactaaggtgttacccatctaggttataaaaaatacttttgttatgttactttctttagtctatgaaacatatattatttttcatggatgattgatttatttcttatccaataaattttaaatttttatttaatatatactaatgaataatctattttttatatatttagaagtaatatttttttttctaataactacttaaattaaatttatttataaattaataaatattaattattattcatatatttatggattaaatttattttaaaatttttttttttactattctacatttttatgtctttataatttagaaaaaaattgatttagaaaccactaagatattattcatgctcgttataaataatatttttattatgttactttctttgtctataaaacatattacttttttgtgggtgatattgatttatttcatgcccaataaactttaagttttttatttaaattatgctaataaataaactattatatatatttagaattattaattttttgtataataactacttagattaaatttatttataaattaataaatatattaattattttaattactatttatatatttaaagattaaatttactttaaaaattttatttttactattttacatttctattttttaatttcaaaaattataaacatttttaaaagctaaattaatttaagtaaatttaaataagttcttccaatgagctctatagaaacgacccaacatcccatccgccttaaccaaagcacttggcgaatttcttcaccaaaggggatcctaataattaaggaggtgaaaattgtcctgatcaatgactggtttgctagacgagagcattgtcttaaagttctcgttaaaatagttaccaatagcatgtcggtggttaatccagtgaacaccatcctctgcgatcgacccaatgaaatttctcttccaacttatcaatgtagaaacatggaagaatctcgtgttacaattcctatcacgcagccacgttttacaatatttctggcaccaaatttcacattaacaggaagaaacttcctcaatttctaaaagaatatctgtgtccaattgagaattttcaaaggacaaaattctctaaaagaattttcgcttccttaaatatgatacttggaataagaaataaataattttattatttaagaagtaatttttataataatatggatgaattagttaccaatttcaattaaaaaaattctaattacataatcaatattcttttaatatacccaccttcaattatacataaaaattattttttacaaaattataaatgaatatatgttatagttttcatattgcttaataaattaaacaacttgtgtataaatttacataaggattatcctagttcagtttttcattggatgtgggacaaaattgtttggttatttcacactccaatctacatttaattaaggacaactctaataatacatgataaattaacataaaaataataaaattttggtattaaatttttttcttcaatcacaacaaaaagttatactacaatcatattctttactattatattattttattaaattataaataaatataaataataaatatataaaaagtttaagtataaatatattatttaaatattaaaaattaatagaatatttctttatatagtttatagtgtgtcacattaataatagtagaatatcgtaaacaatgttataaatatgataggttttagagtgtggttaaaataaatttagtgtaaaatctcatcaaatttgatattttagtattgaacatactttttaaaaattattatattaaattatataacattaaaaatttaattaaattcataacaatatttatgcataaaagtgtactaaatactattattattttttcgcattttttttaatattttattggagttggcttataggatctaaatccaaataatatgtggccacttttttgaccatacgtacaaatccccgtattctcagctttaattaattatctgaataaataaggcaaccaatgcgttgcccagttacagctatatatctgaataatattaaagaaaccgtccgttcttgtacctaaaagtaaggaggattgttatattggtgttcattcaatttgattggcacaattttgctcatagagttttaattcgccgtgtgtttgtaagtaactgtgtaattactaggtatagtaattattagagtgataattacacagtttagtaattacacttagtgcgtttggaaagccacattgtaattggatttgtgtgtaattggaggtaattacacaatttgacatgtttgtctgaccatataattacactgtaa

SEQ ID NO: 27218 - DNA, 1954 bp, Cannabis sativa
  modified_base (1361)..(1366): a, c, t, g, unknown or other
  modified_base (1431)..(1434): a, c, t, g, unknown or other
  modified_base (1546)..(1546): a, c, t, g, unknown or other
acgagcaatgaaaacatgcacaaaaattaaatcttaaaattttaatttttattatgggtggaataattttataattagggtcacatttaagtatatttagttagatttccaatttaatatataatgctatttaatataattaaaaaaatatattgtcaaattggataaagctttatacttataattacgaagtgttactttgactatatttttgttttgaacattatttgacatcaagtgaaacatggaataaattaatgtaaattaataataagatcaattcttcctactctcaaaatctaggtttctgatctttgttttaaataataaatatacaataaatagaatttattcccctaaattatgacatttacagagtttttgttacatttctttatttcaaaaattatcctattttcaaaaaaaaaaaaaaaaaattatcctttaattataaaaaactttgaaaagattccttacatttgcattttgctaatattttaaaacaaattgttaatatactaacatgaggttaatctatctcagttcaaaaatgaaaacaaaaactaaatacataaattacaatctaaaaatgaattaaaaatatgtatgtgtgtatactttgagctaatatttatatattaacttaaatcaaatttcagttagcttaaaattattaaatgtatactgcaataataaatgtaattcatagccaataaatatttacaacactttgtttagttttggaagacttttcacgcaaaaaaaaaaaataaataaataaaaaaaataaaaagcataactcaacaaaagtcatagataattaagaaaaaattttatttattctttatttgaatgaatccaaggaacgtgcatagttaattaatttatattattatgtttgtgaatagaataattaaactcatggtacatccctatatattcttcaaatatatttatatataaaaaacttttatgacacacatatataaattaatatgcatatatatatatagtagctagagaaagcttccaaacgagttaggtagaccttataaatcgacctattatattttttaaaaacagattttattgtacttatattcccagcaatttatccatgtgatctagttaaaaataaattattcctatctgcatattttgtttctttgtttctttttaataattttactcgtttcaaactatatatatatttatataagcatggtttgtgtcactacaagaaatgtcacttttaccagcacagttcgttattgcgctggtaaaagtaatttttatcagtgcatttggcaaattgcaccggcaaagaggtcaaagttttaccagcgtacatttgcagtggnnnnnntctaacttttaccagcacatttatgcgctgggaaaattttttttttgccagcgcttttcattttnnnntggcaaaagttctaataccaatgccaacccccttttgccaacacatcataggtaaattctattttaccagcgccataccaacttttgccagtacaaaaatgtgctggcaaangtgacatttcttgtagtgtgtgtatgcagtaccactagtgatgagtatcttctatttctatatgtgtgatattttatgattggttagcgatattttttaaagttattttcttaagttatacgtgactttagtaacactaaaaagagtgttaggcatcagtagtgttatgtaagagaattgttaaaaagcactaccggtgcctagtaatctcttcagtctcatatcgttattgatgtaattaagtattgaatctcatattaatttaataaaataatttttaaaaaatatactaactaattgtgtaacactgcctttaaaaaagattgagtataactaatgactaatagcaataattgactttttagctattctctacgtatatacttattgtaactatatcacaccgtc

SEQ ID NO: 27219 - DNA, 2132 bp, Cannabis sativa
aaaaaaaaaaaatcatcaatagtatatgaaaataatcctatttttaatttcaacttgaagtattttttttttaattattattttaaaataactagatacgtaagtaaattatgtttaatgaaaataatataatattcaaatgatatttaaaaatattaaatccttttaatttcaaattcacattgttttcaaaccttaaaaaaatatcaaatatataatattaatttttaaatatttaaatttaaattaaattgatatttttcttttttttttaataaatatacataaatatctaattatataacactatatatatatatagaaaacgtaccaaacctacaagctactgttttctcatcatatacttcccattcttatatattcgatcgtttatatatatatacttatcggctatatatataatttagtcaatatatatatatatatatacttagttctcgtaagcttcaatcatgtctaccagttcatcatcttcttcactgtcttctactataactacatcgctcacaccttttaaatcaaaaaggtattatctattttatttttggtgacctctataataaattatatttatttttcttctttgcttccatatattatttaatttaagtagtttggaaataattatggtatatatagcattaattgttatttatatttctcactcatataaatcgtgactttctacctttataattaagtgattaatctaattaaatatgtaatgtagatatttttgttgttcacttaccttacatttaatgttccaatttgtttatttatttttaaaacctaagctgaagaaaatatacattttttttcagaatataaaatatatatatatatatacgttaaaaaaaacactaatgtataactaaatattttcgaaaaaggtaatttattaattatcttataactaaacaaaattataaatttattgaataataataataaaaaaatcttttaacctataactaaatataaatgtgtatatgcgtttgttgtgatgatttaaccaaaaaacttgtttatgatttttatattatacttaatagatgtatggtgccatttatcaaatatatatataaattaatttatatcaaaatttgttgaatacaaataaatttaatttgataaattatttatttaacatgtatatatttgaattcaaaaaatatctaacatttattatatttaacgaattctttgtttgaatttaaaatttcacctaatttaataaaaattgaaaaaacagaaactttataatatcttttttaaatattgatttttttattctactaattaattatatctataaatttattcttatattatgtatataataattatatttttatttttagatttatcttcattattatctcttaatcatctttattcaatctctaattttaatatcaaaaatattattattattattattttatgttttgcagcttacttagtatcttatgcattattatctttttaatatatatggatcaaggaaccattgctagcaacggagttaatggtgtgcctagcaatggtactgttcatgggagaggaatccagtaagttttgattatattattttttttaaaaaaaaaaaattaatatataataaattttatttatatatttattattattaatactatcatataatatttttttttgtaggggtgattttaatttaaataattctcaagatggattcttaccttctagctacctgataggatttggaatttcagttcttatagttgcaatatgcaaaacaaggtaatataaatataaatctaaatatatatttaaataataataatactttataaaaataaaattaatttattgtaataattgatttcaaaaaatttcagtggaaatcgactcaatcttattcaaattgggttagtatattggatgactggtgttgctttgtgcggattctcaaaccattttcaaattcttacaatttctagaatgtaagtgaattaagattttatctatacatatgtatatatttgttagaaataaatctttttagatggaggaattttttttattcatatataacttagggatttttttgtttttacactttaaaa

SEQ ID NO: 27220 - DNA, 2939 bp, Cannabis sativa
aataaagttctacaatcattaacaactaaaccaaacacagaagtcattaactgagtagaatgaatagcctgaacggcgagcatgctgtcgctctcaattgtaactcccttccagtggtttgccttgatccaactaagtgcttctttgatacccattgcttcaaccacttcagatggaaagtaaccgccatgatactcagcctgaatgtgaagaggggaaccaagatggtcacgggccaccatcccgaaaccgtaggaattttcctactcaaatgaagctgcatcaacattaatcttaatggtttccaacaccggtttgacccaaagctcattcctatcacctaaattgtttaaaaatatagatgagagagaagtaatatcctgagcttttttccaatgatcaagagaagtatttgctgataccataacctcattcaaagaggaagattgcttcttccacgcttttttattccgcgctttccacagtgcccaacaaaccatagcaattttacacatatcttcagtcacagaagaagtaaatgtttgttcaagccaagatgcaaaagttcctgggggagacgggcaatgaaccccgagatactgccaacatgcagtagccaaagaacactcaatcaaggcatgagaggtgttctcgggttgtgtttcacacatggggcaaagaatagacacatttacatgtttagtgacaagattgaagcaagttggaaggcaattagtcaaggtgcgccacaacatatttttgacttttggtggtatcttcagttgccacaactctttccagaacccaaagttgttagatgcaggtctagaggacttgctctgaagaagtagggcgtacgcagtactgacactgaaactcccatttggttcaccactccagtaccaacagtcatcgtcaagagtgtgactcaatgggagtccaaggatgagagcagcatctcggggattgaacatatccatgattaaatcataatcccaacacggtgaatcaatcgagaacaatgccgaaacattctgattcaagagcccaggattgttggttgtaacatatggattgtccttgtcaggaagccacggagcatcaaggattctagtgtgcataccagtacgaatagtgcgtcggactccaagtttgagaagcttttgggcgctccaaatgctgcgccacacgaagctggggttggagccaaggtcagcactgaggaagtctgaagtgggaaagtattttgctttatagacccgactgacaagagagttaggattgcataagagacgccaaccttgtttagcaagcatagcaaggttgaaatcacttaagtgacgaaatcccactcccctaaagtgtttatgtgtagccattctctctcaagacatccatataatcccattcctccaaagtatttatgtgtagccttattgagttggcatgaaggaaacacctcgacggcaccaacaagtttctgcatcaccatttctccgacctggcagatccatggattccccaccatcagctacacatcccacaaatcgtggagatatccctgccaccaaatcagccacggattcaatgggaattccaccatttactcttgcaaaatcacatcccaatcaaaaagagattgtgatttatgacacccaggaagaagatgaagagttgacaaatgctgaattaaaaaggaaaagatttgctattgacaaaaataattctgttatcaatgattccttattgcgtgggaatgagtctgtgataagtgacactgaagtgttcatgggcctaatggatgttaatgtggaaattgggtcaaaaaatgtgaatgtggtgggtcctggatcccaggcccaccaagcattatgagttgtatcagttggaattgtcgtgggcttgggaacccgcgggcttgccaattccttaaggacattgttgttcaaaagaaacccaactttattttcttgtgtgaaactttatgcaaaaaagatgtgattgaaagattaagagtccaactaagttttggaggcagcttttgtgttgaggcccaaggtcataaaggagggattgctcttctttggaaagcccaagaggaggttcgtttacttcaaatgcacacaacttcattgatgcagaaatactgatacaaaacacgattccatggcgtcttacgggcatatacggtgaacccaatagaagcttgggattcaacacttggaaactaattcatgatcttgctattttttctcaactaccttggtgtttaattggtgatctcaacaatattggtagtccttcagagaagaaaggtggtcgtccttatccctcttctcttattgccggttttcaagaggttcttcagagttgtgatttaattgatcttgaccttcgggggtacccttttacttgggaacgcagcaaaggtactccctctagtgttgagattaggcttgataaagctctcgtatcccatctttggctccaatcttttccccaagctactcttaccaatggagatttctcatcatcagaccacacccctatcttccttgaaccaaaaccaccgtggctgccaaagaaaatataccactttcggtatgaaaattgctgaagccgtgagcctttttgctcccaattggtagacgattgctggaaaaataatcattacctttctcttgctgaaagaatcaaagcttgcggcattgctttggatgcctggggccgcactcttacaggtaatttcaagactcgtatttccaaaagtaagcagaaattgtctcgtttgaaaagtagtactgatgctactgatgtgcagaatttcattactgagcaaactaattattttgaaatccttgcccaacaagaactttattggaagaagcggtccaaacaacactggttacatggaggggataaaaatagcaaatattttc

SEQ ID NO: 27221 - DNA, 2034 bp, Cannabis sativa
acaccactatataacttaaaatctaaaaaaaaaaaaataattataagcctcctccaatatttatctttttactttttttccctttttgtttaccttttcttttctgacattattttcatcatcgtttataattattattttttatctttttctcttaatttatcctttctcttatttttttttttacttttcctctaacatttacatattgctcttactttttactctctctgaaaaaggacaatcaatattaaaagtaatttttttttgttcctttttatattttgtaataaaaagtaataaaatcttaaatttaataaattttatctggtaacatcataacttactataaagtgttctgttattttatatttaaaagttacgatatagtatattaataacaaatttatttaataaagaaattttgatatgttaatacaaatatttataaaattaccaaataatatcttaaatataatagaattagttacactatggaagtttttatatatatattaattttaaagttgacaatcaaatatgtatgggaaaaaaattatcttgaatcaatttttttaataaaagtaactaattgatatataatttacattaaaaataacttttggttgcttttttcatatacttgcaaaaatattgaaatttttggaagcagagatttttgaattttttttcattttcgataattattttaaatttcagtatttatgttgatgtggcatatcggtattcatgcaaataattttttaaaaatatttttataaataaaattaattttaaatataatattagaaagatctctacaaaatttatactaagttttaccataatcttcctcatttatattattctgttatgtccattttatttaaagggttaacaagtcagaaagcataatattatttttttttttcttttgaataaaagtcagcaagcatatagttgaaagctgccaaaatatatttttgggaaagtgacaaaatgataaatcaaagtttgagagagcgaatgggtgaaaatcaatataactatagcatgatggacatcatcaaacaacacgagtgccattcattgctggcaaaattacatggcgatcaacaagcaagagtaagacccctacggttagactgtaccctatacatgaatactatatatatactttttaagggacaacaaaaagtgaccattttcccatcaaatatatcctcattgcatacatatatttcactaccatatatattccctacggttagactgtagcctatacatatattaacaagtaaagtaaagtttcaggtacctctttgcaactcctaagcatactgtattttttttcttctggtttgagtccagtatgacggttaggagtgtggttggtgctccagcgatgtgcgtatggaccaatgcaaaaaattctcttattactctttgacaagctattccgtgagatttttgaattgatgatgacaaccctttggtgggtgtggtatgataggaattcaatattagttggcaacaactagttaagattggatattattccaaacttagccaataaccatctggcagagtttaaggagtatgattagaaaggccttcatttgggtttgaagcttgcgaacccagttgtaaaccgagctactcgatagatgccacctcctcttaaatcctttgctctatcaacagatgtttcagtggttcagggaggggctttattggtttggggagagtgatacaaaatgtagagggtgtagtttgtttggcgtggtcatcagatgtgttaggtaatttctctactaatacgtggcggaactgcctgccattcgtttgggcttgactcttgcacatcaatttgatttcaatatctccattattaatagtgactctactgtcgcaattgactggattaataagcttttcgttaattttagtttttaatctattttattagatgttaacgcagattttcgttaaccaaatttcagcctcacgatagaaaaaataaaagctatagaa

SEQ ID NO: 27222 - DNA, 3822 bp, Cannabis sativa
  modified_base (1531)..(1539): a, c, t, g, unknown or other
  modified_base (3774)..(3774): a, c, t, g, unknown or other
agtattttcatttagtttggatgaataattaaattttattttactatacgtaaaatatatatatgtatacacaaaaattaacattaaaattctacttttttttttcttagattggatggatccaatttaatctgtacctaaaatatttgatggatctaatccgatccaaaaaataataggtctaaaatattgaataaacctaaattaaaccaataaatatttatgaaatacatagaacggatagaatcgatccaatccaacatccaatggatgttggatcgattggatgactaaaattaattagatcagatcggatggtaaaatctaacatccaatatataattggatcggatctggatagacctaaaaacattgaatgtgattcaatgaacactcctacgcgtaaccatcctcaacctcgtctcaacaccttttcaaccccataataaacaatttactcctccgagaactctccaattgattgaccctccatcttaaaaacccaatttaaggcatccatcaatttaaacactccaatttctttttaacagcagaaaatttaatttgattgaaacatgctatcgaaaaattactatgcataaacacagtataaacatgtatgtatattatttgatgtagcagtaaaaaaattaacaagggaatcaagacatattcttcaaatcccaaacaaaaaatttgttgggctcaaaattcataatattgctcaaagaacactaagaaaaaacccacatatgaaagatgtcaaaatagaaaaacgagatagcttagagtcaatgagtggacgtaggaacaatggtgttcttacttcaaagttctcgggaagaagaagaaagttacacttttattttattttttaaaattcaggttgattagttaattaagcaaaatgaaacaatttccacaacttttagattttagcattttcattttttttaaaaaaaaataaaacaataaatctgaaaatagtaattttattttaatgttctacaccccacaaaaatactgtgtatcctaacacttcgacaaattacactgcaatattaagtggtcacaccagtatatcctctttaggggtgtgtactctagaagtgtccaaaagtttatttgatatagataaacttcgtatttctcattttaattggtctgttaacttattccaaattatcacgtgtcgaattattattagttcaaataataattttaattaaataaaataaaaaattatttttcttttttctttgtttttcttcatcttcttcatccaacttaatccttactcctacgatcccaatccacctcaacttgattaaaattatgatttggatcaattatttatcaacacatgacattttaaattagtaaacactttcgttagataaaggaattaacagaattataaatatggtgaccttagggactattatcgccaatttttaaaattgaggacttatctgcatcaaattaatgtttttggagacttatgtcgcaatttttatatatatatatatannnnnnnnnatatataaatgagagatatgaggttataacatgacactctaaactctttttaatcagtattatttgttctcttcttaattctcttattttttaattttttatccgtttcataaatattaattatataaaatatatatttttatttatttttcctttaattctctcattcttttaatttatatttttaaaaaataataactccaaatctattttttattttttttaatttattaattatacgtgttgtacatcatttttttaaagtttgtttttaaataaattcaaatatcacataatttaaaaagaaaaataatctctaaaatcatttttcttaaaaaaaaaaaaaaacttttttttttgttttcaaatatgataattcacacattattcttttactttattctttaaacccaaatatcatctctaaaatcacttattttcttaaaatcacacgattcttttttattagtagctattttttcaaatatcacataattttaaaaatcgtaactcacatttttttcaatcacttactaatattcctaatattcaattattaatttttattatattaaataaatttattcaattatttatctatataatattccaacatctttttattatttttataatattattggatgcttattatgtggtatcaatgatattgaaattgttagaagtggttataaaaaaagaaacatcaaaattataacaaattagaaagtattgtaaatttttttatgcatcttattttatttattattaagttctattaatttttatatatagttcggccacttttcatcattcctctctagcactactacaaaaatgagtattttcgtcagttttaaagtgacatatgaagattttacgttagtctacaaaattgacgtataagtcatagttgcaaatagttttttatttttgtcgtttctaatatgacacaaaaaataatttttatcattttgaaaccaacgcaaaatatacaatgttctttatgattttctctgtctgtttggaagtgacgcaaaaaggtttgtgccatttcaaaactgacacaaaaactagacataagtccttaactaaaataataacaaactttgctcaaataataataataataataataacaaacttaagtttagttttaaactccccctaccaaacaccccatagtctaatttacctatacttatatacttattaagagcacattaacgagaataaagtaagggtgacaatttaggccatgacacataagttagacacaaatacaactcaaaattttacgggtttcacatgacataaaaattttgtgggtcgtgttcatgttctatcaatttttcgtgtcacgagccgtgttcgtgtcaactatctaaaataaatttaagaacttaatacgatacgatgacactaaactcaacaatttagcttacgaccctccaacacgatacaaaatttattcgagtcgcgttcatattcgtatcttataaattttttgtgtcacgcttcattcatgtcagcatttttttagtaaattaaagacatcaacataacaagaacacaacatgccaacacaaattcccaccaaaagagatacataccgaaatctttatgtatgaaacaataaataagttataaataattctaaactatctatctagcaaaaccaaaatctttaaaaatttagaaacatatttgtatactaataataaaaaaattactataataacatttcatcttattaaatctaaaaaaaaaaaaatcatcttatctttgactacaatttcatattattaaaataattaagaaaaaagctaattagaattttttgtcctccaaactttgacatataccaaatcgtactctcaaacttttcaagttgttaaaagttttccgcgaactattgaaattgttagattcaagaactttcgtctcattttactaacaatagcctgatatggatgaaagttcaagaaatacgatttaatacacgttaaagtttttggggcaaaatttggtacatatcaaaatttaaaggacacgatttagtacatggacagttgtcacgttagtaaaattgaacagagttaaaaaaaagtcattgaatccaacaatctcaagagttcaagacaacttttaatgacttgaaagtttggaggcatgatttagtacatgtcaaagttcggatgacaaaaaaatattattttattaaggctaattagnatttttgccccctgaactttgacgtgtactaaatcatgccccctgaac

SEQ ID NO: 27223 - DNA, 1596 bp, Cannabis sativa
atgatactaaatatatttccaaaatatgcatttcataaatattaattaaatctcatgcataaaccctaattatttaataatccataacattaatcttaagcggtctttacattcctcttctgatcatgttttatgcaatgtctgggttcgaaataataacattattatttcttggatactaaactctgtatctaaaaaaatctcttttagtattctaaatgatgaatctgctgcagctatatagactgatctaaaaatgtaatttcaccaaagaaatggcctcacatcttcaatctaaggaaataactcatgaataattgaaaaaagacaatcaaataatgagtatgtacttcactaaacttaaaactatttaggaacaactttcaaactataggcctacttcaacctgtaatggatgcacttgtggaggagtcaagaaactctaagaacattatcatatgtaatatataatgtcttttttcatgggattgtctgatttttattcacaagttagagcagtatcttgatcatggatcctcttttagaagtcaacagagtttttcatcttgttatccaagaagaaactcaaagaggaaacctaaacactactgttgaccccaatccaaatttggcctttgctttctagaaagaaaatccatccaataacaggcctaatttccaagcttcaaaattacatccacctaaaaggggcaaacctttttgcacacattgtaacattcatagtcacaccatttaaaagtgttacaagatacatagatatcctccacgatataacaagactaggaagacaaaggatgttgtagcaaatcaagtggaaaccagcaatgaaggctgcaatcacattgtcgataacaacaccctttttccccaactgacaacaacacaatatcaacaatcgctcaatcttcacaacatgctggtatgcccacctctgatccaaatacatcaggaggtaacactagtgtggtattataatgcaactctatattgccaaaatctaatgcttggattatagattttggtgctgcaaaatatatgtgttctaacataaatatgtttcagtctgttggtcctatcatttctactaaattgattctgccaaacaatgataatttaatggtcaaatatagtgagacaatgtctatctctgatcagctcattctcacatatgtactttatgtgccctcattcaaatatgacataatctcagtgagttgtttaactaaaaataaggatctttctgttctttttcataacaatattttttccatacagagtacaaccagcaagaggatgattggcagaggtgaatccacaaatagcctttacattttggatcctacaccaacatcttcttaatgcttttattgtctcagctaaaatttggcattcaaaacttgatcatttgtctcataaatgtttagatttacttagtgattcattgcaatgtaacagtaaaaccatcaataaaaaagaactttactatgtttgtcctatggcaaaataaaagaaaattaccatttttcaatcatcaaacttttgctgaaaatatttttgatcttattcactgtgaca

SEQ ID NO: 27224 - DNA, 2731 bp, Cannabis sativa
  modified_base (389)..(398): a, c, t, g, unknown or other
ttttttttttttaattttgaaaagaatacttttagatttagtagtcaaaaccatgaatttgcgatttcgtctcatttaaacccaaaatatgtgtgtgttttgaaccgaaggtgattgatgtgtagtaggggaccttgcttcttacttattgatggcccattgtgaacatggcctatgggcctttgatttccaataaaaaagaggtttttacaaaaatactaaattttaggcaaaaatttacaattttactatcacacaattttttacaaaaaatactatcttttgataaaataattgtaaaataacaaaacaaaaaaaataaaacaacagtaaaacagctaaaaaataaccgtagaacaaccgtgaaaacttaacacagtacacagtannnnnnnnnnacagtatttttgaaaaaaaattctacctcacaataaaaaaaataaaaaagttaaaaattttaatatgtggtgtaaaaactccaataaaaaacttcacctcgtttagcgtgtgatgatgtaaaatttcatgcctaatattactttatgaagatctaataaaatgaacatgcatttagagaaagaaagtagaaactagagtgaggctctaagagctctctcatcagctttttagttttgtttttcaaaatatattattaaattttactttgatttaccctaaacttttactccatacattaatttttttaaaatatgttatcaaaattctacttttatcaaattttaatatattttgttaatatataatactaatatttacacatatccccgtataaaaaataaaactaaattcctcaacaagtaatataatatgtttagagcaatcaatattattctataaatgcagaacaagaataatgaattttaaagaagctttaaaaagaaaaaaaaaagtttagagaatagggccgactctgaggtgagacgaaggaggcggccgccttaggcccccctaccgctcagggccccatttcgaaaaaaattaaaatatagttagtaataaaataaataataatactttcaattctaaatatgtgttgtaacctagttgtaatttgattagtttaacaactaaggggtttagagttcaaatcccaaaaacttcacttttttattgggccccaatttgtatttttgcctaaggcccaaattaacatagggtcggccctgctcccacccagcatctgcctcaaattcatccacccaaataatacccaattattgtaaaaatcaaacaaaagtgacgtcctttttcttctttatttcctttactttatcttcttcaatcacctctctaaacccaaaaccatgtcctcatttttacaagtgcgacaatagagatggtttaaagacataacaaacttctcaaccgaccatcaaaaactacttatataaatagcatttttatatattttaattactgtagttattgatttcaaaaataaaaaaaaattatcgtaattatttacaaaataaaaaagaaaaattaaaacaaaggagctttgacaactgtacaacaaaaaacattagcctcttcctagagtctgtttctaatataatttttgtaaactcaatattattaaaataaaatattaatataatagtgtgcggataccttaaatttcttgggagcgtaaaagatgaacaagccaatgaagatggtctcgatgacacaaccaaaagagttaatagtaatgagcagcagaacacctttatgaagtaatgcatagtatatccacaacattgagcttagcagttctatcagatatggtagcgactgaaacccttatgctgatttacttttgtaaatcttgtgaaatgttggtctgcaacaaatataatccaaatttaaatatattaatactaataataatctcgtgaattgataaaataataaatatagttaagagatcttcttacattggagcaaggaacaccatgaaagacacgatgttacctatgacaccgaagacaatgatgagggtagccatatccagatgggttcgtttagttaccgagagagagggcgggacagaaataaatggggttgggtgaggacggttatagagaataaaaattcaaagagagcttagtttggctaccgagagagagggctggacagaaatgaatggggttgggtaaggacagtgatagagaatgaaaatccagagagagcttgtttggttgccgagagagagggtgggacagaaatgaatggggttgggtgaggacagtgagagaatgaaaatcccaaaaacctcacttttttattgggccccaattttatttttttcctaaggcccaaattaacatagggccggccctgctcccaccgcgcatctgcctcaaattcatccacccaaataatacccaattgcaaaaatcaaacaaaagtgttgacctttttcttctttgtttcctttatcttcttcaaccacctctctaaacccaaaaccatgtcctcaattttacaagtgcgacaacgaagatggtttcaagacacagtaagcttctcaatctaccataaaaaaactacttataaaatagcatttttctatattttaattactgtaattattgatttcaaaaaaaaaaaaaaatgactgcaattatttacaaaataaaaaagaaaaattaaaacaaaggagctttggcacgtgtacaacaaaaattattagcctcttcctagtgtctgtttctaatataatttttgt

SEQ ID NO: 27225 - DNA, 1878 bp, Cannabis sativa
ccttaccccttatctttttctattggtttctgaaggcctctttgctgatatccgtgctaaagtgtctgccaatcattttaagagctcttccatttgcagagctgccccttctattactcacttgctcattatagatgctagtttgttgttcactactgttactcctggtacttgtatagctattaaggacatcttagaactctataataatgacattgttcagtctataaactttgacaaatcctccattattttctcccctaacactagctctttacacaaggatgcttgttttatagtactttaagtctgtctaataaagggttcatcagtaagaacttaggtgttgcacaatgtgttggtaggcttaagagttcttcttttctctatctcctacaaagtgtcaattccaagattaatagctagaatggtaagtttttttccaaggctagaaaagagaccctcataatagttgttgtctaagctatttcatcttatgttatgtcatgtttttgccttcccatgtctatttgtaagaatttggagagccttattgctaaattctagtggggttctagtgctaataagaacaaaattcattggaaaaattacctctcactctgtgtttctaaatttttggtggattagattttagatctatcgtccacctaatcatcctatgttagcaaagcatgcttggaggatttttattaaccctttgtcttctttgtccagatttctcaaggctaagtatttcaagaacaatgacttcctccataagaaaatgctttgttctagactctcagaagtgttgccggttctggttcatagtaattaaggagcctttgtgaaaaatagacttctagctcacaatgttcttattttgcaagatcttttataaggttataaaaggaagaacatcacagctagatgtatcatgaagattgacttaagcaaagcttatgatactgttgattggaactttttggagaatttgcttaaacaactctgtttcccttcaaggttcattcaatgggtgatggtttgtttgaatggtactaagtacaatctcttgatgaatggtagaatccaaggctctttcaaggggaaaaagggtcttcgccaaggagatcctatatcccctttgttatttgttttgatcatggattatctaaccaggcttttggctcagaattcttattgcaagggttttgggttccaccctctttgtaagcagttgagacttattaatttttgctttgttgatgatctcttgatatcttgcaacggcaacttgaattcggttaagggagttcaggaggctttcaacaagttctgtgactcctctggcctttccattaacaacaccaaatctcatatatattttggaggagtgaaggaagagtcaaagcatcaaattctcaggttagtccaggttagtccaaatgaaggagggttctttccctttaaaatatcttgtggtccaacttatacttactagatggaaagcatctgattgtggggttattttggataatcttaataggaaactgaatttttgggctagtagaaatttttcttttgcagggagatctcaactgattcattcagtccttagcataaaaaacttttggatgagcttattcatgttgccaaagaaatcactacggctattgataaatattttcgtgatttcctttggggtgttaaaggtaataagagtaagctacatcttccctcttgggaaaagacttgtctccctaagaaatttgggggtattggcttctatgaaggtaagaagtggaacttggctatgatggccaaatttatttgggtcgtttctagcaaaaaagctgccttcgggttagatgggtaccc

SEQ ID NO: 27226 - DNA, 1614 bp, Cannabis sativa
tgagcttgagctgggatgaggttgtacatctcatggcagcgcgacctagagtgttcgatctcgggacatctgggttattattttgtagttgttgtgcgccctggttatctattttgtgtattttgtataaatgtttagaaacgggatctcggaacttgtaaatgattgtgtaaaattttaaagtttaatatttattataaaagcttgaatttgacacgattttcaagaaagttctttgattatcaaagaaagcactgtaattgaaaaatcactaaagcgtgccttagcgttaggacgttccacagagaacccgacctggtatgttgacctggtaggatgcacctccataatccttgcagcagagacctcactgcccacagcagagacctcattccctacggttgagaccttattcctagcctcgagaaatttatcaacatcaacgataagctggttcgaggatttcctcatgtaggctttagtcttggtccttaggccaccatttaaaaagaacgatgcttaccttcagaagtctcttgtaagaatcgcctataatgattggtagtttcttcttagtttggtttaatcagacgatcttcagtcctggaataattcatttctaatttggactaaggtttgaaatttttcagtgcatatggggaggatagatttttggtatatttcggtgctacaaattttggaggataaatttctaaaccaggatgggacatctccacaggagaatgacaatcccaatttctagatgaaatttaccaaagcaggggtctatgggatatggctaacatagactatcattttatactttgagcccagtaatggtaaggccaaaagacggaagatctaacagctagaagtggaaagggcgggtcattaatgctaataatgacactcgaaactatgaagtttccaaaatcaaaggcatgcaaagtataaattgacagagtatatttataactcgctgactgaaaggtcttatgcaagatatagatacaccaactgttgcctcgtacattaacgagaaaccatatggcttcagagtaaaaggcgaggcatcaaccttgatatgcattagtagacgagacatggaggatggtaagacacttagtgtataatacaccttatacagtctaagtataacagtcaagcaactaatagcgaggcacctatctcaccataggaagcgcgctcatggtatcttcattaatcagctcccaacacctttcaatagggttcacagcttcgtcgagtgagctctctcagatagaagttgacatataaatgatgttgactgctgaggtccactttgtcaccaagaattgcaattttcagatggagtattatgtcttcgagcgcaaggacgacgagacttacatcatcaacctctgagaaacatgggaaaagctccagctcgctaccaaggttattgatgtcgtgttcccatcgatacattcccgtatgttatgatttacaatgtgtttaatacacaattaccttgacctggtaaaagcgcacccatcacacctgtgtgattttcaaatattaaccacatttattttacgtggtatgtaatcaaaccccacgatttcaggggat

SEQ ID NO: 27227 - DNA, 3348 bp, Cannabis sativa
acgatttttaaccgtcgcctattttgcttgttttacgacggtcgtataggcgacagttatagaaactgacaggaatactttaaacgaatgtttaaaaacgtcagaaaaaaatatttttgtagtagtgccaattaggtccttgaggtaatttggtagctgaggagctctttatgccttagtagctgatggagcagtgagcttagtacgcgcaatgtgctcctctggtaggaggtcgtgcaatttgctccttcggttggaggtgcaatgtgctccactggtaggaggtggtgcaatgtgcttattcggttggaagtgcaatgtactcctttggcaggaggtgcaatgtgctccattagtaggaaatggggcaatgtgctccttcgacttgaggtgaaatgtgggcgcaatgtgctcccttgatagcacttttatatctagaaaaaaaattcatgtacaattatattggattttttttagggataataaatatataatatttttttatatataaaatcaattaattaattttatacaaaatattctaagaaattgttcaattgtaacaacattattttaatatcattattaatttataattacatggaaataactaaaatatgaatgtcacaggtatttcaaaatcatcaacaaacaatgaagatttaattaccatttaaaattcatatatgctaacgattaatcttgatctttctttcaacatataaaatgatgaaaatgttataatatatattggcatatgatcaagtagtagctagctaagctagcgatgagtagtgatttgatacaatgaattagactagtcaattacatatatctccttaaatggataaatccgtcgtcgtttcagggtgcactctctttcttccacttaataaagaaaccccaaaaagcttaactccactactcccatttttctcctcatgagtagttaatgccccacagcttttaccaaaatccatgctaccactacacttgcctttaccatcaaaaccatgattatttattcgaacaggagaaagagacgaagaacccagctccataatcttcagaatacctgaaccagaagtacccactgcattgggcacaactggttccacatggttttggatgaagtagataatgtcattgtaaagggtcttcatgtgagtgagctcagacaagagcatgaagttttttctccgaagcctttggttatcttgggttagaaccgttagaatattatgatcatcaacgtaaggttttggattattattatgatgatcagattctagtaacggtgaagggatttctgaaaatttattagtagtagtaatagtagtaggactaatattgctccaaccaaaagtggtgtcgtgataatcaggttgttggaatgttaagtggggaaaatgggtacgctgttgttgttgttgttgatcgccaagatgaagatggtgattattgatggtttggtaatattgttgttgttgttgttgggaagcttttcttctatggatttctgataataagtgttttgctccttttttaaagtactcgtttgcaaactcccatctatctgctacaatcttcttaaatccctgcattgtgtaaattaatgttatcattaaattgattgaaggaacaatgaatttttgttaaaataatttgtatggatagaaatagggcttaaaaaaaagaaatatatatgtctatatatggtatcaataattattaattaattatattttttaatgatttaatatattcattaaaattattaagattccaacttattgggttttggacctcctcacttatctatgttaaataaatatatgtttaatagagaaaaaagttctaactttaataatagtaaatgccaatcatgatggttttagggtttatgcaaagaaatgatttgaaagaggagaaaatgaaaaaagaaagcaccatgaattgttgcaggggaactttactttttgggttacacttttatgatcaagctaatggaccccaaaattaatctcaataatgctaacttctagtgaaagacaaatgaaaaggtccatgttcatataataaatatatatttatatagtatatatatctgtacaaattcttgtacatattgtcatgaatgagactgattattaatgaaaaatctccaaataaagaaatgtgagcgaggatggagatataatgatatatatataactcttttttttttgttaaaaaaataatgatcaccatggattctattctttagtggggaagaaattaaaacacaaatatgtaatgtgtagaaggagttgatctcgtatgactatacaatgaattaaaatagtcatgaaattgccgttaaacagcataaagacaaaacttataaatgagatctagaatcttgcgtgaagatcgaaaagttaatattattcgactctgttcattaaataatgattatcattatttcaggcgtaccattataactccatgaacgaaaacaattgcaaatattcacatttttaaatttccttttttaaaaaaatgaaaaagaaatttatgttgcgtacctaattattacatgatacacaataatatgcatattcctttatatactttattttgaatttataattaatagtacttcgagttactgatcgatctactttcagcaataaacaaccattaattaactaaaggaaaaagaagtgtatagaaagtgaaatatttcatcctcttcaagatttgttgtaaaacagaaatgaaaatccagttcttaaaagattgttattaggagtcaatagtaagtaatagaagtcaacttatttagtcaacactaatcaaagttaactgaagaaaaaatatctcggaaagtaataagaataataaagctttattaactagctagaaagatgtatatacttatgttttagtgtaataatgtaagtaatgaataataagttataagagtattcttacataggtattgagctgtctgacaaagcttgaaaaattgttgtgcttgaagtagttaggaagaaggtctctagcaaactcaggtggcctccaaacgacaaaagtggtttgatcatcaccccaagacacaatgtcgtctgtgacaggatcatcaacaagttggtatgtcttcgtcaggaatggagctggtacagccttctgcgactccactgtaaataccatgttctcttcactacatctcataatgttattactctcaactgcgaaagccatggatcatatataataagaaacccaacaaacttggattatatatgttttaatttctttccttctactaataatactagctaaacacccaaaatgaacatctct

SEQ ID NO: 27228 - DNA, 2415 bp, Cannabis sativa
tgacatgtcaccttaaatatatagatttataattatttttcgtgtagtttttaattggctttttaaaattattttttaattaattaattagtcaatatttataagtttttaataaaaaatttgaaaaatgagaaaatcaaggagtaaacaaataataatgattagagagatcttgccatgttacgtatctctcttttatatagatatataaatagattagtaaatgatgtggaaaaattagaataggtggtaaccatttattggagggacaggaatggcagaataaatttgggacagctgattttttttctcatattatatattaaataaaaaaaattggggtccatatagtaattataaaaattgatgagtccagcatttcataatatataatattgatctcgccatctcaagataataataataataatatattgataccaccattgtaatacgcgaccgaactaatatgaaaaatattacatttcaagaaaaagagattaaaaagatcatcacaatcttctgagagcttttcacataaagccattattacaacagaacgagctgagagaaaaaaaaagaattcaattgaaaaaactacgtagatggctccttcacgaactgaaaaaacgttaatggcgaaggaccaagtcgacagtaataagcttcacatagccatgttcccatggctggccttcggtcacatacttccctacctagagcttgccaagctatttgcgcaaaagggtcaccaaatctctttcatatcaaccccaagaaacatccaacgacttccaaagctccctccagatctatcaccattcataaacttgatcaatcttccattaccatcatcatcagtgttgaatctcccaaacgacgccgaagcaacctcagatatgtccagagaacaaatcccaatcctaaaaagagcctacgacagtctccaagcttcgctttccgaccttctgcagtcttcaaaaccagattggctcctttttgatttcgcagcttattgggtaccagatatggccagggaaatcaacctacgaagcgcccactttagtataataaacgctgctgctctagcatatgtcggcgtagagatccctgatagtcgcaccgagcctgagcatttcatggtcccgccaaagtgggtcccctttccctcaaaaattgcgcttcggaggtttgaggtatccaaaatcttcaacgacttgagtggcggcgacggagacgtttcggtcgtctaccgcattgctaaatcgctcagaggttgcgacgtggtggccgtgagaagttgtagggaattggagtcagagtggttaaacctcatggcacatattctgggaaaaccagttctccccatcggtcaacttccaccgacaccatacgccggagaagtcaacgacagctggagcacagcaaaggagtggcttgatctccaaccgaaacgctctgttgtatacgtagcgtttgggagtgaggttgtactgagccaagatgaactcaatgagatggctctggggttagagctttctggttttccatttttctgggtgctaagggggcattcagtggagcttccaacggggttcgaggatcgaacaagaggacgtggaatagtgtggaggagttgggctcctcagctgaagattttgggtcatgaatcgatcgggggattcttgactcactccgggtggagttcggtggtggaagctcttaagtttgggataccccttttgctattgaccttcacaaacgaccaaggtttgaatgccaggcttttggaggacaaaatgattggatattccgttccaagagatgaaatcgacgggtcctttaccagagaatcaatggccaaatcgttgaaggtagtgatggttgaagaagaaggggaggtttatagagagaaggcaaaggaagtgagtcccatatttggagacatgggagtgcagaacaagtatgttgatgagtttcttgcatatcttaagtctcattcaatttgacaagttatgttttattttatgtaatattttgaacacattattatatctatacatatatgtatgtgtgttcattaaaattattattattacgtaccacttgtgtaaatgaattacatttgtatgactatgttatttaaatccattcaactttttattaattccgaacacttaaataactaataatgatgaactcatctttttttgaacaaaatgatgaaactcatcttatatatactgaatgtttttgttctttaatataattattctcttcaccttcctcgtgaagaagcatatattgaaaaaaaaaaaaaaaaaatagttttgtcaagatcgacaagcctgtttgatttgtaaagtagtcggaatagaatcaaatattttaatcattaattctatagagaatata

SEQ ID NO: 27229 - DNA, 1845 bp, Cannabis sativa
ttaattttttagcgacgatccccgaaaatttttttttttaggaccgtcgcaaattctgatatttgtagtagtgaaaaataggatttactgcatgtgttaagtcgatttgttgccacaatgtaatatagtaggtcaaacatgttcaacttttaattcattcaatatggacaaaagtcaaacaatcttctcacatgttgtattagccattgccctatatgttgactaagaattttgtcaactaactgcaaagccttattcattattgattatcaccacgtgtaaataaggataataagtaataaagttgacaaagagatttataaaggttcgatgcccttgattagcaggtaatgacgtactccccttttagctgtattcactcttcagataataccaatgcatatgacatgttaaaacctttcaatttcttgctatggctatcttcaagtattacaattgttgaaacaacgtgtttcagatgaagaactgataagtttttatgaagaacttatgaagaaaatagaggtttagaatccaagaagtcttggtggcatatgagacttaaatgaaaagagataatgcattaaacttaggaagatatggttctccacgtgtagcttaggcttaatggagcccttctatgcatatggagtgacttggccctttagagaatgatctaatgccctttatatagtttagggcttacaaaagatcctaattcaaataggtagaaatatccttttaaaataggaatattaacatctttttatctattatttaaattacacaaaaggataactaaattcctaaaatatatgactaatatcttgagagaatatccctatttttgtgggttgtttgacctatctcgcaattcgatagtctgttcggagttgtttgcacaagtttctcggccaaccctatttttagggcatggccggccgatgaccttccatgggccggctaggtgtggtctggccagccttttccttatttttttaacttctttgtacaactttctttgaaaaggtcagaccttcttagttgaacagccactcttggctagctagcttattctcaacgcctggccagcctacaaacttaccttggccgaccaacaagctttccttggctggcaggatatggtcagcaaaggtcttaatggccaacttaactccttttacttattcttgcttaacagttttgcttgattactttagactccttgacaattgacatgctgcattagatgacttcgccctgttattgacaagctgtattccacgtgtccacaattttgactatgtggacatgccacgtcaggtagaaaaaatttgagataacatttgcctcctgagtccctgttcgtatattatacgaatatggacttttcagcacttgtcttgactgtaggagccttatctggccaagtatcaaactgatgcactctttaaacctttgatcttttctctcccatgcatgcctcatcttcttttcttcgacagtccttttatttctttgaatctgctattgatgagtttcaagatttttaaagctttgagaaactgttttaattctcacattttagagtactcttttcacattataatttgctcgatagctttaggatgtataatgtatgacttttgatgaacaagatcgactcttggactagtatcttgtttagagaccatgtccaactcttagatcttgtttaggaactctgtttaatacttagatcctgtatggggaactctcttctatgacttagatattgcataggaactctgtccatgaattagatcctatatgggaactctgtctatgacttagatattgcatagg

SEQ ID NO: 27230 - DNA, 2871 bp, Cannabis sativa
aaaataatttccaacagtatcatggccatagttctcatgaaagcgataatacttagtggtatctctcttgttcatgtacttcgtcattggtgggggtctcttgtacggtaccacaaactgagttgtcgtgaaaatagtttctatttctttagtaaggatagtgaaggcaataaactttgaagctttctctcgaggacgttgttgatcataattattattgaatttctccttcttcccattaccttgataattgtcattgttcgaccttttaacactttgacatgtactactactattttgaggttgagggttttggttatgctagatggatgtattggaagtagtggtgtaactttggttggtcttttttttgaccaactgtgtctactcgccgtactgcttattcaagctttataaatccatctgcatggtccaagaactcacccattgaccccacagtaaaccttttgatatctttccataattctcccagagattctatttctcctaggatagtagccagttttccttcctcggttagtcccttcactttcgtagcctcagtcataaacatactaatgtagtcttgtaaaagcttccctggtatttgttttattttgactaagttttctaaatgagtttggagtttcctagaaaatgagaactataagaactgtgtgtgaaactctgccatgaagaagttccatgaactaaattttcttggggctaacttgaagtacaactattggacggccttcgccaaggtagctagaaaaattctacactatacatcaccctttacagcctgtaaatctattttcatctgaaagtacttgatgtgagagagaggatcttctttgcccgtatacatcttccatgtgggcatcttgaacttgtgcgaaagttcaagggcattaatttgtggtgaaaatagtgaacctcgtatccgatcaagctctaggtcggtgagttttgggtcgtttaggctttgtacaaggctcttaagttgatctatttgggcttgcaccactggatcaacttcacctgcttgttaaccgccttgtgttacctgtagaacctttaaaactttacttggcacgtaattgtctaccttaattggttgaacattagtaggaatgaaatgtcaatcatgacctcctcttctacgattcagatcgtctcttaaatcatgtacgggtctaaacctattaaagactgactcacccggaggccttcttgtatggacattattagcagttgattggttcagtatatccgtctgaggacaaaattgtattgaccatttccccaaggtaatgggttggaaaaacttgctcgtttaccgtgtggcccacagcttgatcctgtggtctcagattggacggtccattaccgtgggtctattgagtgtagttggatggacattaccctggcccatgctatggtccgtttgggatataggctttttttttcctctattcgcatcctatatgagtggagtattctccattgattgttatctagttaattggtaggaccgttgaattagcacgattgtctactccttatggtaatagcctactcctttttttacttatattacttatgagaaaagaagcaagtgagatctagatctctctcaaaagcatacaaataatttgacagcataagatctctcttagaatttgaattctgatccctgaatagtgagatggtttcactctatatagggaaacattagattaatttagttccccaaaataattatgaaataaaagaggaaacttgattactttcctattttacaacaacaacgtgtggaaatcccactaaaatagagatttaatttataaatgaaaaagaaaagtatctccaaagttttgcttcaggtgcatttacgtggtcaatgcatgtaggctcgatgtaagatcgaagctagtcggacagttgtattcaccttgttcagatgtttcattttagtcttaaatggattgtttctggataataagccactcttgatggcatgctgaggaccgtactacccatccaggtcttagaatgttcttcacgtgtcactcagaagaatgtcgtgttactttgtgtggaaattaggataacaggtccaatctagtcaaataaatactagatttaaaacattggatggatatgatccgatccaatctaagaaaactaggtctaaaatattgtataaatttgaaccaattgaatagatatatatgaaatacatccaatggatgttagatcaatcggatgactgaaattaattggattggatcaaatctaaaatctaatatataattagatcagatctggataggtctaaaaatattggatgtggctaatgaacacctccagactaaatcctatgactagattgagtgaaatgttttaagagtttctttggcaaagatgagatttgataggaggttggttcaattgattttgatttgtgtttcttctatcagttataaagtggtcagtggaatctattgttccttctcgaggcttatgatacggggaccctttatctccttatttgttgattttgtgtgttgatggtttttttctcttatgaagaactttaaagcaaaatgtttgctccataggtgtgcggtagcttgtagtgctcttgttgtgtcttacatgctatttgctgatgacaactacttatattttcgagttatagaagatgaagattaaaatgttttagaattgctcaatgtgctcaaacatgcctctaatcagaaaattattcttcaaaagtctttcattttctttagtagtaactcgaagctaagggttaggtatcatgtttgtaaagtcttaggattgatgcctgtcgcaaatgct

SEQ ID NO: 27231 - DNA, 5762 bp, Cannabis sativa
aattgataatttttgtaaaacagaaagtccaaaataatatttacatgaccaaaaaaaaggttgatgaaacagaataacttttacttgatgagaactaagaatgacaaaacttgtacttgtaatatatatttattacataagccttggttgggttgccactttgatggataagtactaaagaatgaagcttgaaactgaagccagtgacgtgcttctgattttgttcttcttatttttcaacaacacacaatgtacttaaaaaacaagaaaaaaacaacagacaatgtgtggagaggaaggtccgaaatcgtttcccttctcttgcggcttttatttattttattttaagaaaaaaccgtttataaataaaataaatcagatctcacgatcattaatacaaataatatttgacgggatgattgatagattaactatgtcaataatattgttagtgaaagcccacttaaccatcttatattctctaaagttacaaagtctgaaaataaaagaaaaattacaacacaaaaataaattagagagcatattacattggtgaatatagttaccaatactccaattagaactggttccattcaacgccttgataactatctccgagtcagtctcaattaacacaaaatggtgtttcaaaagcacggctttctccatgtgaattgacaagttgcagcttctccaatcaggggatcaactaagttaagcttgttagtagtcacccacaaaatagaacccgtgtgatccctagccaaagccactccacacatggaaccacaaccaactttcacatcacaattgattttgacccgaggagtccacttatgagaaacagcatcttccgatcgacaaggaaaataaaccagactcataatttgcgtaacagaaagtaatagagtctgtacactgttcaatagaactttattccatctaaaaggaggactccactagctcattttacaagttctataaaagtacccataaggtcacagaatctctctaaaaattagagtgcccaaatttagctatttttttgtaattcatcttgtgagaaataaaactttaagtaatcgtagttttattactgtcgtgatacagggagtgaactacaataaaataaactgttgagtctctcttatttatacttaactcataatacaatcacgccaatctagagagcgtatatagctagatatcggtgtcaaagatttttgcatcaacacacaaatatatataatatttaacaaaatatatatactaaaaaaaaattactacagagcacatatttttacacctatcatattgtataagatttatatttaaaaaattatataaatttgatatacatactgcaatggttcattttgtaattagtttttgttaaattatcgttttacccttttaattattttttttatccttttgtaacattaatttactagtgaaagtataatttagatccaatctaaatttgggcacaacttttcagctctagaattaacacttaaagggaaccaacatttgatccattaggaaagtcaggattctataattgtagatcatattcctagccatctatattattagattctcaaaacagaagttgtaagaattatcttctttgagaaattttaactaatgaatcaaagaaattaataacatgaacagaagttcatgattactcaaaatttaggtcgatctattattgatcatccttatgatatgaattagatttttataataaatgacatgtttgataaagatagcttaattatatatcggtcattgtcatatataactctattatatatctctattatgtataacacattcacttagatgtcgtactacatcaacaattcgaatcgagatttcttgcactaaataacgggcattagtgaaccatactgccaactgttgattaaagattctataactttaatatattgttgatattgttttattcatgaatatataagtgattttaactctccatacaatacaaattacaacctcatgtatgaataatgattttttttttatatttatatatgaattatttaatattaattattaataatttaatattcaagcatatataaaaatgtccaatttatatttataagcaaaaatgtctttataaattttttagcgtataaaccctaacaaaaatgtaccatatcatattcttttttgttatttttttttctcgtgttctggactcttcttcactatacaatgattataaccatctacaaatcgagttttttctaacactcccagaaaaagcccaggcaaagatcattgctactattttcatcatgaaagtctcactttaaatagagtcagatactatatacatgttgagtattatgccctaaataaaacttgaatttaatttaatattattttaaatcaataaagttcagacatcatattttgactttatcaattgcttggttcgcatgtttatttacgtgattatatatttactatataaattctattaaatcaagatcatagaattattcataattatagtggtgccatcaaagtgaaaaataattatgattatatgattcaaatatttaaaagtcttgagatttattagtgcactaaatttatactgaggtgataatcgacgatatggtctacttacactatggcaagtggtatgtcttttctaggacattagtaaagtatacttgtatcgaatctatatgtttacattggactgggctgatattaaagatagaacatatattataatcttatcgttatatctattcttagtcaatatcacttagttgatctagattaatttgatatgaattgtgacatggttaagctttaagctaattgtgctattcaagctctttgacttgttcgttatggccagcttaccctaaggtgtatcccatttttacatcttgtgaactcggttgtatgattgagtgggagtgttaatcatggatatgtacatcaatagcttctatgttagaagtgaaatgatagttttctttgagcttggttaaagacgttaaatgaagagatcttattttagaaattatattagcttattaaaatccatttaatcttattaaccatcattgcttcggtggtttataacttgtggcaggtgaggaatgaagcactatggaaccaaaaagtttggccaaataaagcgcacaatcaagaagatacaacaagatgctttgactagactaataggagcacttcctagcaaaatgtcaattggggataagacttggttgctgaaattgtaatgaattgtaattaatgtggtggacatagtatgaggactatatatgtatagaatgatacaaagtgagaaacaattggtgtttgtaaatgtttagttgagtaatacaattgatcttattcataaaaaaaaaaatccatttataagaaactaagcgttcaaggataaaatattttgagaggtaaaatggtaatttttttcctacttaatgaaaactatctataggtgatcattgattaatgtgattgaaacaatgaataatttatagtatatctatattatgtatactgagcgttctataaaattaggagtgcaattttgagtctatagtggagtataatataaattacttaccttatatgtaaatatatatatatatataaacatttgtccattttttttttttgaatccaaatagaagccgccaaaggggattccttggccgccgcttctctttctgagctccagacagattcctcctgcttaaaattcatgaactgcaaggatgaaggtgagataaccaagatacctgagtacccatctgcgaggaaaaagaagaggacgctgagaattgcattctcatcattgaagaagaagaagaatatatgatgctgagaactacgatgaccgcattgacaccgagaactacaacgaccacacatcgatgctgagaacctttaccccaacctaacatgcctccctgaactgcaactttaattcaccccatgacgcaaagaactaaacttaagatcgagaaaggaaaaaaaaaaatcgagaggcagtcgaagcctaaccacgagcctatcaaaccccaacaactttaggaatattttgggactagtttgaacaagaggaagaagaggatgagtgagggagtagctggtgcggctagggtttctgagagtggagtgcaagaacttttttgtgagggagaaacagtatcgatatgtattaattagggaagacaagtgaaaaatattgatatatttaaaaagaaagagtaggaaatattgatattaaaaggccacacgtatatatatagcaaactttgatatgtattaaaaagattgaaaaaaaaaaaaaaaacacatgatttacatattttatcatttaattatatatatataaataagggtacgtctaattatattggacatgacaaatatagatgtcatgttcagttttgttggacgtaaaaattaataacaattaatatatataaatcaatatatttaacgccaatttatgcttttattatatatgttcagcagcattggatatataattaaatttttttatgttcattaatgttggacataaaatctcattaatttttttttatgtctaacactatatttgcttgacatatagaaaagagacatggaatgaattcttttttttgtagttcactagtgaaactcaaacaccagaatatgttttattgatcttattatctacctatagatatataattcatgattgtcagtatttattttattttatgaaataccatatagattatagaaattttcattttttgtcttcatatatatatatatatatattatgattgtgttgttgagatcagtcctgggtcgttacactcaaactcaaacatataatcaataaccatgcttaatttatattgaatatctcgatctgctatggaataataacattatgtgtatatatataaatataattaatatatatatagttgcaagtaaaccatttccacaccaacacaaatcacagcacatataggtaaaagttagggtgaacttattattttcatacaatatatcaactgataattagatcgaaagacagcagtacgtatcaagttataattaattaattatataatttaagaattaggaccccaacagctgagatacatgaccgtacgaagggactcctctgcctgcttattattgttgctgcattttgatgaggcgttcttattattacgagtactctcatcaaacatttttttgcatttgaacttaccagaaaacgatgtcgttttctctttaaaagagtaagatgaagaagaggtggtgagagatgtgatattggagttgtatttgtattgagttgatgaagcttgctgctctttacttccctccatcttataatagtaataatttgctagagaaaaatttcttttgagttagatcagaagagaacggatcagatgaacttatatattattatttgaaagctatgtatgtatagttgtatgtatatatatatatgtttgtagtatagtttgttggtgccattggccattgattaattactatccatatattcgagagatcttggtatgtgtgtgtgatccacttatgagtagttagatatgccctattaataaactaaaccatataagccacttcaaaaaatcagaacctaattaaagtttcgggctagtatatataaatataaaatatttatgtggatgctt

SEQ ID NO: 27232 - DNA, 2432 bp, Cannabis sativa
aaagagtacctgaagctctccgagaaagtccgataatttatggttattgagcaaaacagtggcagtgtaccctagagagaagaaattatcaagtcgaaagataggatttttttttttgagagagtgatcaggatcacactatgacaatcgtgctggaaaactttcaatcaacaagctaattatctagccaaagatatacaaagtcagaatatgagtcactatataaacaaagtgacttatataagaccaagttatctcggaaatttagacaaaacaacttgagatcacctttaagagtcatccgatgtaagcaaccaataggaccaaaaactacctataaaacaaatagatataaaagtggattagcacactatacaatgatagtattgtaaattttaaaccaaggcctaaaacacaattattattttaacacaaacttatcttacaattcttttttcactcggtatgtcactattgtattaaaactaatttggtatgtccaattattagagctaagtcttccaaagcagaaatataataaccaatataacctgcaccatacatatgaaagattaatcaaactcaataaatcaaattctaattgaaattacctagttttttttttttttataaaaaaaatgacaacaaccaattagttaacaaaaaattataagaaaactattaaaatagaaagaaaattccttcaaaattattaaaaaatatttgaaaagtaagatttaaaatttatctgtgaaaatcttcaataacactctttgaggttgtatccatgcccaaaagaaactacaacatactgcaacatatccaaataatatggaacaaaatagccaaaaataaaatagcactaactaacaaccaacaaatggcacaaactaaccaaaattatataagaaaatattccaattaacactcttaaaaactaaaaaaagaaaactaaacaaactaaaaaaaccacaggttaaatcaaattaaatacaaataaattagtaaaaaattataacctacaaaaggaattgagaaagaaaataataaaaccaccaaaataataagagaataaaattacataacataccaaaaatatgaatataaacaaatttaatatacccagtaataaaacaagaatggatttaaaagtaacatttgactatgtgaaactgtaataaattaaaattaattagagagtagagttttttcaaaaagaaagaaaaataatatacaaattaattattttttccttatataatcataaaacaatctttcaaaatacgataataaatactaattaaataaattaagttttgaaataaataagaaaagtaataaatattaataaattaaattaaatataaaactaatacaattattccaataaacttacaaaaacgtatctaacgcaaatgccataacgaaacggagacaccgcccgctcacttggcaatctcaaaaatttctaaacatttaagatgcaattaaagaccatcccgtaataacctcgggtatcagagtgtgaaccttccatcacttatggacgctaccaccagtcatcggaggcaagagacgggaccgagagcgagagttttcgacaataaactatccttatgtaacgtatgtgctactatgtggtagagttaaacaataacaagaaacagcaataaaacaacaacaataatataaaaatgaagaaaacttatcagtcattcgtagaggaggcaggcatgaaaacacaggtgacgactttcataaaaaacattgccactggatcgctcatggttgccatttgcacatttgtcatgtattaactcttaactcgtggtgaaagtgaatcggaactgtagaaaagagaaagaggtgaaggcttttcccgatgaactgtagaaaaggatcagcgaattaattgaatccccggaacagagccagaccggtctctgggatttacgtgaccgcatagaacttggctgggcaccgtccgatattgtagatcccttgatcgaacccactttgcttcaaaattaataatacctgtttcggctatgatgatcttggaaaaacctataccggagtgcaaagccataatttctgaattggatttgataatttctgtttgttagagagatatgtgactaagatgattttttttttaatttaaaaagatggtttaattttttggtttaattattgggtttatttgttaacgagagatgaaagctattaacatcgttaaatttaacagaatattctttaaggtatattctgttaaacaaaaatatgactaaacaaaaattagtaagtaaaattaagttgtagctaatttaagaaaattagtgacaaggaattgttgtaagtaaataattattagtgacaatcaaaattaaagatcaaaaagttgtagctaaaaaataattgtgactaattat

SEQ ID NO: 27233 - DNA, 2088 bp, Cannabis sativa
catgtatgatttcaaattcatagtattgttttccaatatttagacactaatatcttacattttaaaatttgtcatgcatgcatgtaatttgacacttttcacgaatttggggtataattagatataattcgacaaaaacctcgaaagtatagaaactctttgactaaaaccctcaacagtcgttttataaatcccttcaatttaattatattcttccactaaatttaacttaataaatttatatattttaaattatatgaatttcatgacaatgtttcctaagcttatttgttaaagtcagggcattatttaaaaagaattattttatacaatattgtttgtcgctttttttaaataaagaaatattaaatgatggcattttgttccccgcaaacgacagtgcgctcgtgtaaatgtgtgtgattttgtatttttcttttaggaaaagagacaaattgaaattttagtgacgccgacactaccaccatatctcaaattcaatggtgactttcctcaaaagtaaaatcctaagacaatacaatttgaccgattcataaattcaaattaattgctcgatctcatcatcaccaattaactcctatggtaatgttaattaggacttccactttttaagaatgtactaatatagtacaatactaaaacaaatatccataaagttttttgtttttttgacataaatattaataaaacctcaactaaagacattctccctcgcccacccaaatgaataatagatcagaatcttaaagcttgactcaataaacgatttattaatgtgtcactaaacgtaaatatagtgctatatatggcattcatttgctaattatacatatagatatgttgtattatattatatatgtgtatatttgtgtccatgtgaaggcagctaaattcacatggaaataattaaatatactccaaaatatcgaaaggatagtatggggagataagtgactgattggtaattgaatgagtgcatcatgatacatgatcaatcaataatttgtacgtggcgacccgataagaataaagacctaaaagactatgatatgtactaaggaatatataaatataaagtccatataggtacaaacgattttaatatagataaatatacaatttaacaatatatatacatatatgacatgctaaagacaacaacgatgcatcactataaaatgtactattagtataattaaatacatattataattagaaatgacaattatacttttgggtacctatttttaatggagaggggtaaagattgaatttcaaaagcgagagtaagtatggatttaaatattcatattcgaatttggattggatcgagagcaaaggaatagatatccgccctaaatttgtccggatatgacatatgtatatatttaagttttaaaattataactattataattaaaataacttcatgctttagactttttattgattacattaatgtgatatttcagttttcataaaaatgcttgcagtgatggatattaataatcacacttaactattttaaatacaaatgattttaaccacttaacttttattgctaattttgtatttataaagtgtctgtttgtcacagtttttgaaaaagctaaaagatatttttttaaaaaaaaaaagaaaaaaaaaagtatttagtaagcagttaaaaaataatttattatagaatttatgaaaaagttacagctcaaaggtaaagctagtacaactcataaacttttacaaaaacatgttttgattaaaatgctcaataataaattattttttactaaaatatatttaattatttattatatattaattaaataaaaatattttgtttgaagaaaattatattaaacatagataatatttaaatttcttttttattttgttttaaaaatatttatatttatgttattcgtatttctagataggttatatgtaacataaaaagaaagatacaatctcagaatcttggtaattaaatcccctccaattaaaccaagtcacagaaaagtgggaaaaagaccaaaacgcccttcccacataaaagccataaaaagatca

SEQ ID NO: 27234 - DNA, 2317 bp, Cannabis sativa
tataaatacaataaatacataaatattaatatatatacctgtacaaaattggcggtaggtggtgctaatgcttcgacattgctgtggtggggagggagatcatgtggtggtgctccgatgttgccatggtgggtggcgccggtgatgtgagctcgagagagagagggaggatgaaggatacaacactgatggaggtgggagatgactgatcggttcgtgggttttgcaatgtgggtttgcgggtttgcaatgtgggtttgtaatgtgagttttgcaatggtggtggtactctaacgtgggtggcaccaatgatgagatgagagagagggccggaggtgcgggtttgtgggttttgcaagaattggttctaagatgtgtgtgtgtgtgtctatggtaaaaattagatctagtataaggagagatatgttaaaagaaatatatgagcattatacccgacagtttaaagtcgtcggatatagtatagccgacgcttttaaactgttagctataatataatacttatatatttgtttttttttttttttgcgtttttaatgaacaacgtcacctaatttttaggcactattataaactgtcaggaatactaatttttttccgataattataaacatttgcttaatttttttagcgatagtccttaaaaatatcattttttgaaccgtcgcgaattcttctctttgtagtagtgaattaattgtgatcaaatgtaatgaatatgaaatatttatttattcacatacacgtaaataaattaataaaataatttatacttagaaaatattctaattggaatctcatgattcttatcttggtatgagagtcatattcctagcaagcttttgatatatacatatatctatagtaaagccagtcgcatgaaatccagatagtacaaagatgcgcttgagatcttaacatgaataagcgagcaaatgacactgataaggtgatccaagattggtaagaaaaaaatagtcatcatctgaaggggagatattggataatattatcccacatagattaaatataaaagtatggaatcatacataggaacatggactactccactcattatcaattaattttgagctgaaactcgaaattcttgttagtattaaattgttaggcaccataatgttatagcgatgcagatgaatatatatataaagtaaagatatgaggtggtgacatgacactttaaaatctcttaaaatagcattatttgttttcttcttaattctctctttttttatatattttttaattattctctcctcttgacaacatcaaaaagaaaaaataattgaaaaatatctaatctatttaattattctaggttataaaattaaaaaatatttaatataaatatatataacaccacatcattaaaaaaatttaaagtaaataaaatagcacatcttcaaaattatttcttaaaaaatatctaacccaatcaattatttaaatcgacaatttttgagatggagaagatcgatgtgataagtataatggtagaaaaggtttattgatataagcttatcaccaatacattaatggtaatttcttttctctccttactttatactaatatgttgatgaatattattgttttattcttataggatataatgttactataatagttatcaattgatatattatttcaatattatataagtattgtctattgaataattggtgtttgaagtaatttttcactatttttatgcatgatgaataatgtcttttattgtgtttttagaataaccatatctcttgaactttgtcttcatctatatatcatgcatatacactatattataagacctttctatttaatattattttctaaaaaaattcactttttaattttagagttagggtttcattcttaattcactccaatattaagtgtctaattattatttgaatattataaaaaatatctacaaactattattttatttatttatttagttatttatttttatacatctattatctctttttttttttgaaaaaaagtctgttattataaattaaatagtctcttacaacaatagagaaaatagaagaagggatctcttctatccatatacaatcattatccaactgtaaaacttgtttataaatatctatatctattgtctctgtaattttagatttttcttttaaaatttataaatatctatatctaatatacatgcaatatttataataaaataagataattattttttgtgaacaaactaaaattaatatttattttttgaataaaaatcataaaatttattaa

SEQ ID NO: 27235 - DNA, 2374 bp, Cannabis sativa
agtaaccttttgaggaaggataaacaaactcatccagaagttcctgatacctaacaaaattgaatgaatgagttgagcacgccctgcaaaagatagatttctattagcccaacagtttaaattcttgtttagtttatgatccacagtcagctgctttccattttgtaggtcttagtttaacccctaaatatttcaggggaaaagacccctcttccatttgcacctcatccaaaatcttcttcttgtcaacctctttaacacctccaaaataaatatgagatttggagttgttagcagccagacctgttgcctcacaaaatcttcggaaagtattggaaatcaccttaaccgccttgatgttccctctacagaaaatgagtaaatcatctacaaagcataagtttatcggattactctgtttacataagtctaagcatgggccagaagtctagtcagataatccgtaacgagaacaaacagaagaggagacatcgggtcaccttgccgaagacctttttcccctttgaaggagccttgaatctttccattcaataaaagattgtatctagtaccttttaagcacaccataatccattggataaacttagacggaaaacaaagctgcttgagaagactttcaataaagtaccaatcaaccgtatcataagccttgctaagatcaatcttcatgatgcatctagcagaattgttcttcctcgtatagccttttagaagatcttggaaaattaggatattatgcgcaagcaatctattcttgataaaggctccctggttgctatgaattaggcttgggaggacttctgaaagtctagaacacatcaatttagagatacacttctataaagtgttgcagcaagctatcggtctgtagtccttggcacccttcgtgtcttcaaccttagggattagggagataaccgtttcattcaattttgaaggtaaacatcccatttggaaaaaaaaacccagcactgctctcgtaatgtcatccccaatttcaggccaaaggtgcttgaaaaaatcagatcgaaacccatccattcctgggctcttcaaagaatgaataccaaataaggctcttttgacatcactctttgagaacgcagcaatgagcctaatttgtcgttcaagagacagtttgttgccacacaccaagctatcataatcaatctcagaaatagctgtactccgacttcccataaagcttttaaaatgggtaataaagtgatcaattaccttaggataatcatcttctaccttgtctccgatggtgaaagtggtgatcctattctcaattctccttttcctcatgctagcatggaagtagctcgagttctcatcattgcattggatccatgtaatctttgattgctgcttaagatggctgaagtaactaggttgcagctgaagcaaatagttgtagcagcatttttcttcttcatgtaaccttttgtcagttggttggtaagcaagagcctcatgagctttgcaaaactcatgttttgccaggttgtaatccgccacgatgtctccaacaacttccttattaaacttttttagagcatgtttaaccataagtaggtttttgacaacatccgagaggctccccaggttagcattccacttagcaaggacaatttctttgtaaccgttatgaagcttccaatggttgcagaagcgaaaaggtttaaatctgaatttgctaatctcttaattctttattacgcagtagctatgatccgagatccaatcccatttaaagcaagctttagtattaggcaattccattagccatccattgttgatgaagacacgatccaattcagagaaaattctatccccttcctcatgtttgtttgaccatgtataatgagccccagagctaacaagttcttcaacttggcctaaagacaactagttttgagcatcttccaactctttagccttcactaccttgcctcctattcggtcttgatagctaaaagctgaattaaaatcccctagaataatccaaggatcattaactttccccaaatcagcaagttgcttccaaagctcttttctgtcaacaagagaattgcttccataaaccaccgtggtgaagaaagccttgttttgctcacaaacttttattcgacaatgcaccatctgtagcgattcagcacgtatggacaccgtaacaaatttattctgccaaaggagaagaatccttccagaagtttgcctactagaatagtaattccaattagggaaattggtttcaacaacctttttcacctttttatgctttattttagtctcaaacagagcagccactctgatcttattttctctccaaacttcaaggatagca

SEQ ID NO: 27236 - DNA, 6549 bp, Cannabis sativa
aactagcgctgcaaccactttagagacacaaaccgtaaatttgaaaaaaaattaaaaaaaaaaacagtatatggggtaatttttctattttttatttatataattttatttaattttaaaataataatattaagtgtatcaatataaatgtaatacgtatataaaagtgtacacataaaatagtcaacccaatgatacataagcaaaagtaaaacaataattaaaaaaaaaaagtaaaagatagttaaaaaaatttaacacccaaaaactctactaaaaacaacaaagagggcaatttggaaactctaaaattattattttgtgtttacgcgttcacgttttttgctttttgacttttattttattttattttattttattttttgtaaaaaaagaaaataaattgtctgtatcaattaatatttcttattttttgtaaaatctgtaattaaaataaaatagataattacaaaataataataataataataattcgtttatttgttcacacgtgtcaatcttcttcttcttctaccggatctcatcctctccaccatttttcttccattatttcttaacaacttaataacagcacacaacaaacaaacccataatcaaaacgaccaccgccacccccaaaacgacatcccacgtaaaacgtcgtcgttttcatctccttcatatccacacccacacccattgtcattccatttcatttttcttgaatctcaagtttgggttttttgaattttatataacgcaaaaaaaaaaaaaaaaaaaaaattgcagagcgttcaagaccggtttcagctacgccattgttgcagctacgttctcacattgacattttttttttctcatgagaggagctgcacctgcattgcattgaagttatttttactctataacttgatataaggtttgagggaattaggagaaatattcgatttttttttgattgagggaaaccctatgatttcgttctttggttaacggaatctagggttgagcagcttagcctcccaccacgatctgaatctaataataaagacattgttatttagaaatggtaatggttgtttataaattatttatcctttttgaagtttttttttttatattttgctgtttggtttgatagaaaggtgtttcattctttaatcttttgttagtgttgttttggatatacatttaattaatgtaatgtattattaaaaacttcatggtgtcaaacataaaaacaatattttttcaaattctttctttcaatctttttccaagaaaacattgtttctttctttattttttgttctgtaattgatggtatttgatattattactcacttaactttaagtagggaaaaggtaagcaaggtctaaattgttgtagtttctgcattttgttgaatattgccagaatttttgaattgttatttttgttttgttacttgatattggtacaatttctgaacactacaatctttagaagacagaaaacaatagcatgttgttaggtaggtaggtgcccatgatttgtttgatatttcactaatatagattatgagaatgtgaaacgatgatattggtggattgactgatcctattaatacaagaaagttattactaattattattattattcaaagaagaaaaaaaagagaatgtaaaattacacaacccaactgtagtttagagactccatgctttagctgtgttgcaattcgtgtttttggtgaatgctatcactctttgccctgtgtttatggaggcagaggttttacctgtacatgttgattggttgtagtatgttggacgtggccttgctatttctaatttgatgtgttgatgattttctttgttggtcagactgctcaggtcaattttgctgttggatctcatgtctggttagaggatcctgaggtagcgtggattgatggagaagttgtggaagttaatgctgaagggattaaaataaattctacttcagggaaaactgtgagtgctgcttttgagcctttcaaattatattatcatgttattggttatgaagttatcttgttcctacaaactttcatgggagaaaattcagaatgttttttatgacatataatggctacttttcttatcataggtaagtatgtataattttatatttttgctgtagattgttgcaaaagcatccaatgtctttccaaaggatccagaattccctccatgcggtgtagatgacatgacaaggctggcttacctgcatgaaccaggggttctttataatttaaaatgtcgatatgacatgaatgaaatatatgtgagtactgtgatttttgtccccttttaccgctttgattgtttgcgagttcattttcaattatattattgttttctataggcgacacgattaactttctttctaaaattgcatgcccttttctatacgaaactaaactatgtaatggtgtttgcagacctatacagggaatatattgatagctgttaaccctttcagaagattacctcatttatatgataatcacatgatggaacaatataaaagggctgcttttggtgagctaagcccacatccttttgccattgcagattatgcatacaggtatttctctaatgttgttctctgtttcatgtgacttggttagagtggtttaattttttgctgtccttactggttaaaaaacaattcagattgatgattaatgagggagtcagccagtcaattttggtaagtggagaaagtggagctggtaaaacagagagtacaaagatgcttatgcgatatcttgcttatatgggtggaagagctgccactgatgggcgttccgtggagcagcaagtgctagaggtaacaatgtaatgatttggttctaatgggtaattttattcggagcttctagtttctcttggtaatctttcaaatgtcactttccgagtgtaacttgcatgacttcatcttggagctgagcttgcacttctaatattacaatacatttttgtttcatctggtgctttttctttgtggcagtctaatcctgttctagaagcatttggtaacgcaaagacggttaggaacaataattcaaggtaggaacatttatattccctgtcaaaaattctgggtatgaaattggaatttaatgtgtttgtttcttccttacatcctagatatgcatattgtttaattgtattagtttttatctgaagtgagtgtaatataactgcagtcgttttggaaagtttgtggagcttcagtttgacaacaggggaagaatatcgggagctgctattagaacgtatttattggaacgatctcgtgtttgtcaagtgtctgatcctgagagaaattaccattgcttttacatgctttgttctgcaccaccagaggcaagttggtctcctttttatgtgcacaatgtttagaaagataactgggcaatgcatatttacttgaagtttaatcatcacgtcttctttggtgcaaatctttaatttagagacaaccagaacgctttgtggataatattgtgccaaagattgtattaatatattcactgatccaatctaaactagtagtaataagatctttatgcatctgaaatccttggaacgaccaaaacatggtaataactttgatagcggacttatgtcatttcatgtgagttgtctaacaaacgaataatgctcttttgcattttctgataattcagtggttattactctctttctctaaacttccatttgaaattcatttatcaatatttgatcataattggcatgtttattattctctgacatgcattgtgtacctctgccaattgttaggatgttgagaggtacaagttaggaaacccaagaacatttcactatctgaaccaatcacattgctatgaactggatggagtggatgattccaaggagtaccttgctactaggaaagctatggatattgttgggattggttctcatgaacaggttgcatttctgatggccagtatcatatgtgattataaaaatgttggtatagatctctaatattttttctttccaggatgcaatattccgggttgtggctgcaatactccacttagggaacattgaattttcaaagggggaagaagcagattcatctgaacccaaggatgagaaatcacggttccatctcaaaatagcagctgagcttttcatgtgggatccttattttatattattttctaatttgcacttttggatattcatggctagatgatttgctaatagttcattctgcaacatttgttaggtgcaatgagaagtctcttgaagactctttatgcaaacgtgtgattgtgacccgtgatgagaccataacaaaatgtctggatccgaactctgcagctctcagtagagatgctctggcgaaaattgtgtattcaagattgtttgattggtaaggtctatacactcacgaaaaaaataatcagacacttgttttaattgtttgttcatactgtgaactttgaattctccaggctggtgaacaagatcaataactccattggtcaagatcctgattcaaagagcttgattggggttctagatatttatggatttgagagtttcaagacaaacaggtgcttaaccggtacgccttttgtttttgttatttagagaggactgcactaaatcactgtgttccaggttctagaaatatttagttaggcagaatccgaagttgattcctttagtttctaatattcttgattatatgctgagtggttttacttgtgcaaataagccactgggaaaatgttattgtcagggctgtctttgggtttgatactgtacctcttttctttgtactcttgtgaaaacacattcatctctctttagggaacccttttggttatggcactttcacttagattttattgttagtctgttagtgtctgattaaccttcagtgttttgctgattcttatgttatctgattcggcagttttgaacaattctgtatcaatttgacaaatgaaaaactacagcaacatttcaatcaggtttcagaagatttatctcttctttttggttttgtgaatcagctaaacttttttagcttacttaaattactattcaacagcatgttttcaagatggagcaagaagaatataccaaagaagaaattgactggagttatatagagtttatagataatcaagatgttcttgatctcattgaaaaggtaggtttctgtcttccattttttccccatactttacgaaacatgtttctaggcatacttgtgataaaatctattacgatctttccaaatttgctcttttgagcattagattttaatatgcaagtacttttaatgattctaagacatgtaatttctatgctgttttaggcatatggttcataatattacattatttaatataatgcattataatatgggaactttcttaggtagctatttgtttattcaacgcgaaagagttttaagtgtttttatttactgagttagagattgcatttttttataatttttcttcaatcttattttctattagattttttttttttttaaatatatctatacaacttcagtttctttccaaaaaaaaggtctgggagctttattagcacggatctataaaaagtgtgaatcttatttggaaaattttattagtgtgttatgtcttgttttgtttacattttattttgaagctgacatatatatgatctgtcagacattgaaataatttgaaagttgatttctgaagacttcgttgttaatttcttaactcccttcccttcctgctgaatttgatatgttggtccccttttttgagggaatttattcaacttcaatcatttgggaatttattcagcatataaattgtacctattcaatttgcaaaaattaagaatggcattgttatacagcatattggacttacttgcacccaccagtatttgaaatagcaaagcatacatacagtaattcttgtaaatagttgtttaatattttcttgttgtctttttgctgtacaatagctgcttgatattggacatttttgtatcataaacatgcttttattctctgttagaatctatcatttgatgagtgagagagtaggtggaagttcagttgtttgttgctgttttaacatatatgaaattgtattattgcagaaacctggaggtatcattgctcttctggatgaggcgtggtatgtattgatatacaagcttttatgtattttaccattggtttgtttaagatacgaatatttacattacctgtagatggtattgttttatgttgttgaggtcatgacagctcgtaattgttaattgtagcatgtttccaagatcaacaaatgatacttttgcgcagaagctgtatcaaacctataaagaccacaaacgatttagcaagccaaaattagcccgcagcgacttcacaatttgtcattatgctggagaagtaagtgtgaaatttaatatactcattgtaaaatacgatgattgtttaatcttgtggaagaggatgca

SEQ ID NO: 27237 - DNA, 3495 bp, Cannabis sativa
aaataatcatgcgtgcaacataatgagtgaaccctgttttcagcgtattaaattttttttgaattttttaaaatattgcaagatgtcttaaataattataatgtacataaccataaaaaaaacaaatttaactaaaatattacttcaaatatcaaaatagataagatacatgcatcccttttaaaaaggtgaattgtagaatttttcattattatattatatcagtataaatatttagaggcgtcgcgacagaagtggtgggatgctttgttcgtttctaaagaaattacttggatcgaccttggttttcacattaactaacctcttaaagttcataccaaaatactttttaccccaaacacttgcttgtgagtaactaataggacccttctcgttatttgttcccaaatcaaggtccctataattgagatatgtagctcttgggttttgggacacataaggagacatgaaattgtatgcacttcggacccaattcatatgcttttcactttctccttctttctcccatgcagacaagtacaaaattttgtacataaatccagctcgatgagggaatggaattgctgattctgaaatctcatccattttaccaccataagggtacatcataagaaaccccactcctacatcttcttcatataacttctccaaaagttttaccatcacaacttctggaactggcttcttcacatagtctaatttcaccttgaaaaatacattttgttgaaatgttgtattaagtaaagattctggtgtatccccacttgaaaaaccatcaaagtaaacgacagtttcaatccagctcttttcgaggcaatcttttctttcaattcccaactcaggaaatttcttttgcatcaatatgaggagactctcaaccctaccaagaaatatagaagagaatgaagcttgtatagttgtcttgtatttcccttgtgaatcggtagaattaatagtcatgaaactaacaaagagtaacaaatctttgtcaaacttgtaagcaatattttgccatttgttatatatcttcacagtctcattcatctccaagtttttactaacagagaacatagtaacttttgatggaactgcaaccaatctgattttccaagcgagaatgattccaaagcttgctccaccaccaccacgtatggcccaaaacaaatcttctcccatagattttcggtcaacgaattctccatctgcgttgactaagtgagcatcaatgatattatcagctgcaaggccatattttcgcaacagtgctccatagcctcctccactgaaatgcccacctaccccaacagtacgacagtacccagcaggaaaactcagattcccatttttctcagcaatcctataataaagttcaccaatggtagctccagcttcaacccatgcagttttggtatctacgtctacagtgattgaacgtagatttctcatatctaatatcacaaatgggactttagacacataggaggcaccctcaaagtcatggccaccgcttcgagttcgaatctgcaagccatatttcttggagcataaaacacaggcttggacatgggatgtatttgaaggtgtgatgataactagtggttttggtgttgatggagaagcgaatctaaggttttgtatagttgaatttaggacagagatatatgatggatcatttggagtgtgtatgagttttacaattgatttattgttattgttgttgatatgtttggagaagcattgaagagaaagttgtcatgtggggattagcttgagaagtttggatagagaatgagagaagtgaaactaatattttgcaaagaaaccaaaaagagaatgttgagtacttcatttttcttgcaattaacatgagtttagacctttcttatatatagcattatttgtgggaaaggtaaacaaaactaaattttaaataaatgggtgaggaaggaacctatatatttcattgattttcacacttcattataataatcttgttactttgactaattttaacattatagtttttcatgtataaaataatagtcatgatgatgccaacgttatcttctaaataaaatttacatataatattgactattgttaattaattttatatttgaatggatacgtacttgtttgattttagaattattatgaatatcttcttgtgtgtgattttttttttttcagaaaatgaaaattggcctcatgaaaatcgcaaaaataagactaggggaactcgagggggataaaagagagttaatatcattgatggaggaggtcgatgagggtctcaatataaatatctcatggactttcttattctattgaaaccaaattttgttatcatacaatacttttagtgtgcacctcagaaaaatgtgtattgatgcactttttattattttggtttaattttttttatgatagtgtacgttgtagttatttaaaatatcatataaaatattaaaaattcaaaaattcataatcataaatgttgtagttgataaatttataaaaaaatttcaaaattttgaaaaatattttaaataattacaacctattttactataagaaaaaaaaaacatatacatttacaaaagttttttacattttttttagggtgtccatcaaagttagtctcaaatcgtagatctcaactctctccatcaaaattatcttctattatagccaacttattctaattttcctacctttgaattgttacttttctcccactccatcctcattcctcccctaaacaccatgagatcaccaatgaaattccattttttataattacaaatttattatttaattaatcaattaattaaacagtgtacaataaagtcagtacagaaatagataatttgtaactatagaacacgattttgtcactacaagaaatggaacattttatctcattttttatgcttagaaaaataaaaagtgggataaaaagtaagctgaaaatttttaccccacttttgtataagacacaagggccatgtttggtttaacactatcaaaaggaaaatatcaaactaagaaaaaggttaaagattatttttttattgactagccaaacacactcctagtgggtcttctactacactttggagcaagggccttgtttgggtacgaaaaaattaagttttcactctttgatattttgctgaaaccaaacgaggtaaaagggaaccctttccgggataaaagggtttccctagtccttttataaatacttttaggtttagggttatctctctcatccaagttctctctcttttgtcgccctctctctttttttctcccaattctttttgcatttccggattctaggccgcgatctcagccacgcacgaagggccttcttcttcctctccacttctatctttaccgatcactatcggagaaaactcttgctgaaaaaggcctgaagctctctctccattgcttctctctctctctctc

SEQ ID NO: 27238 - DNA, 3343 bp, Cannabis sativa
gtcatattattttgaaatgtattggtttaagcataaaattttagagtttttaaaatatagttttttcaaatttctcctaaaaaaatggggatcttgtgcaatggtccaagctgcctaatgtttgggccggtcctgactataattaaacttataaatgatattttttttttaaagtttttaataattaataaatatttagtatatttagtattaaaatattctattaaaatattcttactatattatcttactatattaataaaataataaaaaatataaaatttagtaccaaatatttttatgttgatttaatactaaatttaaattttaccaatgacctcatgtaaagtgttttgacactttaaacacttttatctcttgcaaagtgttaacttttggagtaggactttggtggcctacttagctaatgccaagtagcattaaacatgtagcatggcaggtacgtgagtttggtgaggaagctcttgctatttccctactcaataccagacttggcaatattctccctgggatgggcttcgaaactaattttgtccatgtctattttactctctacctctattctaggggtctcctttaatttataatattaaatcttttttttttcttaaagaagaaactttatttttatgcagtagattagagtatcaagtacttaacataactttataattgtgtccctttttttaagaaaataaataggaccttgcgggacttctcactagatcccctgtagacatatatgtgggaaccacaaataacagtacaatgcaatttcatattaaatctttaatttaaatatttgaaaacacctaaccaaatatttgccataaccacccaaagatatcaaatatttgtacttgaaaaacattaggatccccttgtatttttgcatatttctcacctagattattagtagctagctaaatacaacaacttttatgcatagttctattaaaggaagcgcagcagtctaggaggctggatatgaattggcgggtttggaattgagtcgtttggtccgagctcatccaccggcggcctctgcttatggtgattggtttctgattggtaagccactgctaaggcaagagcctgctcattaaaaactcaaaaggtcaaatgatgcatagattgtaatcattaactaattaatgaatgctactctacactatagctagctagctgggtactaagaggtgtagaagcttaattacaatgtggtcatggtatggaggagcaaatatcccagtggttgtggtttttcgccggcgacaatctgagcaaggtggatttgatatgtgtgtaaatcctgtttgaacaacaatcacaggcataccaactagatttcccatacaaactctctcccattcagttgggctgccaatcattgcatcaactttgaagctttctcttacttcttgtattaacttgcccctagccctttgtgcctattaaaaaaagaaaagaaaaaagaatattagtgaaataaagatcaaagttttatgtctagctaattacaataagatgcatcatttcttaaagagaataggaaaacctgcaaatagtcaacagcaggaaagaagcgtgctcggcgcaattcaaccggccattgatcttgagcttcgtagtcatcatccttccccgatcgctgccactcatcgaaatgagctaacatgtcaacatccatcgtaaaacttataatgccttgaactgagtcaactgtgtaattcagtttgaaaggaaccatgttaacaccttttgatgcaagaacttgaacaacctggaatgtatcatatcctaaaacagcttagtttggaacgaatacagatgttaagtgttgccaaatctaataaaaaattaaaattgaaacactacctccatatcagcatcatcaagatacccaactgtcagtttttttatgtcaaccgaaaatggatcaccaagagaaatgtcccttgatgagacatcatctggatcttttcccataatagaatctaaaacaatagcacaatctgttgcacttctacagaaaggaccaagcttatcctgttaaacagaggaaatgtgtgaaaaagacaatatatatactctccttaccaaaacagagaagagagttagcagtatatatatacgtaccaagctttctgatatgctcataacaccagttctaccaacaagaccaaaagtaggccgcaacgctgtcaccccgcatcgcgaagcaggcaaggtcatcgaaccaactgtttctgatccaatagcaaatggaaccaaccctgttaaaagaaaaaaatctgagagaaccattcttgatccaagtgaagttgtgatttttcagttcacacatacaaagttactagtcaagacaaccatatattaattgaaaaaaagaaaaccaagaagctcaaaaataataccagctgagatgcaggcagctgggccagctgaagaacctgtagagaactcttcaatattccaagggttccttgtcctaccaccaaaccatatatcatcatatgccagtgatccagaaacaagtttggctacaagaactgccccagcagacttcaaccttcattcaacacatatgtacagtcataaactagaatatcaatgttctatagatgcaacttctatattcagaacatatttgttaccttttgtaaacccaagcttcaatgtcaaggacttgatctttgaaactttttgaaccccatgttgttttgtattggggtactgaaattatatcctttaacccataagggatcccatggagaggacctaattcaagcattgtaatgaagaactttctattatataaaaaccataaagtaaatatttacttaatgagttagtggaaaaagaggtctatacccaagtacactcctctggagaacaattcatcagcttcttttgcttgcttgtatgccaagtcttcagtgtaagagataacagcctcaagaacaggattatacctacacacaattactacatcagtcaaaaaagggagccttgaattagaacaaaatatggacttttttcattaccttttcagtcttttaagacaaatttgagtgagctcctcagatgtaacttgctttgtcttaatcagctcccctagttcaagaatctgaaaatcatcaaatgggtttacttattatcacagcagcacacacatgtagatatgaaaaatatcaaagaatcttttcttaattacactcatgaaggcaatatcatcttctttgtttggtctttgtgtgccaaccaaataaggataattaaatctcttttttttgttgttagcttcttcagttgcccattc

SEQ ID NO: 27239 - DNA, 2407 bp, Cannabis sativa
tggtgatattttattagcaaattgcatcaaccaatacaatattcgaaatatccgccggagcatttctctcggtgaatatacgaactgaatgaaaacaagagttatgagccatataatatgcagccttgttagcagaacgtttaacaaattgaatctaaacaaattttaaagaatcaaacaactccttacactcttgaatcacccttccaaaaggagaacgcaacaaaatcgaagaatgtacagcaagaaggcaatcggtttccagttgcacttcattccacttcttgtctttaatccaactaagagcctccttaatgcctatcgcctccaccacagcctctagaaagcccggtttgctacaagaaaaagcttcgacaagatggccatgacaatcgcgagccactccaccagctccgtaccagccttctgattcgaaaatatagctcaatccacattgaccttaatcatattattaaccggtttagaccattgctcccttccttcattctcacccgaagccaaaaacaaaggatttcttctacattagtaggcataacacacaattcaaaccagtttgagaacttccctcccaagaaagcaactgaactcaaagaagatctatgccaacaactttgagcaaaagagcatccaatcagcaagattagacaattttctttctttctttaaaaaaaaaaaatacaaaaatgttaaaaaaaaaaaagaaacaatttaaaaaaaccattaatttattcaatatatataaaatctaattttaattatttccaaaaatgtaataaaaattataaagtaggaatagtgtttgttgtttcttttaaaagcaatgttctttatttattttgaacaactttatttatttatgttggtattggggttcttgacactgaaaccggccatttttcatttttattgcaatttaattgtatttaattagcaattgctcaatattctataatcataaatataaaatatctatattttttttccctattgtcacacataggaatctaccagttacaagacgataaatccagcaaaatacacgttacttattatgctataaaacttgattgttgggttgacagccattttttccactgttaaatattgaatgacgtaacaaggtatttctaaaataaaatttgttgttatttttaaaataaatccacctaatatagtttttattaaaaaaaataaacttgtaattccttgtaaaatttgtgtctttgttaactccaaaacttcataggtagtgtaattattaaagtagtaattatatattgtgtgtttagatgtttagtaattacatatgaattcttaatttcataattggtgaagttagtacatatttttcaaaaaaaaaaaaaattggggaagttagtaattatatagtttaataatattaattatttaaaaatagtaatattaagtaattacatagtgtaattatacttataagggcaattatagaatatatatgaccctcaattacataattaaagtgtaattatttagttgaacaaacacctcaaatcttataattactcaaaattatactcttaattccaatttcacaatataaatttccaaatacaatttggaaacaatacacggtctctttccaaatatttgttagtttttatcattgtggagcagaattgctaatatagtagcacatacaactgcaaatacaatttggtgacttggttattgattatgttatcctctttgagctctcttcttaggtggccatattttaatgagattgtttttctcaaaaaaagaaaaagaaaagaataaagttcgtctgatccatttgaaatttgcctacaactcgatcattaaatgtccaatactatactagaaaaataaccatttatcttggatattgttttggaaggatagtctttggttttcacatatatggaactatcattaaaagttttataacaagaagtcaaaagtaggagcctttaacttcggttgtgacataataataattttatcgcgaaggactttttcttcgaaaaactctgtcctgttttttctaattatatattagaggtttttactttatttgtttatttttatagctttccattgagtatcaaacttaaaagcatgtgaagataaaagttatttgaaggctttttcattattttttatgtttttcattggaaaagaaaacgaagagaaagtctgtaatttttctattccacctaattaaatgtaaagcacgtttttttgtaatcatcacctggttccgaaaaaacgtattaaaaaataattaattcataaataaaaatatttatttaattaaataatttccggtaagaaaattaaagtgacactacactaatccgcctgccaattcggctcgacttaacac

SEQ ID NO: 27240 - DNA, 1700 bp, Cannabis sativa
catgtctcaaaacagttggactggctcaattccagaatctgtgttttccaatctgatcaaactccaatctttcaatctcacaaataataaatttatgggacacttgtcgtctaatatttcgaaactttctaagcttaaacaccttcatttacaaactaattttctcaaaggtaatattcctagtgaaataggtcttttgcatgatcttgaggttcttgaactgtatgaaaatttttttagtgggagtattccttcttctatgggccaacttaaaaatctatcacaactcaaaacattggatatttcttctaatagtctcacgggtccaattccaacatctatgtggaacctcaaaagccttgttattttgtctgtaggtaccaaccaactgtcaggagtgttggcagttaacatttctaggcttaagaagttggaggtgttatctgtttttgccaataattttagtggttcaattcctttagagattggaaacttgaaaaaacttaaaacattggttctttcgaggaaccatttcacaggtcctattccaacttctctatggaacctcaaaagcctcacccttgtgcaacttttcaaaaatagtttggatggaaccatcccaccagagattgaaaatctaaaactcttatctatttttgatgtaagcaccaaccaactatcaggagctcttccaattaatatgttaaggttgagtaacttaaaaacgttatttgtttttaaaaataattttactggttcaattcctttagagattggaaacttgcaaaaacttgaaatattagatctttcttctaacaatctcataggtcctataccaagttctctatggaacctcaaaagcctcacctttgtgcaacttttcaaaaataatttggttggaaccatcccaccagagattggaaatctaaaactcttgtcaactttcgatgtaagcaccaaccaactatcaggagagttgccagttaatatttccatgcttagtaacttggagttgttctccattttcaacaataatttcactaagacaatccctagagactttgggaagaacaatccaaatttgaacttcattatgtttggaaacaacaacttctttggacagttgccacaagatttgtgtagtggattcaatcttgaatacttgagtgtagctaacagcaactttataggaccattgcccgagtgcttgagaaattgcacaaaattaaaaagagtaaggcttgatgggaatcgatttgttggcaacattaccaaagcttttggagttcacccacatctcgattccattttcataaacaacaaccaattcattggccatgtttcaagtacgtggggacaatgtttgaatctcaccagattgcagatgggtcaaaataaaatctcaggtaagatccctccggaactcggaagtttgataaagttgaaagttttgagcctagagtccaatgagttaagtggggaaattccaactcaattgggaaatcttaaacttttgtaccagcttaatctcagcaataaccatttaacaggggaaatccctacaagcctattagacttgagtgggctagagcatcttgatttgtcgacaaatagtttagtagggaagataccatattggcttggtaattttaaaggattgttgagcttaaacctcaggcacaatatgttatctagtgaaa

SEQ ID NO: 27241 - DNA, 3789 bp, Cannabis sativa
aaaaaaaaaaaaaatcgaaaataaagttgtacggaattttaaatatttttacgattttattaacaaaaaatacagtattttaatatatttttatattctatttttattgattttttgttattttttgttattatttaaatattattttcttgttatttttatgtaattttttttattattttcgtattgtttcttgagaaaattataaaaatataaaaaaatatatataattttttttataaaaaataatgttttatatagttatcccaaaattaagacactcgtattttttttagtttacaaaaatatggtaaatgtgaacttaatttttataattattgttagagttagtccaacattgctaatgtatgaaaataaattgtgatatataaaatgaatgagctactccttacatgaccaattggttttgagatggaacctcattcatcttatccaaaattctaacatgttatcagaaccacttgtgagccgttgtgagtccaaatgccatcggtccaaaaagtcatttgtgatccgctttttatttttttattgattttgtttgtgattttagtgttaaagatagattttgttagatttaggttttaaaatctcaaatctgtgattttggacaaaatccaatgtaagtccgatgaggtgcaatagggtcaaatgaaactgtgagtttgcgaagtagaaaacgtaggttcggtagggggttcgatgggcccgatagagggtccgattggtccaattgtatccgatgtggaatctaatgagggggtaagattgtgtaaatgaaagtgtgaggcattttaagaatatcataaaaattgtcatatcctacaaatattagttaatatgtatttacggaaaaatcttttaaccaaatataagcataaaaaatatcaaatttcccataaataaatggatacataaatacaagtcccatttgaatgaatataatgctgctgctaatcataatcataatcaccattcaccaataagcataaatgagaatcaagaccagatttggtacacaatcatacatcaaatctggttcattgggctaaagaatcttttctttttctcagagtttgaggggggattgctagtaaaacacattcttttcttctttctttttttttactgactttaacacaaccccctttcccttaggcctaaagataattatatatttttacaaaataataataataataaataaaccatgattttacacaatcactccccattaatcataggtgattggaaaggaaccctttttatttccacaaatgttgaaaattcttgcttcaatggctgtttccatggctcaccgtccatttgcatgtaagcgtctttccactcccctcctctaatttccaaccggatcgcggcagcctaaaaacaaaacaacaaaaatgttcaaactcttaaaccaatcctccaaaacatgttagacattactcgaaaacatgttatattgatcgagtagcattttcagcctaatctcgtatggcttctgcacattcgatttctgaagattttgcagtttacgatttgttttccccagaataaaaagacggggtgaagacatgatcattcaacaagtctttataaacaaagagcagtacctgagcaatgtgtttggcagagatgagttcgaccatgacaaatgatgcatgccacccgtgcttaaggccaaaaatctctagaagaccatcgtcagcatgggcctcaacaaattttttctacacgaaacaatacaagtcaagataagcatactagagtctctcaaagtccgaaaggacgttgtacaacaagagatcaaaaattgtaaggggcaagttataacgacgattaaggtagtactcgagtgctttttttcatgctctcatctgcataaccaagatacaaaatagaagaacatatagtttacaaacccaacaaaatgtagcattgtctcgaggaaatataaataccttttccaaataatcaggcttcagattaccccagggatgtcgtccacttccatagttatgaagatttaaagcaacaatagctcttacactagaggaacacaaaattacaaatgagatttatatcgaataacaatacttagcgacaaagattgtaattatcgaagtagaggaagtaacatattgccatacaaataaaacaaactcacaaaaataccttgaagggacattaatgtgctcccattctgagcaattgacctttttaacatgcagcctcagaatattttttagtcccctgagcaaaaaaagtgttaagagatataagcaaatatgatcaagattgatgctattactgtgactagagctctaaacaaattctcagccacaacaagagaaaaaagattttttaaaaaactatggtttgagccccggtaattttgaaaggaggaacaaccgtcttaacaaaacaaactgcttaaactgaatgatatctcaccttaatcgtggatcacttgtacaaggtgtaaagaaccaaccttgaccgcaactataaccagaatagatcaactgcaacaatcaattagaagagttcagctggtaaaataaataagcacagtgtttttctcttttcggtcagtaaaacacattaacatcatgatacaaataacaattctactactaaaaaaccatcgataatagtacataatcacgagacttttcatataataaagaagacaaagcgcaccttatttgaaattggtccttgtgccaggtaaggtttctcgttacgtagatgatgaaacccataagcaacctgagcatccattcctgaaaatataaatccaataaaataaggcggttttgtgtagaatgataaaagatatagccccggtcttgttcatataaaactacgataccacatgaattagacaaaacatacctatgctaaagtaattataaaatactccttcataacaagtctttttctcaggcaactccccgtcgatatccaacccctgcaacaaaaacatttcacctatttaggttaatatgttcacacgaaaaataaataaactcaacatgtttacattgttgtagatagatcatatatcttgacaagtaaaataatctcttagacaataaacatagacagaaaattaaaaagcaattagatgaaaacccccgaaatcccatcgcctatcctcttcataactatttttctgcatgacttataagattcaaaagaatgatgcacatcacattgcctaatgtccgagctagcataatacagaccagagccgagtaatatagattacgtgctataatgctatatcgaccaccttctcgataaatattcttacattgaaaaaacagtgcgaggcttgaacaatataagaattaagaacataatttttcatagcagagaaacgaaaaagaaattaaaagtcgttttacaactgaaacattcataaagtgatgatgctctccaaaggaagaacctaattaaaataaataaatacatgaaaactagctaaaattcccaacctcatcaagagcacactcttctgtatgcttcagagagtgaggcggatccacaacttctccagcaggcattgacaatagaacttgccaactgcatcaccgaaattcatattagccttctaccttaaacaatgtctagccaaaagaaatgagaataaaatctatcaaacctaaacataatctaaaacgtagcatatgtagtcactgtaagtgtagagagattctattcgacattcttcaatgagaccgctttcatttatcatat

SEQ ID NO: 27242 - DNA, 2196 bp, Cannabis sativa
  modified_base (912)..(924): a, c, t, g, unknown or other
tgcttgacttggagtaatttaaggatgggtgacctcctggccatcattccgtgggtgtaagggcctaatggaggcttgaagcgagaacgttacaattaccatgtggtaatccctgattagtcacggtcaataaatttgtatttttatttaaatttaatttaaatatatcaataaaaaaatgacatgtgaataatgacttaaacacttaacgatcatgtacctacggaagttttaaaaatataacttagatattattactgtcaaaaattaaacttaggtattaatctgtaactgacaattaaacttaagtatttgtgccttaaattactcgaaaatgaattattgaaaaatttagtgtaaactcacttatagatgactttcgtaatatgcaagaaagacgttttttatttttattttaatcatgaatttaataatatatattttgaaatatttatcatttaaatataatacaatttgacctttttaatttttcattctggctctgcccctcttgagaaccctcatcttccactgcagtatccagattcaaatccgtaagcatcgaagggtgagaacaggctggccctaggcataggcgggctaagcccacgcctaggatttactcattttaggggcccaaataaaaaaatacattttaaaaataccatttatctttatagtaaagacccaaatatttttttttacttatgacccacttcaactcaacaccggccgtgggtgagaacgctcaagcagatctccattttgaatcatctcggtaacaaagcagattcaaatccattttcttcttcttcatcgcagagaagaaagaatcctactcccaccttagaaaatttatttgatttctgctattattttgaacaaatttttacatattattattattattannnnnnnnnnnnntattattattattattaatttcttaagtctcaactactaagggtccacctataactaaagtcaactgctcgtagcttgtaaataatggaagaggtggagcctgccaatgtacctgattacttaaactatataccctcttattatttttaacaatgcttttccaaagtatgtctcttcaaataagaattagaatttatgataagtctaccaaaatattacatacaataatcacacatttatttttgatcttcaaataaaacgtactgatcaaaagcagtgtcacattactgttttggtacatttatttatttatttatgtaatattttagtacatacattgtatacatattttagtacttattcacttcccactaataggaccacaactggtaacttagtttggtgagatgcaatatatgatccataacatgacaacaatgttgatctccattagtaactagtcaagtaactcattcggttactataccaaacttgaaaattcgtttttgaaaaagacctttcagcaactctacaactcaattactaatttttcttttggacaaaactcaattactatttatttctccttattgcaagaaaaaaaaaaaaaacttgttagatgtaaattgttttgaaggaaatgatcagaaccactttatttgagaattattagatagtttttgtatggttggtcttgatttctttttttcttcagttaaataaaattaagtacaactatatattattgctactccttttcatatggtctctcttctttttcaaacagtaatttgtttaaagaaattcaaattaattataaatgatcctttgggaaaaaaaagatcaaattgtaggaaataaatttataattaaaagcaaagcctcaacgtagtttatttgtttgttttttttttttctttcctttctttcacctagaaaattgagaataattagagaaaaagttggctagtactttaatggaagaagttgttaaactactcttatgattctgttagcgtattcattgaactagaaaaagttattaggatcttattaatataatttttttaaaaaatatataaataatatagaataaataagttttttttcccaaaatatgactcttaaagagttttgtatatatattttgtttggttgcaaaaatttcctctaacttaaaaatagctgcaaatattccgattcaattacattttactattgttttttaaaaacaatttgtttatgtggtcataagtagtgatataaatacgg

SEQ ID NO: 27243 - DNA, 2098 bp, Cannabis sativa
cttatattatttaattactagctagttaattactatataagtacggcttggtggtggataggggtagcttatcatgatcgatgtttgtttgatgattgatcatctacatgtaaagaataattttgttgttgctttttttaatttatatcttatcaactatgtagcatgattgagtttagagagtagagcagtagtactatactactggttgtattactatttttgatcatgactagatcaatctactatatctttcgattctcttgtagtgtgtgcaaagagagaagagctttcttgtttttacttcatgaagctctatatatatatctctctcttactctatatgtaaataaattataaaagtggcatgtgggttattataatttgtcttgtatatatgtgaagtaccattaattaatctttttgttctaaattattaattgtgctatatatatatacagttaattaacaagagaatgcactaataataatgacacccacatatgttattttgttactatggtgacggctgcatttgtcgacttgtataactttttggcctgatattatttggtatttacaaagcaaaggttgacaagataatgagatataattacctcttatggttattccaattgctatgtattattattgtctgaatgtggtcctttttagttaattgcataattaatttgtacgtattatataatatgatcattagctagctacttattaattagcttaatgaattcaaaagatcgaaatgacaggggcaaatgagtatgtttattggtctttcaaataactaccatagatacaaaatcttttctaatggttaagcagcataatatatatataagactaattactttaattatttgttgtttgccgactaatatatcggcgcgcaagattaatatatatttatatttatgtacaacatagtcgttgtgttctgattggttggtaagtggcaaaatgtattattaattttcaaaactcttttttattcatgtttttttcttcttttttgttctactgccataaaagtgaaagagcttttgtctccaattggttacttatctttgtggaaaaacttattgaaagaccttgtgttgatcacaaaaatggatatgtaaagtacagaggaaacaaggcatggttctcattcaacatacggttccccattataaatttgctttattaattatatcatgcattgtatgaggcctcaacgctagtgtgaaccaaattgaaaaaacaattttcactattacatatataatgggattgtgagaatattctaattacctttatcttttcggcatttatcaaattatagttttttcttttagagagctagagctatgtatatataggctatagagctttagctgttactttttacacatgaaagtctctgtttgtaaaagacagataaatgtggcactactgtaaatatgttgacttgggcagctgtgtccaaattttttaaccgttgtatcacttgcttgtgaatttcatgtccctcttcatcataacactctttgcccaaaacagtaacctaacagatacctactctcagatccacaaaaggggttgtttccccatgtgatgagtacgtcctctctccaatatgtaaataacataccatgcttctataattcacacttttaaaataggttacatctcatagaattttttatatcaatttttttttatagttgtttaatgggtaattattaaaatatcttataaaattttgaaagacttaaaaattaacacactgaaaaaaaaattcaaaaagtatgttgcacgtgaaattcttttattttatacgcatgtcaaataactacagcgtaaatgatcatgcaaaaaattagattaaaaaattctccaaacagataaagagtacatccatgagtatccacctaaaaataataatagtagtatacacatatggtcatagagataaattttaatttttttctcacaaagaaaaattctccacttcaaatctcccatccccaatatatataaaataaaaaaatattatgttttttttggttttgtatatttatatttcaccctaaaaaca

SEQ ID NO: 27244 - DNA, 1641 bp, Cannabis sativa
attcaaaacacaaatattcacatagagctcggaacgagctttctaacgatatatagaactcccaaaatggagtccggatcacaaagttatgaggatttgaataacgcgttcgaatctaccaaaaatcgaagggcgggccatggcactccccacatggggccatgacacctgggttcgaatcccaggccacaaactggaggtgggccgcagcgcccaaggagttgggccgcggcccctgggttccaaacccagaaaaaaaaatccaaaaccagcaacgaaaaacatggccgaaacacaccatttcaagcctaaaacccaatcaatctctcaaaccataaaatagagttatccataattatacagagggttgaaacatacactaaggctcaaaatttagtatacaaacaccttaattcagattcaattaatattccaaaataaagctcaatacttcagcatagctcatcaatgattcatactcaagaacttgaacttctaacatgcttttaacttaaaactcactagcaaaatataagggtaaaccttgaactcacacatgaaaaaaaccctaaaatcttatctatagctcatcaaaaatatactctaccactaagccacaaaatcaagccaaacacatcatgaataacatcaaatctatccacatgcatacaagaacaacacaacctattttcatgctttcaacaataaaatctcagcaacaatttcaaacaaaaatcagtaagaagagctacctcaagttcatcacaaagctaggcaccaaaaccctccaaaatccaagtttgaatccaagaaatttccaacaaaattcaagaactagaaaaataaatttagagagagggagggggtcggttcatagagctaagaacaaaagctaacttttctttattttttttacgaagaattctattttgttgcaaataatccaaaaggccaaattaccataatgcatttagggccatataacacaatataagcattcaagggtaattttgtcatttaacacctcatcatactcaaataaattcagattagtcacactattaataaaatgccaacaaataatcccaaaattgtatttcgaccacgaacccggtttgactcaaaatactcggttgtgactataccgcgcaaacttgtcagaacacacctgaaaaatgacaaacagacatactatacaataatatagtttataagcacctcataatataaatttctcagctttacccttcttgggtcaaaattactaaaatgcccttggctcaccatcggggtcttaacatgtcatatatcaaattaattaacttataataaattataaaataatataatttcacaataatatacaattaactagttagggtttgctattccatttcataatcttagggtattacaattaccccctcgttatagaaattttgtcccgaaattttcctgaacaactccggatatttttgccgcatatttgtctcgagttcctaggttgcctcttccactttaccgttcttccataatacctttactagtttttgtgtaccgaaaatggtacgttttacatttatcaactcgcaagcgcacaaatctttattgtagtatggagattgtgaagaacgaggtcga

SEQ ID NO: 27245 - DNA, 8346 bp, Cannabis sativa
tcgacttccacaacttttccagcgagagcacctaggctgttaccatttgagattgaaaagaacttatggggtagttcatgaatctagacttggagacgggtagaagtaaaagaggtcccatctgctaggcttggatcccatgcttgaagaagcaagagataaccattaacattccatggaccattatctagagcccagttcctatcttcgaccttctcgaacactaactcaaagagattggagtttttggagacagatgggatgaaggccactaatacagagcgtttccacacttttttccacaaagcctttaataaagctctcatcgagaccctgagaagcaaccactttcctataaaaggcaaagagaaattaaatttttgacagatgaggcgcatggagttggtggggacgtggcctcactaaataataaattcctaccaacaacaatcaaagcaatctccttaactaaatctataacaaaaacctgtaaccaccaaaaactctcacaacaaaccagcaagtgtaagaaaagagaacaacttacaccaactaccaaaccacaacaaaacaagggagaataagagaggcaagatggagatgggggagacacacaaaaaggagacagaaacattaaaagatacaacaaaagagacaacaaactaaagaaatagaaaaagagaaaggataaacaaagagggacccaaaggaaaagaaaagttttaaaaagagaggaaaaagacagagaaaaatggggaaaaagcaacgaaggatcaatgaagtgaacactggtcaaatcgaggaaacaaaatcagggcaagcaggcaaacatgccaaagaaggaagggtgactcaaaagaaaatgcaaaggatacactaaaaggaggatggtagatgaccatatgctcctcataagaacctcaggtcctcaactaaaaaggcttaattgttccatttcttctccaaaatatcataatgatatataattccttcaaatatagaacaaattaaatgtaagttaatatttcaacatatttaatttagtcgactattttcacaaaaatataaatttttaagcactaatcatgaagattcttatttgaatcaacggtaggatctctacatgcttgatttggcaaaaaaacattgttatcgattagaattggataatttcttggccgtgaaaggaagagaaacaccacgagcaaccatgtgggttgaaaacctatggtacttgacgagttaggctcacatgggcaagaagaacatggctatggagcacgtgccacttgtgttcattaaataacaaagctgccattgcttgatgcaaagaacaaaatagacaaattggcacgagaaataacttgagaatgggttatcacattttgatttttcagagttataaagtgttaccaaatctttctctacttttggattatgcttagatttttcaagttagacggtgattttttcgaaaccagaagcagtaatcatgaattacacaactttgatggttaataaagtgaagtaggaaggtttgaagcctattttatatgaggttgcgcacagactagcatagctcgaagcagtgtgggagttagtttgatggtattcaagctaaagtgatgaggtcaagaaactcaaaagtgcacaaatgcacgctttccatggtatttggaaactcgaaatagggatagaaaccatgcgcacgaccttgtaacaagggcaaacaaacctcaagtgttatcgactatcatgtgcacacatggtcttgaattggagcaccgataagttggacacagtcaaaagacttgtaccagtagcctccccatgctaagaaacttaaccgttattaatgcactcatgactgaactcttgccattttcttaaaggtctgaaattgagagctgagtggaatatgataaatttcattattaaatcagattttgttgactgtgttaatgctgtgagtttgattaataactcttattggttgcaatgacttagatgggctgatgagacaaatcaaaatccttgctaaatctttgggagactattactttagttatagtacactccaagatgtaccaattttcttgggccaagaatcccttaccatttgttaactagtgcttatagttatagccctttgatttgatgcttctcaagctttggctcatgaccggccttttcaagttgtaattggtttttgctctttttgcttatttttggtattggacaagtcgataatttgtcagacaaaagcactgcaaatattattcatatataagaaaacaataattcttaagtaaaataataataataataatcctgaaaaacagtcaaataaggaagaagaataagaatgagagcaaaggtttaagaagggtttaaggcggcgtcttcccttccctcgcttccattttatttttcctttctctctttcttctcacagtcacagtttaaccctatgaattatttccgatgcaacttcattaccatcatcatcttcaacttcgccgttgaatttcctcgaattttatctgtaaattaatgtccaacaccatacccccattaatctctgcaaatttcaccaccggagtcgaccattttccctcatttgaaaaacccacaagcttcttccgcggaaacccatcggatatatccacactaatgtggaaaaactatgccaagctagtttttaggagaaatcacaattctcgtctccgttctcagtcttcttctcattctctttgttctctgggaaagtcacaggaacctaattacaccgataaattcaagtttcggccctttgagctgattcccacttcgagtcatgtgccttgcggaatgggttttggtcgaaaagggaaaactttgttgggagacgatcctatgggaagattctgttttgattatttgagaaaccctactgggtttagtcccaaagggtatgcgagtgtggcggaggcggtttcttctacggacattgaagatgacacctcggccgatgacgaattttacgagctgttgcaagaaatgggcaaagaggagaagaggttggtcggacataggcggcggagaaggcagaggattgtaaccggaatggcgcttagaaggtatgatgctcttaagaaaaggcaagtgaagattgagacagaagcatgggaacaggcggctatggagtacaaggagcttttgatggacatgtgtaagcaaaagctagcaccaaatttgccatacatgaaatctttgttccttggttggttcgagcctttcagcaatgccatagagaaggaacacgaagcatgtcgactgggaaagaacaagactgcttatgcaccatattttcatcagttaccggcagaaatgatggcagttataacaatgcataagttgatagggttgttgatgactggatcagaacatggccatgccagggttgttaaggctgcgtgcgtcattggtgaggctattgagcaggaggtttgaactagtttttctctttttttctctgttggtgtcctgtttttgaaccttactacttgattaactaatcaatgcttaagtttcttatgccattgccattctgggcagcagtattttgttatatttttcttgctggaacataactatctcatggtagttcctacgataaatacattctctcccttgttggtttattttaataacagtatgcttatggtttaattcaattaaacttgttttggtctttgtttcatagtttgttttgtttgacttggatgtagaattaagggaatgtgaggcgcttctaaatgtcattttctctgtttctaagattggaaactatgttatagacttactgttgtttctaacttttcacagagtatacccttaggcttgttttgtcacactttgcacactacaatgttgtaatcttgctgccctttccttctctttattctaagagcagttctgatggatcgttacttcacgaatgtgtcaggtcaaaatccatagattcttggaaaaaagagacaagaaaaaggtgaaactccaagaaagtgaaggggagtctgactctaaggaagaagataagctaaagaaaaaagtcaccaatttgatgaaaaagcagaaattgcgagcactgagacaggtggtgaatggacaagatgcttcaaaaccctggggatatgcaatcaaggctaaggtctgtgttcagttaacaatttttggtgaaaagttaattgtttctggtttaaaagcagtatatacgctttttcaaatgttgatctttctctttgctagagagttccaagttgaaagtgtgtgggaacggtatatcatttataagaacataattatttattccactcatcaccaatttgttatgaaatagaattcccgatattccttaacatacaacctatttcactttctaaaccatattttcacattctaacatgatatcacgagccaaagagccaaaagagccaaacacaaattggttaaaaaagtggagccaaaagagttacttgtgattcggtagtagtgagccaaattaaccaattacgattgagtcattcaagattggtgaacaaaaatagtcacaatcaatcttgactggggatgttagagagtcccacattaaaagtgtgtgggaacttaataccatttataagagcatggattattcttctcaacaacaattgattttgagatggaactcatgcttcttatcatacaccccattctactttctaaatcacaagctaccgctcttttatattttcaggttggaactcgtctgattgaattgttgattcaaactgcttatatacaacctcgtggtgaacagttgggagatgaaccacctgatatacgaccagcatttgtgcacacatttatgacggttataaatgaggcaaagtaagattactcatttggtttagtgatagatatgtattccccaggttccctagaattctgcctctgaattttccatttttttttttcacagaaaatctggcagaagatgtggtatcattcaatgtgaccccctagttctcaaaggtcttgacaaaactgtaagtaaaccccatttgttagaaatatgaagttgcatactagctaaactacttgaatataggaaaatttatgtgtttcggcaaagaacatatcttatgggattcattgggttccttcttgttattctcttagcttgtagatcatggtttcgctaatgctctctttctggaactgaaataagtgctatttgtttaaacaggcacgacatatggtgatgccctatatgcctatgttggtacccccacttagatggacagggtatggtatttcatattactgctaccacatagctatattgtatttagtttttttgatctgaagctatattggatttaattacttatatttaatcagtacattgagtttagtttcagaaaatttctggaaacatcatattttcattaattgctgtaatcgtaggtttcttcttgattatcaatatgtcattttgtgaaaaaattttgaaccttgaagtatttaataatcaacacataaattgaattgtagcagaggctgttttagcatattccagtttgactggctgtaggtactataacatattccaaataaaatttcagcgaagtttgatcttacagttctaagcagcaacattcaagttcagaaagtgaaaattagcttccgtttccatgtctgatgttgtgggcaatatgcccaaaaatattaaaaatgacttttcaatagcttaaaatattttgtggaatatcacaacttcgtattttgtttcttctgctatagttttttttattctactagacatgattgtttttctttcccagttatgacaaaggtgggcacttgttcttaccatcctatattatgcgtactcatggagtgagacaacagcgtgaagctgtcaaaagggtcccaaagaagcaactggaaccagtttttgaggtttgtaaatccaagtgctgcattgctttcacgcacttctgaaaatcccttaaaagtaaatgaacaaattcagtagtgttatctctttttcttactatctgttaggccttggatacactcgggaatactagatggaggattaacaaaagggttcttaatgttgtggagagaatatgggctagcggaggctgtcttgctgatttggtggaccggaatgatgtaattttctctatattatcagtgtttctttgtttctctagtatttagtagctcagctacatccgaaggtctttatattactgcaggtcgttgaatatgaaactctcctttcatttaacattgtacattgcaggttttgttacctgagaagccagattctgaagatgaagcactgataaagaaatggaaatgggatgttaggtctgttaaaaaagagaatagagagagatactctcagcggtgcgacatagaacttaaacttgcggtaagagctattttacttttctagactgtaactgcaattttttaaaaggaattaatcgaaattcattttactgttgagcaggtggcacgaaaaatgaaggatgaagaaggtttcttctatccacacaatgttgactttcgaggccgtgcatatcccatgcacccatacttaaatcatcttggttcagatctgtgccgaggtattttggagtttgccgagggacgtcctttgggaaaatcaggcttgcgctggctgaaaatacacttagctaacttatatgctggcggtgtcgacaagttatctcttgagggtcgattagcatttacggagaatcatttggacgaaatatttgattctgcagacagaccattagaaggaaatcaatggtggttgagtgcagaagatcctttccagtgcttagctgtatgcattaaccttgctgaagctatgagaagctcttcacctgaaacttttatttcacatatccatgtgcaccaggtatgcgtctacagtattttaggtggtatttttttgaactctttgttgattgcgctagaaacttttcttgattcttcaaacacagtgattaacattgataagcagtctaaaaatccctaagagtgtctgagtcatgttcataaagctagaagagatctggcacttgttcatgcttgaatgtcttagcttgtgttttacagtccctgaactcttgggggctaaaattttatggttttccaatactcatatcaaataacatgtaataactagttttatgtgacctgttcaatgctatataagttatttgtggataaatatatttttttaataatttatttagtttgtttttttatgttagagtttattttggaaaaaggaaatagtgtttttttaattcaattaattttgatgaaaactgggaaaaaaaattgatgaaacctgaattcaatggtagtattttgtactgatttgtagaatataggaatttattttggtaatattcaaataataagggcctgagtgggttccaaagctgaatacagggatgaaaaattacaaatttcctttgttttttataatattttcacccttttttttggtcatgtaggatggttcttgcaacggtttacaacactatgctgcccttggaagagataaggtaatctcaaagaaattaggaaaacttaatatagtttttgagcatacattaaatgtttagttgctcactttatactgcattttatagtagaacataatgttatgatgggaaagaatataatgcttccaacaattagggcgggtgagcgactgctggtggattttaataagtttccagtgtgtctagctcttgatgaactttcatgcagtttgcctagttttgttagcttgttgctactcgagatggtagtagtatgcattaataaaattctaaacttagatagccacttgaggctagctcaagtggccataggggattattggggggaggggtcgtgggattgaatcccatcttgaagacacttcaatcaaaaaaagaaaaaaaaaagaaaaagaaaatctaaacctagatggatgtttgagaaaaaataagattgatagcttttgaaaccttgcatcttaattgtcacctttttacacagtgatcaaatttatggataaaaatgacatttttcattcatcaattggaataaatacatacttacattctttgtcagcagtatctatcctaatatttggtgtgactgaaatggacttgccatattttgttgggagctactccccctctctttctttctttctcctcttttatgaaattttagtagctcaaagtagcgattcttccttttaagacgtctgttctttatctgattgaaatatct

SEQ ID NO: 27246 - DNA, 3637 bp, Cannabis sativa
aaatgacaaaatgaaccttgtattttctaaaatagtacaaataggaccctgaattgatattttatcataataaaatttaataataatccgatctaaatattttataacaaaacagtttacattttctgtgacaatcaaataaaaaataataaataaataaataaatagagctcgtgactaaaaattacctgtacttacaaaatacttatgttgtgactatgtacttacaaaatacttatgttgtgactaaaaacttatcactacatgataattattttcctagtgccatcatcgtggtatgacatctgaaattggcaaataattagctgaacaacttgcttgttgagatgtggatgtgtgttctacacttgcaccacttctcacagaaaaagctggtcttgtaggagtaccaattgctttggtttcatctttaagcattgaatatatttccagcatagtaggcctattttcaggactttcttggacacataatagagctacttgtaagcatttatatagtttacaaggcgaagaagaatcgtctagtgatggatcaaaaaactccactcctttgccaacttcccacatttgataagcctagaataattgtatgttactcatgaatgtcaaattgatcaaattttttagaatatgataggcaataaaatgtcttaaattgacttacatagtctagaagatgcaagttttcacttggtccatagtaatgcctgctcctctttccacttatgatttgcaaaagcaaaaccccaaagctgtagacatcatacttcatggagtatgtacctttttttacatattcaggtggaacatagccgctgtattttgcatacatgaagcatttagcaaaaacaaaaacttgtaagatattctgttcatgaagtatatctatctatatacttactatgttccaacgattcggtctgtgttggcttcaagctcatcttttctgaagagcctagccattccaaaatctgatatctttggattcatgttattgtccaacaaaacgttgctagctttcaaatcgcggtgtattatggtgaagtttgagtattcttgaagatatagaagcccttgggttatcccttcaataatgtgaaccctcttttcccaatctaattggtggtgtcgaataggatctgcaagataactacattcataagaaaacaagtaaaagtttaagctttttgcagttttagaaacttgtttggtttggtattttttcttgtagcttcatcatttatcagaacatgagatattggttattggaaaaatgtcaagcctattacaactatagaataaaaaagcagtaccagcttaagtataaaatcttaaggagtatgtgaaaatatgcatacctaatatgtagaagtctaaactatggtttggcatatattcatatatcaacatcttctcttctctctgaatgcaatatcccagtactcttgttagattaacatgttgtagtcttcattttcaaattcctcaactccttgattcgacgtctttgatagcctctttactgcaatttcatgccctcttggtagtatcccctagtaaaagaaaataagaagaactttctatacattaattatgacaagaaaagtaaaaaaaaatgatatgcataacaaaactttaatattcttttgctatcaccctatttaatattgtccttattgttgaaacaaaatttttaccttgtaaacaatgccgaaacccccttcaccaagcttgttattatttgagaagttatttgtggcttctttgattttattaaaactgaacacttgcagattgggagcattactttcattgttttcagcttctgatgtgttagtattcctacatgagtataaatagtctaatcctgccatccatgtaagatgaatataagagattgcacaaaatgatcagtgccccaaattacaaacatagaattacctttcgatttcagtactttgcgtcggagtaagtagcaaattatgagggtgaggggtgccaagattaaagcaattgggagtatgattattagtaatgacttcctattgttatcctgatcaatctcttccccatgagctgcaatttagttttcaaaacttcattagaatctctaatcatatcagcagttcatggactttattatactgctatggtaataaaaatataactgagaataccaaagaatgactgtgatctactctgtcagaactgcatgtgttgtgttgccttccatatattaagttatcaaaacatctgtaatgattgggatagactaatgggactagcttagctttaataacacatcatttcaacccttatataaagttaaaatgttgtctttaattaagataaaaaagaaaaactttagataacatattaaggtgaaaaaggcagaatctagtcagtagcttacatcttcaagcctattaagaatcttctatggatacaaataaaagaggaattcagtataactagtgagtcagatgacatcctccaagatggttgagtgtttatatttctgtgacagttttgttcaaaggaagcaattaatttaaccaagttccaacatttattaattcttcaagtttttcctgtactaacaaattaataaaaactcaagtccagcaggaacagagagagaaagatcatttttcatgaatttcaaacaatattcaaacatgatgaggcaataatataacaaatttggccttaagaactaatcatactgaaaaagcttacctgcccgagaaagcacccaattgtcatcattgatgacctgaaacacattgtaaccaagcaatttcttctccttggcataagcaatcttagtcttgacagcctcaacatcatcaaaaccaatccaactcgctcctactacacaataattcacaacataagtagcattataaactatattagttccataagtccgagtgttccacttgatatactgatagctcactgaaccatcttgtgtcacggccagaccagatgccggcgaaccaactccattgtctccaggattcaccagggtccatgcatagccatgaaaaggcaaccccaaaaccagtttgtcagaaggaaatcctctgctcaaccatttccttataccataatctgtgtttacattactattggggtcataaagagcagcatgagccccagtaacattttccttgatagacaaatgatagtcataagccacaacatgtccccaatccaaattcctcactaaggactcaatagggtaatttaatgatttaccatattcaggcacatacctaagagccattgtaagcaacaatttcgactgagttgagttccttgactcggactccacagctgctctccactcgtctaataaaattcccatgttagacatgtctgaagctgatctgggatacagccataacaagtcaaggccttcaaatccatagattctggctgttttgattgatgactcaataaaggcccttctgtttgaagttttttctaacatggcagagaacacagagtagtttcccttttcaccaactattgatttattggtctcagctaggccgttccagatggagagaagggttttgattgaagggtttcctcgtttgactatggt

SEQ ID NO: 27247 - DNA, 2008 bp, Cannabis sativa
attaaaatatcaaaatggcttaaatccaatcttctcagtaacaattacagaaactacacaagagcaatggtgagatatggttttccaaccaaaatgagctttagtgttagtaaacatatcatttcattcttcattaataaaaatatggtctatcttaaaataaatcatacgagtcccttcttgattattagtccaagtgaaaatagagccaattttaacaagagccttaacatgagattgagccaaccaattagacgaattaaccatgtcattaagagagataggattcccacatgatctatcatcaatgttaaagataacattaaagtctccaagcaataaccaagatttcataggaaatctcaaatttaaaaggtccatccacatgcttttcctctcatctatagtgttaaaactataaataaaagtgacacaaaaagtagcatcatgactactcgtatataagagtcattaatccgtgggggaagacccaatggagacttgatatatggagatgttacaaccgcaaccctaaagaaaagccaacatcaaattaaaaaaataagagattagagagagagagagattaaaatagataaataatagagagagagagagagattgtcatggcagtggtcgttttggggtagcagtgatctgctaccaactctatggcaaatatcgtggtcgaggctactatgatgagggtatgcgagagagaagagatatatatatatatatagagaaatggtttgtgtgtgtgagggagtttgtggaattgaaggggtagttgtgtgagagttaaggtttttaagggtatttggccaaagcccataattagtttttttttcttcataaatgtattttttgcatcagttatgctctgacgcaagttagcatcggtgcacaatcgatgcaaatgagtgccaaatccgaagcaaactcaatgtctgtgctcaactgatgcaaattttttccattacttttttgcgtcaattttataattttgtcgatgttaaaaatggtttttatagtagtgccaccaagaagaacaactattagctataaatgggtgtacagaatcatggaaaatccagatgaaacaatcaacaagtacagagccagattagtagcaaaagaaattcacaaacaacctgaatttgatttcagtgaaacattcagtttagtggtgaaacctatcactattagagtagtgctgacattggatcttcatcaaagatcaaaattcaacaagatgtcaataatacttttctaaatggggttctgcaagaagtttatatgctataaccgccaaaatttaaaattgatactcctactcctatggtctgcaaattgcagattgctgcttatagcctaaagacaagctgctcaagcttgctttgaaagactttattcttcactcttaacctatagctttttttttcatcaaattcttatcattatctttttgttcatcacaccaacaactcaattacacccatcattgtttatgttaatgatattcttatcactgaaagtaattagaaattcatttgatcaacttattgtcaatttgaactctgaattttctcttaagaaccttggtaagttgaattatttccttgaaattaaagtaaagtataatgtttgatggaattcatctatctcagaggaaataaatcagagatctattatgtaaaacaaagatgcaagggtcaagtcatgctcaacagaagtagtctcaaacttttagtctcaaacttttttgcttatgaaagtgatcatgcttccttcttcaagtacattgggttgctgccaagactaaggtacctcagggggacaatgagctttggattccacatgaagaaacctcaacaattctagcttactaccttttgtgatgcaaactgcgctgcaaactcaaatgatagaagatcgacttcagggtatactatctgtcttgggtctaatcttgttgcatatcttgtaagaagcagcatacaatgtc

SEQ ID NO: 27248 - DNA, 2745 bp, Cannabis sativa
gcgtgaagaacttccttaaatttacacttacatttacacaacacttttatcagaggtagaaatactaagtgatccaagcaaatcttatcagatactaatttttcagcaaacaacatgactgtatcaaattcagcttgaacgagagtccttacaatcaaatcttcccaaaaggacccatctacgtaaaccccaacctgatacacgaaactcttgacaatcccgagtgcatcctcaatttgaccatcctttattacacctggaatgatggtgagcatagttacatgattaggataaagagattttttcatctgatggaaaaaccaaaatgcatcattaactctgtttgtcttacttaatccagaaatgatagtattataagtgaagatgtcaggatgacagttcatcattgacattttagaaagcatttccgaaactaatggcacctcatcattcttaaagaggtaatccagtatagagttaaaagttattgtgtttggaggacaaccaaggacttccatatcactcaaaagttttagagcctcatccaatctattttcccttaatagtcccccaatcaaggtgttgtaggtgtacaaatttggtgagatccccttcttcttcatcacacccaaagtatcaaatgctttgtcaatactgcctgctttgcataaagcatcaataagaatggtgaacataactacatcaggtacataaccatcagtttccatttcatcccaaatttcttttacagtttccaatcctccacgatcaccaaacttgtccaacaaactaatgtaagttacacggtcgggtttgtgactgctagctttcatctttacaaacaatgccttcgctttatcaagtttaccagagttacaaagcgcatcaatgagcccattataagtaataacatctggctcgcatccctcttcatccattctcttcaatagaccataagcctcatcaatctttccagccattccaagaactctaatgcatatggtaaacgtatatatattaggcatcaatcccaaatgtttcaactcttctaacaaaaccattacagtttgagcgtcctttcgctttccaaatgccaccataagtgctgaataagtcttcaagtctggcttcatcccttctatgaccattctcttgtaaacctccaaagcctccctacaaaatcctgactgaagaagcaaatagatcaacccattatatgaatacgcattcaaaataaacccagcctttttcatcttctcaagtgcaatgggtgcttgacgaattccaccccttatttgaagacttctaaaaatagcaagataagtgttcagatttctgtacacaattttcttttgcatgaaatcaaaaacaacagccatatcctccaccctcttgtgagtcatcaagacttcaagcatgtaattgcacgtttcagcagtgtgaacaacattcggtaacccagcaacaaccatgaaatatgaaaaagcagaatttgggtccttaatagacttaagaacccttataacctcttctgaaggtttcacagctttcttcttcactttggcaagctccatcccttccttggggactttcataacaaaccaacataagcccattcgttttctctgcactttccatacttttcccaagtgcccatatgtgcaaaactttaaatttccaaagcttcttcctttaaatgacccactatgactcggagtagctattagggtttctataaaatcaaaattacaacggaaactactacagtacgtactcgaagagcaaagtgtcaacagacccatcgaaataactagctttgatcacaataaagtcggcaaaagatggcaattttcacacactgaagaaatgtctacatgcgtcgttaaagtttgtcaaattgcgtctgagataaaaaaaaaaagagggaaattcataagttcataaggtgaaaaaaaaaatgaaagcgaaacactaatgattttatgtacacaggctttcttttcactttaaaattactaatgaatgtaccactaaagtagtaaggtttcatttgacataagggattcgaaagtcgaaagaatagcaaaaattgtagggttttttcagcaatcccaattgaaacacagaagaagaaagcaataccataaaaaagagtaggagcgaagcgccgtcattgagtgggtggcttaacagggtggctccaccatgatcaccaccgcttaccgcttaccggagcttttatttcaacattttaggctgaccttatcttctttcacgttggccctacatagcaatataaacaattaactactgaaacttgttcgaaagaaggaaaaaagaacaataactactgaaaacttcacggggcgtttggtataggttaaaaatagtctgattatgggaaatattatgaagaagaatatgattgaataataaggggttaaaaataatctgattaagggaaatattattattgtgtttggttatccgtggaaatgtttaattagattataaaatggagataaggttcataacttcattatcttagcatgttactagtatagtagaaggctatgtagcagtatcaataaaagcatttgaaaagtgcgtaaaattttaaaacatatatctaaagctaaattgaattatagcacttaatgatccatgaaaaatacaccttaattacttgaaaaaatagaggcatttgggtatcctattgagcatcctatcaatggttgaattggg

SEQ ID NO: 27249 - DNA, 1494 bp, Cannabis sativa
cgtgggtgtaagggtccaatggagacttaaggtggggatgttacaacaaatgagtacagttacctgaaagatgaaatttaaggattggttagaaatatgcatttagccaattgggtgcgaatacccgtcatatatctcggttaggagtagcacatggacaacttttcattccttgatagtagagaacaataaatcctcctcagggagtaggttatcctcaagctctaggaacacaagctccatgcatccaagctccaagcatacatgctcctcagaagggtacctaatgcccaggtgcctagacctgtcatggctcccagaccaagaaatctgtatccacccaaaattgctctacccattgtagatggccttgtggcaaccatatccggaggctcacataatttcaaaattactaagaatgctaaaaaaaaggatatctaaatgaactagattaagaagaaatatgcactctcgtacaaatacatgctcatcgtccacgaatgatcctttcacagaaaaagatgccaagcatgtgcatttttttcataatgatccactagtttgaagctcaaattgaaaataaaaaggtgtcccaaattctagtggataatggaagttcggttagcattctctttaaaaatgctttccatgtgattgggttagtggaaaataatttaatgccgtatccaattcaactccaaggctttaatggagaatctctattaccaatgggaaagatatagcttctagtcacatcaagtggaggagcatccggaagcaacacgacattcgccttcaaatactacacatttgtggtagtggattgccccactgattataatgttatacttggacaacctgccctagttgaagttctcaagcatgagaatataaagggagatcaaaaaagtgcgaggaaatgttataatatctctgctaagacagtcttcatggtctgagaagagaagcaagaagatcccagagcacccatctagccaacactggggtaattcaggaagaagatgagttagaccctcgggtaggggtagaaagagtaattaaaccaatggaggaggtggaagcagtgtgcatcaatgaagaagatcataataaggtcatcaaggtaggaagaaatctacctccagccattaaagagaaaattgtgtccatagtaaagaataattgtgatgtactagcatggagccattttgatatgaccagaatcagtcctcacgtgatctgccacactttgaacatcgatgaaaaaacagatctagtttgtcagaagagaagaccattagatcttgtttgagcagaagtagtgaagacagaagtaaaaaattaacttccatagagttcttccgggaagccttatatctggtttggcttgccaatctggtattgttcccaaagcctaatggaacttggaggatgtgtatcgacttcacggacctgagccattgtaaaaccatttagagatgttgctcgtgctct

SEQ ID NO: 27250 - DNA, 2343 bp, Cannabis sativa
ttttaaaaaaaaaaaattgaattgctttcccaacgacattaaaatgtcgttattgataccttcatttttaatgaggacttttaggcgttggtaatagtggcgttggtattgcccataattcttgtagtgttcataggagtccaaattcataattctccatataaattcaaaagtacttattgataatagaaaaataaaaataaaaatatatgtaacatttatctattttatgtgtggcaaattatgtcacagagttgtgtcttgtgtctgtgttaggacaggttgttagatagttagtaaggatggtagttaattcagttaactacctaaccacctattgttttatgtggttaattgctttgttcattattcgtgtgtatataaacttataaatgctcagattgatcaataagagactcttttctctttctttctttctcattctttcttcatcttcttcctctatttttgttctaaagcaactatattaaagagattgaatacctctcacatggtatcagagccatttttgccattaacgacgaacatggcttttgttgatcctggtaactcaaatcattaatctgcatcacaaggaactcaatttgctacctcaagaaatcgcaccagaactcaggatgacacacaactcctgtttacttcaaccacactgtctcgatcaagctccatgatcacaatttcctcttgtggaagcaacagattctagcagccattcgtggtaatcgattacagaaattcatccaggatgttctacctcctctataatttctcaatgatgtcgatcgtgctgctcacaggttcaatcctgaatttgtggattgtgaggtccaagatcaactccttgtttcttggcttctctcctccatgactgagagccttctaactcgaatggtgggttgtaacttagctcgccaaatttggaaagctcttgagcaacactttacactaaatgtctcatctaaaattcttgaattcattgaattggacctctactttattcgtgagaagatccttcagctactggttcaagtaaaacatgttccagcttttgatcagattgttgatggtctaactaagcctatctcaagttaactgttctcatctttttgacacaaacttaccattggtgatcctacctatgctaagtttgagggggtgtgttaggacagcttgttagatagttagttaggatagtagttaattcagataactacctaaccacctattatttcacgtggttaatttttttgttcattactcgtgtgtatataaacttgtaaatgctcagattgatcaataagagatccttttctctctctttctttctcattgcctttcttcttcttttttcatcttcttcctctgttttgttcttctgcaactatatcaaagaggttgaatacctctcacagtctagagtctagagtggttaacgttaagtattttacgttttgtactgttactgatagtccatatgtcagcaaaaagatattttaaatttttagttgtctagctggttacaatagtctatttcgagttttattttttagctaggtataaataacatttttttgtcattgttttgactaacctttagattacagagcataatgaatcttggatcgatcgaatatctctttcttcttctctctttgtttgcatatggttttatactcttgccggaactccattgaagggtgaagttcaaagtaagggttaagactactgcagcagttgaagggagttcaaagtggtgcttagcaattgcacaaggggatcttgtgcataaccaagggatttaatttggtcgaatcatacattggtttaatttcggttctaaaattgttccattttttttttaagaatatgtacatgtgatactaacaaaagataatcgagtccttttaaaagagtagtagaagattctatattgacatatctaattaaaattactaaaaccatgagtctggaaaggtcgatcggtcggacccagtttgatgtgatcaacaacacatcactatttacttttacccattttttcaggccttaatcatcacacccatgcatcaatatgctctatacttttatttgcatataccaatttttaatgaatatatattcaactaataaatcaatattgtcttatatatattatatataacataataaaactatatatataagaactaaacatcctaataaagagaatgaaattttttccaaataaataagttattctatttatttgaagaacatgcacccactaatttatttacttatgcttattttttcaggcctcaatcatcacatgatcatgtacag

SEQ ID NO: 27251 - DNA, 2992 bp, Cannabis sativa
cattgttctagtttgatgcatgcatgtcgattttggtggccatgtgattatgtttcaattactattttagtcatgtaatgtgctacaagaaatatgaatgtaggtttgtgtggatcttaattcacattattattattttttatttcattaattaaatttttatacctttgcgtgggcaaatatgcaccaagtatttttggtttgtaagtttttgatcttgaattaataaaaagtgtgaatattttacttgtagttattttcaccagtattttttggtccttatacatatattataaaatgtatagaaacattattacatataaatttatacataaagtcaaatagggtttttttccaatgaaataataccaatgtctttagtttttgttttgtttttaattttttttttataaataaatttcaatcacacactcatagcattgatcaaattaccaaaattttatcatgtaattatttatttatttggataaattagatatgtgtattgcaccaaacaatcatttacatttatcctacacttcttgaaaaaagccaaccaaacacttttaaagtggagtaatctctctgtttgtggaataacttgttcgaaggagtatcatgtgctataactggggtaggaagtttattgatgacatagcaagttgttctaataacaacttcatcctagaaggagagaggcatggaggtttgtgcaagtaaagaccagtttctattaagtgcctgtgttttctctaaacaacaccattttattgatgagtagtggaacaagacactctgagttattccatttttaattagataaggttctaaaacttgaaattcaccctccagttagattggacagatagaatgggaaaattcatctcttttctatttgtgttatgaagtttatgaatgttggtaaagcttcaaatttagctttgaggagaaatactcatgtgtaccttgaatagacatttataaagtgaaaatagtatctatatccataaaaggatatcataggtaagggtccccaaatattactatgcataagttgaagtggttatgtaaaaatagtttgggatatttgaaaaggaaatttgtgaattttaccctcacaacaagcatcacaaaagtcactcactgttttgttatttctttgagaaatgttacatttggccattatggcagttacaactttgatagaaggtttagcaagctttttatgtcacaaagaaaaagaagtacattgagaattagaattgcaattgacattacaagtccgaacattatacaaagagtttgaagcagtcattttatttggagaggacatattgagttgagttggatctatgacataaattccatgcctaagatggccttccagaattgtctccttcgaaacctagtctttgataaagcatttatcaggatggaatttaaagaatgcattattgtcaccagcaaattgagagacagatataagattcttttggatatgtgatacgtgcaacattgtatttagaaataaaggtttgtgtgattttgtagtgaaagagggtattaccaatattttggatagggaagccaacaccgtcacccatatgcacctgttcttgtccaaagtattgctgcttctgtgttaaattagctgcattagcagtatagtgagaagtacgtagctctagaatctgggtaccaagcttcatccactacactgtcagctgtagcaatgtcagcagactgtttgggaatgtttgctacttctgttctaggaaaattatagttaaatctttggcaacatcttgctactgtgtgaccagttcttgaacagagttgacacactggtttggaggcagtggtctgagattgattgagagagggattgctatgaggttggccacgaccttgactagtgttggttggagggaaaatatttgattgaaacaacatatatggattccaagaacctctaccagtattgttatgatcattcaaaagtctggcatttgcactgtgagagaaatatggagaactttgtagtttttgtctaaaaccacaattagtagcaaggttaatagaatcaagttctttattatgagtatccattctatgttcttaggataagagtaatgtttcaatttctgcaacatagtactcatcatttctagaattaacagaaatcacaaaggtatcataaattgagggcaatcctttaaagatagctgaaacatgttctttggtggaaatttcgtggccaacagaaccaagatgacccacaaaagtcttgattcgaagtaagtattcattgacagaaaggcaacctttcttgtaattttgaagttgagtagtataaaaatcgattttagctgaggtttgagtaacaaaatatacctctagtattttctagatctgagcagatgtttcagcaccaacaattcgagttagaacaccatcagacatggaggacaacaaccacgagtacataagttgatcttgtacttcccagtctgtgaattgaggattgatgtggtgtcgcacttcatattcttgagtaagatattttcttggaggttgatgagtgtctaagatgaactgttggagatgatgacctctaatggcagaaaaaacttgaggacgccatagtaggaaattgttatcatcaagcttcactgaaactttatgagagaaaacaacaagagtgaaagtggtagtggatgaagatgccattgcaggaagaaaagaaataaaaaacagagtagaagaacgaaaggaagagaggtgtataacaatggcggaagtgaaaaattactatgacaccatgctaaaatagattagtaggatcataatcccacccataacttgattagtccataatataaatataaaccttaattatttaccattaggcttattgagatattacaaagagactttgtaaggtctaattaataaataagttaaatgacaaatattaaataaatagttttga

SEQ ID NO: 27252 - DNA, 1490 bp, Cannabis sativa
ttccctaaaatctacttggactccctaccaatgttcaaggttgaaatatttgatccctacattgatttcaaagtcaacaaaatgggtcctatcctaccacacaaagtggattagatagaagcccatttataaggaaggacaacttcaactactccccatctctccttgtgtccttgttctctcttttgttaataaaaatcaattcaaagtttatttgtcacattttaatatgagtgatgatacattacattttctttaaaaagatagaaatttttattgatctcacttttaatcaactgcaatgaattaattaaagcgattaaaaataattaataataataattaagcaataagatcacaaatttattatagagattcgacctcgtgatagtggtaatagtctactttcttttttatttatattaacctgtggaaaagaaatcagaagttcttgatcttcctcgaaagcttttataaaaattttagcagcgtaagtactctttcgaatgaataattctccccttggatagcaaaatgaccccactattataggaaataattacatcaataagatttcccaatataattaaagaataaaaagaaaaactatttacttccctaaattacatcatttacgtgtggaaattctatcaaaataggaatttaattgataaataaaagaaaaaagttctctagatttcaccgtcgcgttcatcctaagcggcctacccggagtgatctagaaattgaccctagacggatgatacagtttaccctgcatgacacattcatcctactctttaaataacttcctgatgataactctttagacagaatgttgatgagaatttcatccgcccagacccaaggacaacctacatgtcacctgagtaagcattacatcacttgtgcagatttccaggataacaatttctattaataggtagataatattctattacatgctgatatatcgctcaaatagcataatcaacaagataggcaaatcgtgttgtttataaaaaataaaaataaaaattctaatagcgcattcaactaaaagaccaataagtcgctggtgttgaagcatcaaagaactgcgaagaatgctagatctccaatccaaatgaggatatgactaatcaaacctatcaacgactagtagtcaaagatcttccaataaaaattaggtaataacaaccatattattcaatctaaaataaaagaaaataaccaaatgacgaaccatagcgataacaatcgtaacaaacaattgtatcataaactatggggccaataaaaaatgtgagaatctccagatctgaacatggacaaaaataatcgtgctactaatacaaatatgctctgagccaattgagattctcccaatgtctcaaaaaaacaagactaaaatctcctaccatgaaataacagaaccctactaccataacaatagtaaggtggtgtatcaacaccattattgataaaac

SEQ ID NO: 27253 - DNA, 2074 bp, Cannabis sativa
ggaagttcttacaatatttcaatcacagcagaatcgagaaaaaaaaagtatcattgttgcgaccacagaccaaaaacgtaagcagcagcatcaaaattatcggagtacagcttggaacagttaagaatttaatcaatactcaatgtttggagactagactagaccagatgcaaatgcaaatgcaattacaaagatgaatctagtatccaatcaaaataagtttagatgtacaatgttgtattccaaaccaaaccatagctgttagctagctctttatattatgtgatgtttattatttatttaatttcatgaacaaaaagcgattcaacctgaacaactggataataaattttgcaattaaaacagagttttggccacatatgactgagcaaggatagatatgaagttgtcatttaccctgtagatataaaaagagccttaaagtgaccaattatttttatctcctccatgaacacccaaaaatacattattactgatgcatgacctcaaagttcaacttttgctagagctcattgtgagtcacttacacttcagcatatactaagatttctatttttttgtcttttggcatttctcaggttcatgttctcatttctatgagattaacatgtttctttactttgcatttcatcccattcattaatacagatttcgtttccattttttcctttaaataaataaaaaatcctcaatgatagtaatcagtacagttgtgttttatagaagacttacccgaacaaatgttccattattagccatggaagctggaggcttaagaaagagttttatggctggaaacaagatatgctggattgaccactcacgctgggcccatgcagtttctgcctctgaaagtaatccattgtcaatttcagttgtcatgatggcattatcccctgtgaaaacaatcaatttatagtatatagttagaggcaaaatgaagctgcatgattccccacataaaaatgatattaatatcttctacatgctgacatttgacaactaatattaatcttaaattgtagtcaagcaaaagaaagataaccaagcagtcagaaaaagaaatttaaacatacgaatgatgcctaacaacacagccagaaaccactcctcagctgtcgtcatgccttgaggcgcaacaaaaaaatatttgattatccccaaaatatttaatagtatgtcccatttacaaatgtttatgcagctttagggaagaacttttaagttttgatctagaattaagtgaagaaacactgcaatatctctactcaacataactatcaatcaagtccacatttctcagaagatgcattccaatttattaaccattaagttaaacccaatttccacacaataccgccgccaaacccacaaagaagtttttgtagcaatttagcagctataagtattgcaaagatttagtcctttatgattgtaaaagccatgctgaaatcgattgacatttcttaatagagaagatagaaaaaggaataatctcattagtgcatttgttccaagtgccttacaaacagctaacatcctcaccaaagctctactaaaaacatttatttctagatcaaatgaagatttcctttataaagggatcttatctcagttctatggcagctttgtctctttcttttggtattataaatcaaaaacatatattttacaggtacgtttaatttatgaaattctttagaaaagaaaacagcatggtgaaaatagtacctcttatttccatttgtaataagaaaatgaattattaacaacaaaccaatgagcattccagtaagaactacaaactaatgagcttcaacggctttacttatcatttttccgtagctaaaagaacctctgaatcatcatccattagtattttttatacatttttacaaaagaaacaattacaaaataaaaaaataaaaaataaagctgataagatgttgaaatattagttaataaaggataacaacattaccgtaggaagttatgaatgaaacgcataaaggtgataagaaatcctaaaatattttccttaaaagtataatta

SEQ ID NO: 27254 - DNA, 2309 bp, Cannabis sativa
acccgtagttggtgttgggatcgagtgtattaaaaatatattataattttacacaatcaattaatacaagtcaataccaaacattttgtaaggagaatggggagagcataaacgaaaaatagagacgaggttaagaggtgaattatccgcttattatcatgtagcatactcatttgggctattgtatttgcatttaatcaagtttcttatttattatttttttaaaaaaaaacaaacaaaaaagtattagacatgccattaaattatactttttttttctttctttattttttggaatctgtatttggcagatgaagatgataattaatcagagttgatcagtgttaaggcatgcccatttgtactataccatgcataattgtcataatgaattccaattttcgaaaacatatgaaattaattcactcatcacaattattacaaaagtcataacattaactaaaccaaaaattatgttttttttcttcattactgagacactgacacagaatcaaacactgctcctctgatttcttataatatataactcattaattggcattaaaaaaaatcttttaattcaacagtttgtttttttgtttggaagattaattcaacaatttctgtttcaatgaaaaatcatgaataattagttaggacaaaatttgtgattaataataaaaaattaagagtacgtaattataaattattatttttatattgtaattaaaaaattcgttactaaaagtattagtcacaaaaatcacaatttattgttgctaaatgtgttcttagtcacgctacttgttgtgaataaaagtaaatttaatgacaacatgcatacaaatattatgttttagtttcaagtaagtttttgttgtaattaaaaattatattttattacaaaaaatttatattatgagtagtagtgaccaaatgaaacttattaatatgtacacttattaataactgccaattactcttcttcatactcatttaattttaatgagcattggtatctggtgtgttgtaaataattaacttacaataattattaaattaattatgtaaaattgaatacacaatagttattttataataattattaaattaattatgtgatattacatacttattttactactaatgattatatgatataactaggggtgtttacagattgattaggttcgaatttttaattttttcaaaccaaatcagtacatagttttctaaaaattcaaaaccaaattaaactaatccactcaaaaacgaaatattttggttcaaaattatgttttttagttattctaattttttggcagtaattattgttcattttttcagtatttttttttttttattttaataagtttataatatataatgataataaaaaaatattatcataataatattaagtcaatatcaatattctacctaaacttgttcccaaatatcaacattttatctaaaaaaaatatattacgtatataaaataattatacggattgatttggtttgagcagctattgacatttctaaaatcgtgactgaaccaagaaattttaaacggtctggattgaccaaatcgttcgcaccagattcatttggttcggtctcaaatggtttggtccatagtttgaaaccgcagattattgtagattatatgaacacccttatatatacctcggtatagtactatattggttctattgttacaacatctctaaccatactaaccatctttttccatctcactgttggaaagtatatttaactatgatcttatttttactaaacaagtatgttaattattactaatctaacatcctaaatatagaactttaaaacaattcaaatcaaacacataaataaaaatttgagaaaattttacaatgattgcagcgaaattaatgtctcctcccgttcagcgacatacccatttgtactaccataattgtcataatgaattacaattttcgaaaatatatgaaattaattacgttatgtacactcgtggatttcctgaaatgctaggaagtattgattgtatgtattggaggtggaagaattgtcctattgctgggcaatgtttatattctgatcacattcatgagccaacaatcattttggaagctattgcttcttatgatcttttgatatgacatctattttttagtttaccaaaatctccacttgttagagcatctccaaggagacattaaatttggtattacactatcactaaatttggtgtcaaaaaatatttccactccaaccacaacactaaaatttacaccaaaaaa

SEQ ID NO: 27255 - DNA, 19326 bp, Cannabis sativa
gataaattataatttagtttttttatacaacaatatataaaagaatgtcaaaaataaaacttatgtattcatttcaatgtattttttttattacatatatgagtaaaattcattattttattgattaattgaatttatattggaagaatgaaatatttgtgtggttacatttatttatatttatgttgtaatataaagtaaaagactaaataaattatgcaatctcacattatttaaaaaatattaaatatgatgattttaagactatttaaataagagattacataattgaaaaagacttaaatagatttataggtactactaatgataacaaaatgtcttttttttttgtagcccattacttgagaattccaaacttaacttagagtaatcttgggaatgagtgacctaactttctctaaagtaagccagaaaaactcgtgttggtttacaggaccgatcatcattcaagaatttttttttgaagaagaagcgttatattaaacaaacgaactagttagaccgtaaggtcattacaaattaggttcatcattcaagaaaatagataaagaaacgtactcctgtataagagcgagtcataattttgtgggtgtaagagtccaaaaaaacttgaaagaggggcattacataccccaattgtatctacaaggccgactctgacttaaaataggttataggtaaaaaaaaaattaaaaatttgggcccttacatattttttaaaagattttttttatttgagcctttaaaataagtgagttttaagcgcgggtctaactcgtctatgcctaaggccgaccctgtgtatctaagtgtcgctttgcaagtaaatttttcttaattaatcatatttctttatattattttttctcttaaagttttttccattagatttactgaagagattatttttctaaaaaataaataaaataattcgttcattcaccaattaatttatttatatttatatgttataaaataaaatactatttttagcatttgtaacttacacattacatcattttttgcaattttatttattatttccataaaaacacaaatcacaaaatccaaatacatttctcattctcaatatctctatatttctatctttcctacattttgattccttaaataattttgtcttctttacacataatcttataaagtttattattttccccccttttccaaatttatcaaaggcaataactatggcatgcatacacattaataaattaaataacaagatttgaaaacatcttttaaccattaaatgttatttcccatgacatggttaaaatttaaaattatattgttagagaaaaaacaaacaaaaacaataaaacaaaaaatatgtgatcccttaagaatggaatgattccttaccaagatgtatattctttctaattattaataacgacattagaagcattattaaaacaaagtgtgtttgttttataatctttttggtaacaagtccaactcatatacatagaacaaagaagatcttctttttacatttattattatttaattaaaggtgtgctattctctttgtatattatatatacacaaataaacaaaattaaccaactaatttgcataatatattgttatcaaaaaaattaaaaaaaaaaaattgcatattatattaattaagtaatcaacattgatttgtcattgtgaatagaagattgagtacccaatatagattgagaacctttttagcgatagctaattttttttgtagagtttaaaacatttttagaaaataaataaaaaatatgtattattaattaattaattatctccattttggctaaacttttaaagaaatttaagaaacgaatatgttaagaaatttaagaatacttactcattgttgttatgcttgatagttagaatccctcgtaagtttaaactaagggtgataatatcgatcactacaaaataatacttagaatttcaaaaacaatatgaaattattggccggggttgaattttagcataaagatgcacaatttaaaataggttaaacttaactaagcacgattaattttaaaattgtgtcgatgttcatattaagcatagtcgtattgtgtgaagattgtgttaatttgaaatactttacgaatacataaattgcaagccttaagtttaaaattgagaaccaagattgctgacaaggttttgcaataaaaatatcttgctactagagtaagagccacaccgttgaattggactaccaccgtactttaaatcaaatgataattttttcgaataagacaccattttatttaactatataagtgtaaattaaatgaatggctaagaagagctcggtatgaaagaaatcacaaagaatttattattaaaaagagctcgaagtaactcaccaatgaggaaaaactatcacacggattctaagaaagtataattaaatttaagatttttcgtacaaatttaattatgatttttttattttatagaagtgtctttataaatatattttttgagttacacgcttgagattcgatcccataagcccctcaacacacacacacactcctagtatccactatgaccacttgagctagtaattttatacattttaggactttgttatatgttgtttgttatgaattttatgatattttatcaagtttttattttcattgacgaggctaagtactcgattctgttttttcaaaactttgcacgtcactttcacttctatcacgagatgacaacatataagatttaagtctaacgcagtttgtttgtcataaatgtataagtaattactatatgtataagtcccgttctcttaacactattttctacattattatttacactaattttaatccatttgatcaaattatatctatggtccacattaaattatcaccaaatttaaggaaattaaaaatggtgttccacctgattttccaaaattaattaatagaaaataagaaaaaaaaatcaaatggtgttgaacctaattttcactatttttctccactattctctcaagaaaaagatgtataaaataaaatattaatcataaaaaggagtataaaataaaaaatcaagtgaaacattaattaatcacaaatatgagtaaaaagtgtcgatgtatatttaaaaataatttgcggcgtaaatatttaagtttaactcttaattaaaataaatacctaaatttaatttttgaacgtaataatacctaagttatatttttaaaactttcatatttaaattaaattttaaataaaaaataaaaatttaaggacatggactaatcatagactgctacgtgactattgacacttaatgaccagatacataggaaagttacaaaaatataatttaagtattattttcgtcaaaaattaaatttaactatatatatgcaatcgagaattaaacttaaatatttatgccgcaaattactcacccttattaaaagatccattatgacgtctttataaaaaaaataaataatttaaaaaaatacaaaaataataaaaatatggtttgcgaaatttttaatatttttttacaattttttaaattttatttacataaaatacggtctttttatgcatttatatgttgtactcttgttattttattattgattttttttttatgttattttcttgttactttcatatgattttttattgttttcttgtattttatagaatatcgtaaaaatgtaaaaaatatatataaaattgtaaatttttttataaaaatttgtgtaatttgcagcataaatacttaagtttaactctctgttacaaataaatatctaagtttaatctttagcggtagtaacacacaaattataattctagaacttctataggtacttggctattatgtgttaagtaaattgccacttggtgatccatgattggtggtggtcatgaatttttatttatttttaattaatttaaatatatcaatcagtaaatgatacatatataatgacttgacatttaacgactaggtacctataaagttccaaaaatataacttaagtattattaacgccaaaaattaaacttaggtatttatttacaacagagagttaaacttaaatatttatgacgcaaattattatttatctgtttatccttaaaaaatgagatttttacaaaaatactagattttgggcaaaagtttacaattttactatcacacgaatttttttataaaaatactgtctttttataaaacaaccgtaaaataacaaaatagaataattaaataaaaataacccttgaacaaccgtgaaaacttaacatagtatacaatataaaacttacacaatatttttgaaaaaaattctgccacacagtaaaaaagtaaaaaagtgagaaatttaattgaggaatacatttttttgtatccattaatcaaaaatacttttatattttattttattaaaatctactcacttttacgagtgagttgactaatatatccttaccatctatttaaatgtagcacatgatttacattaatttaaggggtataatagaaatattatctataaaagtaggtatatcttaaaaaatatgaaaataaaggtaaaaattaaaataaataaagtaaagtggatatacaatataatttattcgaggtttattgggtaaggtacataaaacccattataaaagacccattctgacgtaaggtgggcgggaaagtacacaaagcccattatagaatgggccatgataaattggactggaatgaggcccatttgtgtaaatattggtaagatatagtcaagtggcaacggacgccaaatctaaacccagaatcagagattatctatctttttcagttccgccagtttctgcgagaagaaaaaaaaaaaaaaagtgaagacgccattttcgcccgagagaacacccaaaagctttgccaagaaagccaagacccactttggagacagactgcgaatatcctcagccatagccatagagcgacctttctctctttaaccattatttgaaaggtttcttcttctggttgtacaatatcccagaggttcgtttttccatacaatttatcgttaatgacttcttttttcttttctttatcttcgttaatctaaatactagagtttttattcccaggtacttgttttataccttaatttttgtttgaacgggtgtttggaactatatttggtttgcgaattgaggcaatttattgttaattttgaatttatggaacttttagggttatagcggtagttctgttttaggtttttgggtaattagggggtgttgaaagagatgaaaggccggtcgcatcgtctccagagttctgaccctcctgatgattgggttgatggttcttggactgtggattgtgtatgcggtgttaattttgatgatggagaggagatggttaattgtgatgagtgtggtgtttgggtgcatacacggtgctctaaatatgtgaagggagatgatatatttgtttgtgataaatgtaagatcaggaatagtaggaatgagagcgaagaaactgaggttgcacaattgttggttgagcttcctactaaaactgttagaatagagggttcttatgcacctaatggacctcctcgccgtccttttaggctttggactgatattccaatggaggagagagtacatgttcaaggaattcctgggggtgatcctgctctgtttggtgggttaccttctgtgtttactccagagctgtggaagtgcactggctatgtacccaagaagttcaattttcgatataaggagttcccttgctgggatgaaaaggaagatgatgctaaattggatgatgacaatgagaatcctgtagataaaggggcaggtgttctgttttctttatcgaaggagactgtatttgctgctccaatggctgctttggttggtttgagagggagggatgaggaagctgcccgtgaccgaaaattgtctttgaaagagacaaaaaagtgggagagtgagggtcttgatgttaggcgtgctcagaatgggatgaaggagagtggcctaattcggtctgtggtgttaaattctggtaagcggaagaaagatgattcgggaacatctaaagataaaagtgggaagaggaaagcaagaactgctgagaaagaggttgatgcttctaacagaagaggctcacattcttctagaacaggtaatttttttatggaatgctgaaatttatcttcattttatgctacaaataaaattttttattctactatgcactcattgatgagaatattaaccgtgtatcacatcttgtatactgttctagctcatgtgtgcctgttgattccaatttttctgtttttcatttttatcactagtgtttacatcaacaagtgatgcaaaacaattgcaattttatgaagacagagctccaaagttttccaaaggtgaaagtcacagtacaaagaacaagaatttgaaggaaattgtggttagagatcctgcatctgatggacgtcttgctcatggtaatgctggaaagcattctacagaagtcttatcatctgacatatctacacaagatttttcaattcgtactggatcgaaggaagagaaggttggtcatcagtttcctgccgtgatagaaagatctcctaaaggtgatggtgcagttgggtcatcgtccggacatgataatactggaaaacttcatatgaaagcagaggtacttttcatacccttgcacacaattattttgttggtcatctttttctttttcatcttcagttctttggtgcttgaaagcacaatttggaagtgttacaaaatgatttatctttctaggattatatcactaacagattgcttgagttctttaagtgtactagatgacacaccacttttgcatttcactctttgaccaccattagtgtagcatatagaaatatctaggatttatctgaatgaaggctggttcaaatgagatgatttttatctgaatgaaggctgtttcaaatgagatgattagtgatatgttggtgaaatatttaagttggcaaagattaaaagatgaacggtgaaacttcttaaaattactggtagtcatgagttgtttatttattttattttgctctgtgtgcacacgtttctaatttttaaaaccattgcaaaataacatgaatacaaccttaggaaaaatgtaggtcgcttgttatgattcaatgtcatattttttctaaatacaatattacaaaatgccattactgtttatagctttaaacaaaagaaatatgttgttaacgtattagcaatttccgaaaatttttgttagtaacaatttcctaaattgtattagataagatattgtatatgaagatttcccacagcagggaaggaacaagtcccacacaaataagataatctagcacaaacccagcatcaaaatggaaattgaacaatcctaaatatcataagatctcttaaattatcaataaaactgaaaagaaaaacctttaaacaccgtgataggggccaacctaaattttaactctttcacagatctcctgcaaagacttgatggcaaaacaattccccaaacagcctgcctgcctccctctcctctctgaaaagaaaagaaaaaaaaaagaaaaaatgcacttttcttttatatagatttaatttcagttctctttttcctttacaacaaaatccagctggtctttaagaaaatctgaataagatctgggagtgtcaaaatttaaactgcagttctcacaaaatttccagcatgaaagttcattttcttttttcttttacagctttcgagttcgcaactttatacaatgtctggctctgagatcattcagctatatgtcaacacaatgactaaagactattgaactcatggctgtgtcctttgtgtgtatatgtgcgtttacatttcttaatctatgtttgatatctcaacttcttgttcaaataatttgtgcttttagtttgattggtgccgcttaattcggtgttctgatgtatttgagtaaacttaagcttgatgaaagtaagttacttttcaatgatagggcacaactgttggtaagttggatgatgatagccctgaaggatctgataaaaacattggtcaacatcttgctgaaaatgtgcctggcattacacctgaaattaaggccaaacaggcgcaagattttagtggtgatgttttattggtgtctgaacaacctaatttggaaatgaaagaggaagatcgtgatgacaaatctgggtctctgttgaatattcaatcttctccttgtggtgattcgaaagaacctgcaatttcttcaggtcacatgttggaatcttctaaagtgtcagatgccacaataagcagtttgcattccagtgatcacaagctggaacatcttgatcgcagttttgaagcagtttgtgattctcatacagataagggtgatcaattattgggtgaaacaggtttgttgaccctgcagaaaagtgcttcagtagagaaacatagttctgggtttcctgaagagtattctaatccaggagtagctatgccaaactctcagggagtacctagtcagcgtaaattggtagcttgttccggaaaaacttcttccagctcaaccactcttttgattcctaaatcatccacttctgacaatattaaatctgttgatctaaatgctaatcctattgctaaaccaccaatgacacctgacagtaatggcaatacaaggaaagatcgtgtccgggacgaagatagggttgacttctctaggaaaaatttgaaagagcgtccaaaatcattagtaaacactgttccaaagcccgtgcattcaagcaggagttcacatgattctatttccaagaaagtgactaccgaatcaaaagatagcacacattgtgcttcttccaagacctcttcaactccaataatttcagcttctagtgatcctagtgtatcactccattatcagagagctatacatacaaacagtagaagttcagcttcagggatgccgccaaaagttgaaaaatttaaccaaccaccttcacagtcctcgaaaatgaatcaaaatcatgtgccatctgtgtgtccacctattttatcaagttctccatcaacacttagtgatgaggaggtaagagcagacttcttcttctgcccttttttttttgaaaaatacagtagaatattctagtaattttgcttgacctatctatataaacgtctatgagcagcttgctttactactacatcaagaactcaacagctctccccgagtaccccgtgtgcctcgtgtccgccatgctggtagtgtacctcagccttctccaaccccaacaagcatgctaaataagcggacatcaagttccggagcaaaagataacatttcggtaagattcttacctgatattcatttgtttttaagtggtcattttcctcctgctttcagcaggtatgtttacatggttctgctatcatggtttttttttttccttgtatcttaacatcatgactctataggttcccagaaggaaattcagggatgctcccagagatggctttcgtagttcccgtgaggttgctgacgaagctaaaagaatggaaaaagtttcatcctctcatgatgcaaaaagacaagatactgattattctgcggaggcttctaccaagaaggaagacaatggatctgcagctgcaggggagaatgtcaagaggaatataccttctaattctgctgccactacaaatggtgggccatcttcatcggctgaggctaatgagcgcaatttgccctctataagaagttcacctagaaatacctctgatgatgatactggcacagttggtgatggccctgttaatcgtactttaccaggtatcggattgtttaattcttttattgtcatggccatccccgtgtttgctgttttctgattcaattctcatatgcaggattgattaatgagattatgagcaaaggcaagcgtatgacatatgaggagctatgtaatgctgtgttgccggtatggttgcttttattaaactttgtgccattttcatcttctgaatttcttcaatatatttccatttattttatgtttgcggtccctttctgcagcattggcataacctgaggaagcataatggagagcgttatgcttatgcaagtcattcgcaggctgttcttgattgcttaagaaatcgacatgaatgggccagattggttgatcgaggtcccaaggtatgagcacaagaacattcctaagattttgttttgtgacattgaatgaccaaaactgctcttgcactctaatttattaggaaaaataattgtatttatatatttacctgtactcattctttattttaatctcatgttatccagacaaattcaagtaggaaaagacgcaagcttgatgaggattctgaggacaacgagtatggaaaaggaaaaacagcaaatcatgtggaaagcaaaagccttgaatcacagaaagaagaggtccctaagggcaaaagaaatgtgagaaaacgaagaagactcgtacttcaaggaagaggtgtaagagacatcaggaagagacggaaaactgatatactcacagatgaggacttcggaacttcttcagattccagcgaagagagcttgaccagcggaagtgagatgcagggaggccaagcacgtccgtgatgcctcagctagttcagaccagattgggactacgtagttcagaggcctttattccaatgtgaatgaagatccagatagaggcagaaacaaagcttctcaaggaacaccacacattgttaacctctttggtaggactcatctcgggttcatgtagtttacttgtgaacatggcttacgacaccgtctaatcaggttgttaggttggatctgaaaattgtacaacacatgatgtaaatatgaattacatttgttcttcttgatagtgagagaatgtattgtgttaggagagagcctttgtctttgttgagaaagggcttagataagataagataaaagtcattatcattattattattaaagtagatgtaaattttgacaaataatttcttatattgcttttgcttctctctgccaattcatttcttctatttcttgctgtgtttatcacccaaatacatttattttggtaaatgtattgaaaaaaaaaaagtccaaaagagtataaaatttgcaccagccgggaatcgaacccgggtctgtaccgtggcagggtactattctaccactagaccactggtgcttgtgttttgtaacaccaaattatatattaatgaccatataaaacaattgtgaagaagtgatttagtaataatgatttgttgttataaataaaaaaaaataataaaaatagtttattttatgattttgttttattcgtaccttttagttgtttttttattcaaatttgtatattttaattaaaaaatacaataaatagtaattattaaatatatggtctaatttataaaataaagtaattttattgttatttttttatattaaagttatatgtgtaacaattataaatattaaaataattttatcgtaaatatcttttgtttctttgttttgtattagattataaacttttcaatgaaacctaaaattaatttgataactcaatgcacataattgagtatcactttttttaaaattgaaaggtgaagaaattttgatcaaagaagaaatcaatcaagcaatatggaataattttgagtgacccaattggagtcttattattcgatagtgatcgattattttgcacattactcaactcactataacatatcttcattaaaaaaattactttaacaaattattccatcataacttcataaaatcattgaaaaaggcatctaattaaaaatgttataatacaattttttttttttgtatttttttagcagaaaatcaaattttatttaccattcatttttgctactaaacacgataacaaattagttgggacatcccaaactgaattcacaatcaaattttaaaataaaagctctataaattgatgagccattaatttaatttatcctctaataactcaaagtaaaattttacattcttcaataacattacccaacataaaaaccataatcacaattgtgcaactacaactgattttacaaagcattcccataaaatgagtgcatttgtgaatttttatctattttaatatttgagataattttttaatttattttcttataattatttaagatattttataaaattttaaaaaatttaacacagtaaaaatagtgttcaaaaaatatattgcacgaataacttttattttatatgcatataaaataaattattttttttaaaaatgaaataaatactactttttatattataaaatatttttgaaaatctcaaaataacataacgtagaccattttaaaataataagagtaatgtgcgacataatttaagtttaattttctattgtaatacatacctaagtttaatttttagcaataataatacataaattatatttctagaatttcatggttacctaaccgtaatttgaagtatttataaaaattttataattataactaaaatattattaccgctaacaataaaacttaagtatttatatgaaatttagatatggaaatagataaaagatgaataaataaataaataaataaatagtaataaaatttctaaagcaggtttacaaacaaaggagataacagacaccttctagttctctcttccatggcttctgcaatttcttttgctcgctttccaatccgtacaacaaccaactccatactactatctccttcttcttcttcttctctccgctttcctcgcttcttcccgccattctcacactcacaccatcctcgtttccccacctttttctgctcagctaagaagaccactgcattcgctttcgtatctgcctccgacgccattatcaacgaatcaaactcaaaactcgatgattccgactccgatacaaatcctccttctcctccgcagcagcagccatcgccgagcgttgtaacgtggagccttctctttaggcttttactgaaacacaagctaaggttggctctgttgctgcttactcttgttggctgcactacttgtactctctcaatgcccttgttttcaggtgagcctgaattgaattgagaattgtttctgtactgtactgtattgtattgtattggtttgtttgtttcttagttaataattgctgatgtttgaattgaattttgtgcagggcgtttctttgaagttttgattggtgcaaaccctgagccgttgtggagtttgctaagcaaagttggggttctttatgcgttggaacctattttaactgttatatttattgtaaatatgaactttatttgggagaaggttatgtctacactaagagcacagatttttggaagggtattgattcagaaggtatgtttggatttactttagttattgtatatgaattcttattttaatgtttgacaaatgagcattaattatttaaagttaatagtgatattttgtaatttgtaattatatatttaggggacttaagaattggagatggtaactgagatttgagacattatctggttgagcaaattactccgatttacactcaattacaattacacagtagcttggaattccaaacgcaccgttagtcttcttattttgttagcaattcaacaattgtcttagcagtgtgtgtgggtggcacaaactggttgtttcaaatgttaggatcaagatgtgtattggctaagatatgataaagtataatagcataaagatttaacataataaataagctggtgttcatatctagaatttgattgtgaagtttgtcatgggataaacattattctttgattaaaactgggcatgaaagttactttgcacttgatattttagttaattgattctctttttcaatgtgcagatcgagttttttgaccgctataaggtatgcccatcagcttaatttgattttcatgctcttttggttgaagggtcttggctgtttttttttctctcttctaattattcatctcttgaaattatgactgtatgattgacttggattttacatttatataggttggtgaactcacaggtctgttaacttctgatctgggctctcttaagaatgttgtgagtgaaaatgtttcaagggaccgtggactccgggcatttactgaggcaagaaactctacaccaaagacaagtgagctttactttgcctacgattgagcatccacacacatgcagttctttttaatgggtttggctcagtttttattagtgacgcaccaaactttccctgaattttgcttcagaaatgcattttgtttttgtcgaatcaaattacatagcaggctagttatgattttttcacattattaaaaccacatcatatcattttcaggatattattcatgttgtatcttcaccagttttctctttgatttatgatcatgttgtgattgttctccttttccttctcttgtaggttattggaacaatttgcatactgtttgctttggctcctcaactagcaccaattcttgctgttttgatgcttgttgtatcggttttagttggtaagttatcttcatttttaaattgtagtcagtataattagttgaataattgttttattactcccattatttctgttggtgtaatctaatttgctttggaagtaggtaggacttaactttggttatgcatgtgttttgggcatttggtacataattggcctaacttgtgatgttctattgatgtttttctttataatattatctgcaattgccattttgatatttttatgttcttaaatcactggctgctgattcttagcacaaacttacctgtttcatggtttctttcatgttgctgattatgataactttgtaaagctgtgtacaagcgatcaactgtgcctgtttttaaagctcatgggttggcccaagcatccatttctgattgtgtgacagaaacattttctgcaattcgtactgtaagtggatatggtgttctttaaatagctgtttagtgtcattatgtggcggaaaatttaggccaatcattctgtttcgagtcaatcttgaatataagggtatcctacttttgttgtaggtaagatccttcggtggtgaaaagcaccaaatgcggatgtttggtaaccaggtaaggtaaaattagcatattgattatgcagatgcaaaagcttgctcgtgccctcatcattttatcatgaagttttgcaggtcctggcttttcagaggagtggaataaagcttgggactttcaaatctgtcaatgaagctttaaccagagtcgctgtttctatttctctatttgcactctattgccttggaggaagcaaagtgaaggcggtaggaagttgtagcctttaataaatcttccaaattgttttttaactgactcatccctcattctcatcattcatctttatgattagattaattaaatattttgttctttctggattgttgttttgactagcgtaatttttattcagcttctgactttagctaagaaacacaaaaatgtgtacttctatttgtaaatagattcatatagtttatctgcctccaatatgtatattttaatctttgttattttgttacatttttcacttgcagggtgaactatcgattggaattgtggcctcttttattggatacacattcacactaacatttgctgtaagtcaatatctgtattaaataattttggttgattcttttttttgtttttaaagtaagttgtctttcaggttcaaggcctggtcaacacatttggtgatctccgtggaagttttgcagctatagagagaatcaattcagttttatctggggtagaaattgacgaagctttagcttatggtttagaaagggaaatacgggaaacaaagttgaatgatgaaaactataaattgttcattgatgatagttcaagtgagaaaaatctatctgtaaatatgcattatatgtcaaatcttaaatcagctactgatattggcagcttagcactgtctggtgatgtttgtctcgaaggtatttgtaatagttcttttagtttcatctaagtttgctaaaaatgactgccttattcacattccagaccgttactacaataactttttcttaaaatgttgcagatgtgtatttttcttatccgttaagacctgacgtgggaattctaaatggtctcaacttaactctgaagtgtggaacagttactgctttagttggctcaagtggtgcaggcaaaagtacaatagtgcagttattggctcgtttctatgaggttctttctttgtactttcagtttcaaaatgaaggtttaatgtggttgtcatagcctaaagaatttttatgcataatgttttgcagccaacccagggccgcatcacagttgcaggggaggatgtccgaacatttgacaagagggaatgggctcgtgttgtttctatagttaatcaagtacaaaatatatccttcaactgttgttgttgctgttgttccaagttgttagaataattctctcttttaacatttagttgatgatgtgatgccttttgtggatgctaaacaatacaggatcctatcctcttttcggtgtctgttggggaaaatattgcatatgggcttccaaatgaaaatgtttccaaggatgatgtgataaaggcagcaaaagctgccaatgctcatgacttcattatttccctcccacaggttaaaaaactttggcgtttttcatctttcatcgtgtgtcttcctgtttacgtaatttttttttatgttatagggttatgacacactagtaggtgagcgtggaggcctacttagcgggggtcagagacaggtatgacaatgaagttaacgagattgagtgaagtaagaagaagtgttcatgacatattttttttttctgaaatgatctgcagagagttgctattgcgagagctctgcttaaaaacgcaccaatcttgatactcgacgaggcaagtattttgctatcatatcaaacacctaaattttaactgaatagatgaaaggaaataatcacaagctccacccagtattcctgtgtcccattttagactgactaattttaatttgttcttgggcacaggcaacgagtgcattagacgcagttagcgagcgcctagttcaggaggctctaaaccacttgatgaagggcaggacgacattggtaatagctcatcggttaagcaccgtccagaacgctcatatgattgccctttgctctgagggccgtattgtagaacttgggacacactttgagttattggctaaaaaaggtcaatatgctcaattagttggaacccaaaggctagcatttgaatagtaatattcaatatttgctggtatgtttagtccattccaggtacatgtgagttttaactatcaaaaatcataaaagttttatttaatgctataaatttggagatgttagttcagtactgattcatttttcattggattaattaacaggtccaattatacaagttttacagctcatttcaatggtggcttgggttgttgggggaaataattgagctttacttcataacattattgagctttacttcataataaaaggttgtagtaaatagtaattgcactatatattatatatatcccaaccttgaataatttatctcacaagtaataatcaattataagtttcactagtgtgtaagtaagctttgtatttattattattattgttattgttattataatagctttatttgaattgaattgaacatttcgaagttcgaactaatagtttatggaagtaaggttcaaccaatcacacaatttgcactatattttatgtgacaatatcttctaataaaaaagatttgttatacatatttgtttaaattttggtataaattaagtatatacatatattattattcgtgctttaaaataaatactttaaaatattaatgcttaatagtctaatgaaaatttatggctaaatttcttatcttgtttggttattctatttgaatagttagtttctaccaagtaacattaaaccaaccaaacatctttgtgaaattaagtggctacattagtaaaaaatttagaaaagtccccaaaaaaaattattttagtaactatatattatatatatttcttttttaaaggaatttagtaaatattttaaaattatatctttcaacgaaaaaatatatatttttttacaaaataataattgaattgtcgcaattgtaaagtggagaaagacactaatttagtaatatggctctccaatgaccaatctggcaagacttcgtcttggtcaattcattcaaattaaataaaaataataataattattatattttttttagaaaaaaacaagacccaattagtttgttgaataaattaaactcattttaagcaatgtaaaaacttatacaccactctataaatttcatttttattttgaaaaagattacatataacaaacaaataatattaatatgcagagtaaaaatttgttcaaaaaagaaaaagattgtaagagtaggaatctgaaggtttttattgttttttttttctttttcaataataggaatatgaggagattttggatcacgtataatgtcagccacacccaatttggatcttaaaaaaaacatttatttattatttaattgaaaagcattaaaaaaattgagcatttttagttaaaagacaagatgtccaatagagcaccaacacatttattattatcatttgaaaaataaataataaataaaagagaaagagttttgttttgatgagagtcgtttcatttcattataattaattaactaaaattaagatttttagcactacttaaattttaacctatatcaaatcatgtcatttaaatttttaagacagttaattttttttttaaactattgaaattattgaatttaaaaataattaacataaatgagagttcagaaaatacgattggatacatgtcataatttgagatactcaatttagtaaatattaaaatttacgaatataatttagtacataaacaattactgaattagtaaaatcgaacgaaattagacaaaaatcctaattaaatatcaattaatgagtaatttatttaatttagataaataattaaatttaattttt

SEQ ID NO: 27256 - DNA, 1384 bp, Cannabis sativa
tgccatattacactcaatattaatttagtggtgtagccataaccaaaattcaactacaaacttttttttttttttgatgaataaattcaactacaaacttagtcaagttagactaataacgatagcaatattagtaagttgatttgggtatggatggtccccattgaagagtgagtgagttgtcattggtactaaattgtataaaagatgcattgtgttggtttaggatcctttttggacggctaggatttacttaactagtttgaagcatatttgaaggtcaaagactgcatatattaaggtcaagtagtgggtgaccacgaagggtccttgttgtgttggtacactaattatgatgtttttcttatttaagtcattgcttaaaagtcccttaatttctatttaatttataatatgtataaatatataatttagaagaaagggtctatatttttccacataataacactgaccttatctggttctcatgttgtcaaaaaaatcccatgtatcaagctcgtctttttcatcacttacatttacaatttcttttttttttttaataaatttgtaactttcattgaagattgaggaaacattacaaagttacaagatttgagatacttggtggaatattaccattccacgctacaatgttacgagtaatagtactattgcttctatcatatggcaaaccttccctaactggatcagtatattcagacaaattctcatttgtagaaagcaatctatgaacaagcacttcagaatttgtctctataattgatattggaagagaaaccgtagaacgccattgaaggacaataaaaaaaagcttgtccttctgctgctagtgggctagagcaacccaacatcttcttacttaaaccaaccaccacttaccattcatgtttgtaacgaatggtcattgtctacttgtaaaagattgagtatttagagttgcatcaatgtttagcttgaaagtaccagcttgttaattgctcttgcttttgtgtaacaagtactattgaagtcaattcttttaacccgggcatgtgttatagtcaattcttttgtctattcttgattttccaaaaagaacaacattcatgtcattccaaattgcccaaagaagtccaaggcaatcttcaaacaaatctgcatttggagtcttgaaagcttggaacaaaaagtcagaaatatcactatatttatattctttttatataaatagagtaaaagggagaagatttacaagcctttcgagccctagagcaatacaagacagtatgtgacactatctcccgatcatcaccacaagagatacaaaaagaattagagatgacatgcttattagctagatttaaagcacaagggagcaaat

SEQ ID NO: 27257 - DNA, 4375 bp, Cannabis sativa
agggtctaattctcaattagacacgttgctgcaattcatgacagagattaagtcttccattaaggtcttggaaacccatgtgggatagttggcttctcaaaacactaacagggctcaaggtaacttgcctagtactactgaagtcaatctaaaagagaactgtaatgcaattaccttaagaagtggtaagaactatgctgggcaaccaagacaagccaagggaggaagaggatgaagaaccagtacaaacacaagagaagaagaagactactgacgatcttcaataaaaagaaactccaccccccatcagcattgatcatcatatcaaaattccctatcctcaaagacttcacaagaataagatagataagaagtttttgaataaatttcttcaaatattcaagaaactgcacatcaacattccattcatagaggctttaattaaaacagatgtcaacttacctaaagttcatgaaagacattctatccaagaaaaggaagttggaagaatttaagatggtggcacttactgaggagtgcagtgcagtcctgcaaaagaaactaccacccaagcttaaagatctaggtagtttcaatattccatgctcaatagggggtttgatagaaataaaagctctatgtgatctgggagcaagtatcaacttaatgcccctatctgtctttaaaagactaaaactaggagaagccaagcccacaacagtgactttacaaatggcagaccgttctctgactcatcctcggggtataattgaagatgttttggtaaaggttggtaagtttatcttccctgctgatttcttaatacttgacatggaggaagatgagaatatccccatcattttgggaagaccgtttttagcaacgaggagagcgttaattgatgtgcgaaaagaggagttaaagttgcgcgttcaaaaggaagaagagaccttcaatgtcttcagtgcaactgaaattcctacttgttgtcgagtggaagttgtaaaggatggtcgagaagtaactaccaacatgaagaaagggaagtccaaagatcactttcgaacttttcgacaacgtatgaaaagattgatgtgtgtgaattgtgaaggtgactctcagtttaaggatagccttaaaaattacaatgttggaggacaattttcttcgtttggtacaagggcccttatggatgcaagaggtggattgtattccagttgaatttatccaccaccaccatactgatgtggcgctcatgtaagtttcctttcctttctctttaatggcgcacattgagaaatggtttagtatttataatattgatatttataattttttttataatcatcaataaataatacttattgagaaatgtttcaatatataattttaaaattttatattttaggatttaagatagcagtatacatgcccgattttaggcataggagggctagacagtgcctgaaaatattttttagtttaaaaatatacatattttttattaattttaaaaataccacatttctttttaaataagagtataactttttttagaataattacataagatattatttttagtaaaaaaaaaaatatatatttttacgtttaattttttttatatatatttttatgatttttcatagaaacaacacaaaaaatacataaaagtaatataaaaataacatctaaataacatcgaaataacaataaaaaatagcacataaataacaaaaaatcaatgataaagtaacaatagtacaacataaaagaccgtattttttataaataaaataaaaaaaatcgtaaaaatgtatttttgtaatttttttattgtttttctcattaaaatttagggtcctggcaatatattccaccttatagtcttctttcaaaaattttaaaaaaaaatcagaattgatgtaaatatatttatatacaaaatattgaaagagaaaaagttgtggcatatatgcataaagccaaaaaccaatatctcagaaatttgattgtcatataagagtccacatccttcccatcaaaaatcaatgcccttttctatacgacccaactcatatataattatatatcaataaaccagaaaaatacaatatatatactctatatatatttataatatttataaagtaactgtagaaaacatttttgattggtgcatcatttttgtcattattgtagaagcatatataattatgagcaacctacaacaaaacttgtgactaaaagtaaaaaagttgtaactaattataaattattattcttatattgtggctaaaaagtccatggctaaaagtattagtcactaattataaattactattcttatgttgtggctaaaaaatccacggctaaaggtattatttacaaaaattataatttgttgtgactaaatgtaattttagtcacaatacttattgtgactaaaactaaattattgacaacttatgtctaaatgttatgttttagtcacaaataattttttgttgtgactaaaagtcacattttgtcacaaaaaaatgatgttgtgactaaaaaattgtcactaaaagtaatagttttttgtagtgtatacatacaggcaactcgttttctaaagaaaaaaaaattaaaagaaaacttataatttatattgtaattaaatgagatattttttaacatgtaatattaattttgatataataattaaattaatttttgtattgaaactttttttttaatttactttaaattatatatatataaaaaataaatttgtattaatttctaacatgttatatcatgtagaatataaagtatgtaatgtggccttttcaacttaaattcctctacttataaagttataatagtgaaaattacaatgtagacacagtttactttgttttgtttttattttaacttttattttcatgttctttaaaatatactcagttttataaataatgtctccattatatctcttagattaatataaattatgtgttacactgtagaagacaaatatattaggcaatccacctataaaagtgagtagattataataaaatataatatgaaaatgttttttattaataaataaaaaaaaatatttctaaacttatttataatagccatatatataagtgactattttaaaatctagtttccacattaatctacatggtcatataaaaaaaatcaattataatttctctaagttttaataaaggcaaaaaatcaagaccccacacaataatggcaaaataaatagtagtcacaacacaacctaagaaattgcctataaatacatatacatataaaaaatttgaaaaaataatataaaaataattctcactataggacaatggacacaattaatatccaccccataaagaaaaccctaatgaagccaaaacactatatattcaaaaataataattattactcactcatcatcatcgatcatatccaaacaataaaatcaaaaccacacaaaaataaaatattcataataataaaatttaatacaataaaaaaaattaaagtgtatatggtaggaattaagaaaaataataacatgagacgtagacaaatgattcaccatacgttagaatctccatgacgtgtattccaagtctcccaaccatgcatttatatatatatatatatatatattaataattataataaataataattctctctttccatattactctctttctcactcttcatcataatattctctcatcaaactctcatctctccatggaagaagaaatcatcactacaacctattattttcccaagaaaatgagattttctcaccaaaaaccctcacaaagttgccctaaccctaaccctaaccctaaccctagtaataatactacttctttattattattttcttgcaataaaccaaacagaagttgtgtgtcattaccagctgcttttgatgatgatgatgatgatgatcagaagagttgtagtggaagagagaggttgaagagacaccgagatgaggtggcgggacgggttcgggtgcccgataaatggggaaaggaggagttaatgaaggattggattgattactcttcttttgataagcttttggctccaattggacttagatcagctcgtgaagctcttgttgttcatgctagacgacgtcgtaatggggcttctacttactaattaatactaaacaggttttattagttaattaattaacttaattaattacttttgttttataattattagataagatatatataattaatgtatatgtagcatagaggtttatggtcatcatatcatattattattattttttgttaaataaaaaaatcacgtggtgcagatccctttattc

SEQ ID NO: 27258 - DNA, 6020 bp, Cannabis sativa
  modified_base (1705)..(1711): a, c, t, g, unknown or other
tctctctctctctctctcttcgttcaaactcccaacccacggcgcacccccaccaacccacggcgcaccccactgacccatggcgcactcccactaacccacgacatacccacaacgcacccccagccaaagtgagacccaacccataactgacggtgcacagaggttcattgtgattttactgttaaagatagatttaggatagatttaggtttagaatgtcagatatgtgatttgggcaaggtccgatgcacattcgatgtaggttcgatggggtccgaggggttcaatgaatatgtaaggttgcgaggtaggagacgtaggtccgatggggtctgatatggggtccgatgtgaggtccaatgtggggttcgattgtgtccgatatggggtcagacggggtccgatgaggaagaaggaatgggaagaaaagagagagagggaggtgatgtaaatggggagggtaatttggagataacattaaagttggcctagattacaaatattggtatttataaatttaggaaaaattttgaaggttatgtaagcatatttagtcaaatttccctttttcaagggataattccataaatattggaaaaataaagctagtttagataaatatggtaatgaagcttaataggaaaaatatggtatttaaaataaaaacttaatatatatgggattgaattaccataaaagatattaaaatcccttcatatatttttttaaacaaataaaactgcagcgatcgccgaagttgtcaccggtgctggaaaaggcaccggagtttgctgtcagcggcggaaaagtcatcggagttgctgctgatgccggaatagtcattggtattggcattatcgctagaaaaattaccggaaaaatcaccaagaaactagaaaccagtttcttggtattttgcggtgatttttctggcgacaatggcaattccgacgaattttcttaagtttgttgtcggtaccgaaaaggtcgccgaagtagcaaccgatgtcagaaaagtcgttggagttgctgctgacgctagaaaaatcctcggaattggcattgtcgtcagaaaaaattaccaaaaaaatcaccaagaaactagtttcttgataatttttccggcgactatgccaatttcgataattttttcaaaatttgctgtcggtatcgaaaaagtcaccgaagtagctatcagtgtcagaaaagtcatcagaattggccttgtcaccggagaaatcacccaaaaatttgttggtgaattttttcaatgattttttcgacgataatgccgattctgacgaattttttagcattggcaacaacttcgacgactttttcggcaccgacagctactccggtgatttttctggcaccgacagtaaactccggtaacttttttggcattagtgacaaataaaactacctaaacaaatagtaacattaaatatgagatttagaaatctaatttacacatatatggcatatcaaataccataaaaagacctaaaaataaaaaataaaaataaaatcatataaattggtcaaacttaaaagtgtcatatttaacataagaacttttaaaatcccatagtaaggataattttctcattttttaaggggctaacgacatgtctaaaagtcctttattattgcccattttcaattacattactccttttaagcaaaaaaaaaaaaaaannnnnnnagaagaagaagaagaagaaattcattgttatttattatttttttcaaatcttcgtatccttttttccattcatttttttaaaaagttttattggaatcaataataattttaataaaatagtttgagttttttttttatatgttttgtaagatatataaccgcatgataatatttaaaaatatttttacaaattacacgattgatgcggtttttcgttaactcatttaagaagatcgtaaaataaaagaggaccacagtaaattaatttgactaataaaatcacaataaattaaatagacactaaggatttatagtagttcacccccatgtcgcgatggtaatggggctacgtctacttttagtttttttgattggatctgacactccagagttatattctcacgagtgtgtggatataaatacatcaaaggatttctaggtgaaatcgtaatcaagattcatgaatataagactcatgggagacttgatattcataaatctgatctaaactagtggtcgtaaagttctggggaacaataaaccaataaagtataaagaaaggtgtgtatcaatggtgttttgaggtctggtgtcgactgagtatggtagactcaatagaaaagatgatggaataagtgtgatgttcttggctaccgtcaagtaagtttcaaggagaaggtttcgaataagaagatccaaaaaagaagaagaagagtctaaaagtcctcatctcagcctcctacttattcttatattggttgtagagtttgttagtgattccctacatgtcgggatatctcactaacaaatctcgtataccactcttgttaatgaataaaatattacaagaaaataaatatctataaaaatttcattatttttaggcaaaaatctcacaaacattgggaaaattgttattttcggttgaggatgcaccaatttgaaatagagtggtgagatatcacctctcagctagaaatacatgatattggtgatcaatactaaaaacatgtgttttggagtgtcagtgcttgcatacaatgccacatggactgtgacagtgtcctccaacaaccctcacttcaccacattatccaattctcgagtaaaatatatcagtctatctagtgagccaattttggaccttataacttcagattgagccatgtctatgaggtacacttagatccgtcttaaaattatctttccaatgcaagtttaaccatgtcatttggataaaaattgagagagttatgactgttttactgaaggcagtttatgttgacttataccagttgtgagcactgacatggccaaatggcagtgctcacccgtgcattttctcagaccctcaggatgtgttttcacttgtttttctatggtgagtcatatttgggcagtcatgggacccaaaaacctcattttgacgtctgaaccctattgggagaccattgccaccaattgaagccggatagtggcaatggtcgaccatggcttgtgggaagtcatgggtggtgtttctcacttgtatttgatacatagatgttaaaaataaaatttgacgaataaatctcctttccttgtgtagtagtcgatcactgctactccaaaatggtagtgctcttcaattttgatgggcattgccacaagggaatgacagtggtcagcccttgcataagaaaaacggttcattggccaaattgtatttcaacatatatgtatcaagcacaaatgaacaaagtcacccaaggctttataaggtccatatccgaccactgccaaaaaaaaaatggcagtgctcctcaaattcgatgggcactgccacaaaggaggctaagtttatatatatatatatatatatatattttgaatttatggcctttaggctaatataattattattggtttatccaaagtctttaattatatgtatggcgatttttgcctgattggatggttaatcaggttatatgttaattttatattccttcctcccttttctagagaagaagtggttgagtttagtcttttaacaatactttcatattcattatttttttcaagtcatacaacttagtttttaaatgatttatgaatagtagcttgttttattgactttctcatttgttattactcgttattttctcaaataataagaacttcaacatctaaccaattcaaggctattttgatgttacagattatattggcaagcaattattcctctgatcgcaattagttttggcatactattttttaaaatcaattacatttacagtacttgctaaaatgttatgcaagcagttagtttttatgcttgcattagtcttgtgtcatttttaagatcaggttttttacctcattttcaacaactactaatttttagcatttattcaccagatttagtcctttatccatgtttaccatggtttttatcaaagtttaatttatactaatgatatgcccccaagtaattttaaagagatactatattattacttgtaacaaaatactttcattaaaatgaattatattttacatggaatggtaaatgaaatacaacagaatcagctactggtaataggatcttaagtgctcaatattccaggtattttttatcagcgagtcgttaaaccatgccaatttataaactctcgttcttataacaacttcaataacataaggaccttcccaatttgggttaaatactcctactgcagggtctcgtgttttagcaaacatgcatcataacactaaatctccactttaaaaagtctttttcgaactcttttgttgaagtgtcttgtgattcgatgttggtatgaagcatttataatttttgaatcagtgaatttttcgtcgagcaaatctaaagataccttgagtagttcttggttttattcttggtcgtagaattctagcttatgtgtagtaatgttaacttctactagaaacatggcttccaagctgaatgctagtgaaaaaatagtatgtctcgttgctgttttttctgttatctaataagcccagagtacttgaggtggcttgtctacccattttcccttatcctcatcgagcttcttttttatagtgtctttcaagattttattaacagcctcgacgtgaccataggcttgtggccttgatactgatgagaatcttttaataatcttatacctttgacagaattcaatgaaaaaatatccatcaaactgagttttattgtcagacactatctttatgggtttcaaacctacaaatattattcttaatcatgaagtccaggacttctttaaggtaattaaaaccagtggtttggcttcaatccattcagtaaagaagttaactatgaccaccacatacttcgcacctcctcgcccaattggtaaagatccaattaaatcaatcccccatattgtaaatgggtaaggtgacctcatcatacgaagttcaattggtggtatcctcagtatatgtgaaaattgttgacacttgtcgtattttttgacaaactcatgagtgtctttattgatggcaggccaaaaataaccttgtcagattatcttcttatataggctttacaatccaacatgatctccacataagccctcatgattatcttttatgatactattggcttctgctaggagtacacatcgtaataggggcatcgaatttcctcttttataaagttttccatcaacaattgtatatctcgagattgcatacattagtttccatgcatcgcttttatctattgaaagttcaccatttagcaagtattttatgataggaatcatccatgtgggacttgaatcaatcctttctatttcttgctcttcagcttcatagatactcagctcgcataatagatcttttggaactaaattgaggttatccgattccaactacgatgccaacttttctaaagcatcaacgttagagttttgttctcttagaacttgctcaattttataataatcgaatgcctccaaattctttcgaactttatctaagtatttttctatccttgtaccttttgcttggtattcatccatcactttatttacaaccagttgtgaatcatggaagcattgaaatttaagggtttcaacgatccatagtcctgttagtaatgttgcatactccacctcattatttgatgctttaaactggagccttagtccataatgaaatctgaaatttttaggaaatatcattatgattcatgtccccgagccattgtcgtttgaggcaccatctacaaataacttctagactctccaatctgttggaattattttactag

SEQ ID NO: 27259 - DNA, 1921 bp, Cannabis sativa
tccaagactaccttccaggaggaacaactagccattcagaactccttttcgaaaggaggactacctttcttgaagatctcacctagaatgaatatgttagtcattcgagaacaactttttgagagacaaataacattccagaaatgacttttggagagcttttcatttggagaaaaaataccacattacctaatagaaaaaataaaacaaaattcaactttaaacaataggaattgttcattaatgttagttcattcaacatgaacatgaatcattgttcaaaaaaaacatgaaagagaacaataattaggcaaaaacacacaaaaaaaacaattaaaaaacacaaacatgaacatttaacacccatgtgtaacaatgtttcacttcaaaatagagaatctattttaattgattttatggtattcctactgtaatatcaattgtacattgacttattggaataatgacaaaatatataaaagattaggtcttgattatatatgtgaaaatgataacaaaattaactatgctgctgggccgatcctaaagattgggtgggcttttaaaaaaaaataggcccattattgaaaaaatatgcagtaattttgaaaattaataaaaaatatatattttttaaaagaataatttttttgggtccatatgcatggtgggtctaagtgcaagtctaatttgtcttaatataataaattagaaaaggaaatttttcatctatgtattatataaattaaaaattacaatataaccaagtaaattagataatttcaaaaacatgaataaacaaaattactttaatttttttgtatgaataataaaataaaatatttccttttataataatttatatttttagtttttggatcattaatgtaaaaaagatgaaagatatttaattagaatctatttatcaattactatctatgatatcactcatttggcgataaaattaattaaatatagtgtgatgaaataattaaagtccaccctaaaatttcaaaatatatttttatataaaattattattaatgcaaatatacataaaaatactatgagcacatagtcagcacaattggttaagatagttcctctttatatggcagatcatatttagagtttcctaaagcatttttattatatacacactttatttttcaaaaaaagaaattattcattataaggtacaatgaccttattgtaaaaaattcagcagcaaaattactacttattcttaactaaatatatcattaaatgaaagatatatgtctcttcacatctgaactccattgaattctatggtattttttaaactaaatcaacacatttttttaaaaaaataaattaaaatcaatgatcacattaaatgtgagtaaaaaatagaataaattggtgtggctgaacaattgacataaacaacattagtaggtgacgtgttaataatagctgtattaatttttattttaagaaatattaaatccactaagatttgacgaaaaggtagatgagaaagaaatataataagataaatattttggtataagcaacgtgtcagacgctggcacagtctaaaatctgcctcaaaataagggaaaaactgagccactagtccatgttcacacgtgtgatgatatggacacgcgtggaaaattgtaaggggaagtgaatcataatcaattggaaaagaaaaagggaaaaaatcgttggattgatgtaaggtgactttttcactttaatttctggtgggtgggacccacttaagaatatgatgctgacatggcacacatctgaaccgctactaattttcatggcctgggtgggacccaacccacgtggtttcttttacggatgttgtaaagttgattatattacctattatacccttcaccacaaattactcggccaaaaa

SEQ ID NO: 27260 - DNA, 2538 bp, Cannabis sativa
  modified_base (2462)..(2471): a, c, t, g, unknown or other
aaaataatatttgtattaatgatagtttaaaaattataatctaatttttataaaaaaaaaatatttaatataaaataaatttaaaaataacatgttttgttttatttcaagactataattgtttaaaaatttgtcagtaattaactatagtatgagaatacgaaactatatgtattatataatattattaaaaaaaattatgcaaaaggatgatttatatatcttctactattaggcctaatgttaaacttgatcaactctaggggtgagagcaaaagacgaaagataaaatccatatatatatacaaaatgatgggtgaataatgaggttggttatgattacatatctgccaaaaaagagggtcaaaatcaaagtaatcataaaagagtagtagttttggaatattcccaactttctatctttggaacattttcattcctttggccgggggggccaatagtcatcattatcctatactctgcattaaattaaattcccaccataccatatagctagtgtaaaccagctcatatattgtttaattactctataaaaacaccttcatattcaacacaatttcctcatactatagctaataatcaatataactatgggcagtggtagtactattgagaggttggtaggtgagaagccagtggttatattcagcaagctatcttgttcaatgtgccactcagtgaagtctttgataaaaaattatggggcaaacgtgacagtgtacgagatcgatgagatttccaatggtcagcaaattgaaagggagttactactcaagttggggggttgtcagcccagtgttccagctgtttacataggccaaaaactcattggtggtgctgatatcatctttactctccaactcaagaacgagcttgttccactcctcattcaagccagagctatatggatataactacacaaaaaccatcatccattattattaattaataatcttcaataagtctatatatatatagaacgtttttgcttctttttttgttgttgggtcttcatcataatctgaaatgatcatcattaataagaataatgcactgagttatgtatagttatatatgatgatctactaattaattaatagagtacgtacttcttgtattggcaaaggtggccaacaacgttaacgtacgtatatatatatatagctatttttaatttggaaagccttgagtttattatcactttttgtattctcgtttaaaccatgtgatgaataaagctatccaatggttgagtacgtattataacatatgtatatatatgtatatgtatgtgtgtgtttgtacaaagaatctatgttgtgcgacggtatataatatatttaaactgacttataaccctttgctatatagaagctattaagttttgtttgccctagtcatgacttagagattgtcttctttcttttttcaattttttttttttaatttccgacgcaattttatggtttaaaattaccattcgaaggcaaatcagcatatataatatatattagtaataataaatatttctaaaaatatttaagcataaattttactaaaaaaacatacattaattaaattaaaatcgaaacatacatcaaattttactcatagttatgtcatgttttgcttcatttttagattttagttttactgtattctctttatttttattcatgattagtagttataagtttgattggctatatatatactgtacttcactaatgattaatagggctatcttttcctttttcttttattgtgaattttacaagaaagtaaaatgtaaattttacgctcaagtttaatttcctcacatatgcaatcacttttcccttgaaaggataaattaaattgttataattataataaaaatatatataattaaatccataaatggagggacatatatataatttttaaaattttgaaagggcatataggtaagaatttcatttacaagtatatatctaaaataactatcttacttggaattttatttaaggataaatatgtatataagtaattaacttagaaattaattaaagatgaaaaattataggaagacaatatatcaagaatgaagtaatacaaagcaccaccccacaacaacaaaatgaactaataattaattaattaactgatcgttttaataaaaatttattcaactgaaattagttgacagtatattgtgtactatatatatctttatagataaggtatagttagggttttgttagttttacagacactataaaaaatagctaactttagtgataacttttagtcacagtataattttttttgactaaataaatgtgacttagtcacaataaaaagttacttgtaactaaaatatagtatttagatataaattgtcactaatttagttttagtcataataagcattgtgactaaaagggtaaataccattttgnnnnnnnnnntttgcaaaagttacagattggaccttgtgttttgttaaatgacaaaatggaccttgtattttctaaa

SEQ ID NO: 27261 - DNA, 3325 bp, Cannabis sativa
atgaaacatacttgttagtaaatatagatcttggtaaaataattccaacagttgcttcttaggaatcagagaaatgagagtggtattaacaacaaaaaaatcagtaccctcaataagacaagaaaagacagcattcgcaaaatcaaacaccaaggtggaccaatttttttgataaaagtaagcattaagtccatcaagtccagggaccttatccctagaaagattgaaaagggctctcctaatttctttaacagaaaaaggttcatccaagaaagcacaatcaagatcttctaaaggaagaccaaggcaatccagaattaggttggtagcctcagcatcacaacccttagagcaaaacaaatcagagaaataagaaaccaccaaattataaatagcatcatgatcagagacaatattatctcgatcatctctaaggaactttatggtgttattcttctttctttgagaggcaaaacgacgaaaaaacttagtatttttatcaccagctttaagccaatgagttcgagctcgttgcctccaataaatttctgccttatagagaagagcatcaagctaagattggagacattggatacggaattgagcatcacaatcaaaaaaggaaaactcctgagacctagagatttccttttgaagatcagagatgcgagatttgagagagagattagcagctttattccaggacttaagagcagaaatacacagatcctgcttggacaaaaaatcatgaaaggaatttgtaagatcctgactattaataccactatcccaagtggttttaacaacaaagaagaattcgggattttcaagccaaacattctcaaaatgaaaatgccttttactcctaagggaagaattggggccattgtcgttaaggataagctttagaacacgatgatcagatccatagaaagaaagatgatgcaaaactgcattaggaaagagatcacaccaagaatctgaaccaatatcacaatcaatgtgttcacagacagaacgattacgccaagtgaacttatttcccacaaaaggaagaggagaaagttgaaacttatcaagaaagtaggaaaagttgtccatatccttattatcataatgtgtactaccaattttatcatcatatgataaaaaactattaaagtctcccataattaaccaaggaaaattaggagcattataaaaaaaattatcaagaaggttccaagttaaaggcctttgagatgaaataggagaaccatagaaaccagtaaagtggaacatatcattatcattaagacatatattacaattgatatgattacatgaaaaagttagaatattaacaaaaacattgtccttccaccaaagtaaaagtccccctccaaaatacttcctatggacttcaaagccatggtcaaaacccaggccaactctaactctttctacaaagcccaaagataaacgggttttgatcaaaaaaagaacaccaagacaatgactattcacaagaagggagagacgacagaatgcacgtgtactctccaatccacgtgaattccaacaaagaaaacttatttttctgggcgggtgtgcataacatcacctacatgttccaaattagtagaagcagatgaagaatcctcctccctatcactagcacgcaccctcttcagctgggacctaaaagagccaccaacaacagcttgctgggaaatgaaagatgggcgcttaaccccagaagcagatgccagcccttttccatgaaccatatgatcaagtgggctagaaactggattgactcccatagtaacaatagccccattagagatagtaccagcacccccagaagccaaggtaccaggggcattaggaaccacccagtattactagcactggtagcaaccaccaaagaatcgatggagtaagaggtaaaagtcgaagagcgcataggattgtccaagaagaaactatgaccagtaggaaacatactagtgatattgggatttatgggggtagagatcataacatcagaacttgtgtgataagtcaaaaactgaggccatgaaccaacactagtattcaaaaaagatggggaaattaatgttatttcccaaaaagtccctagtaggttgattgaggttaacaggggcataatcaaccagggtcatagcaggagggtgagggtactgataggggtgaaattcggtcggttacggtcggtttttacctgctgccaaaccgaccaggcggttacggtgtaattgttcacaaaatcgtaatcgaccgttaacatcaaaaaaccgaccgtaaccgaccgcggttataaacggtttttaacggtttgggctttacaaggcccattaaattggatttaatgttttttttttatcgtttttgacagtttaaccacttattatatgttccatttacaatactttgatatctataatcaaatataaaacttataatcattctaaagtccataataaattacataattcgtcaaagtcttaaattaagtccataataaattacataattcatcaaagtccttaattaagtccatactccataataagttccatagttgatcaaaatccataataaagtccatattacaacataaaattcaaactaaaatagtccaacttccaaataaaaataaagagtccaatgtccaaataaaaataaaaataaagagtccaatgaccaagttcattacaaacaacaatatttaaggaataacatgcatagtctagcttatgcccaatctaacttgcttcagctagagactccaaggtaatagtagaagcatcctctacaaaattcataaaaaaatgtaatgaacaaatgaattaattaaaattaaaataagagtattatattgtgactataattccacattacctgacacaacttcaattcaatcatgaaaagtttgcacttcatccatctagcttgctgcaccttcttgacttgcttcagctagagactctgatgtaacagtagaagcatcctctacaaaattcataagaaaatataatgaacaaataaattaattaaaactaaaataagaacattatattgtgaatttataattccacattacctggcacaacttcaattgaatcttgaaaggtttgcacttcatccatgtattgccttacaaccacaggctcacgtgaagagctaaaccaatttttggagcaaatgcatgcttcaaccattttaggagttaatgaactcctaaaattatcaagaattctaccacttgtagaaaaagccgactccgaagcaacagtcgacactggagaagcaagcacat

SEQ ID NO: 27262 - DNA, 2254 bp, Cannabis sativa
cgtcgcagcacctgacactctagccaggtatttttttttgcttcaatctctcttagtaaaatttgcataactttcacatataaactccaaatgagttgtttcaggattcatcggaaagtagaaaaagagatcaaaaacttatatgctttgactttttccaaaatataatcagtttatagttaaatttaggcttaaagtttcagctttattttcttataaattttttctctattttatatatcaccatatttccgatatttgaccaatttatatattccaaatgtcgaaacctgaaactaaagaaaacaagtatagttatgttccaaaaactagcatttaagaagaaattagaagttaaaaatgttttgaacaataggctaaaaatagcctaactaactctcccaaactaactccttacttgccctcgagtaagacaacactaaacacaaactaaaactaacacacaagcaattaagcctccatttttattcaaaaactgctctcaccatctgtagaattttaataaatttttcaaatagaatttcaactcaattactctaacaattattcttgcaacttctgttttgagagcttaataacatgaatggctgggaacatgttatacaataagatgaatccaagctttctaaaaagattgcatattagctctcttatagtgttaattctgggtgtgactacagttatatccaaatctataattagaattatatattaactactcacattgaattaatggaacttaagaaatttaacagataattagaacggtaaaatagtaattttgaccagctctaattaggtccaagcttatattaacttgtcttgtgtcgtactcgtgtaacacactcatgcagatttagagttgtgctagaaaactcaacctaaatgtagagctctaatttgtgagttggataatctgatatgaatgacgatggaaatactatcttttattatttttcttttatcttaatttttgtaattaaagcaaaaaaaaaatattttaaattttttaaaataattttatgtattattttattaaattttaatcttttacattgtcatgttaaatccttttttttttttttttttttttgaagaataacttgcacttcattaaaataaaccagaaagtacaaagccaacaagttatagggatggcaaagaaccattccaaactaactcattatctagtcttaatcctaattttgcaacccaatgagccaattgattagggtctctatacacatgctcaactttaagattaggactcaaagataacaagttcttaatacctactaaaatatcatccagaggactagcattccaattacaagaattaagtttatccactatagttttacaatttgtctttaaaacatccactggaagatgaagcagctgaacccattgaatagcatgataaatggcctttgcttcaggtatgattgcagggatacctccaattcaaggcttagctacaccagctttcacaaaaccagaatcatcagccaccacaataccatagctatgcttttgaccacgaacatcaatggtagcatcagtataaacctgcaaagaagatctagaagcaccatccgagaccctgctttgagcctgaaaacactataaggctgaatattttgctgggcatcaagatactgaaaaaaataattcacactccaatcaaagatatcagcagcatgtataacattattacagtgtatgtaattgtttctttgattccacaaagcccacagaaagcaaaacaaaatgctaagataatccttatccaaatcctcaaaagaacacaacaaaaaatcagtgatatcaagatgtttatacttatgataatgatccaaaaaccttgaggatttccaagcctttctcaatctggaacaccctagcagagcatgatgaaccgtctcagaactattcttacaaaaagaacaaagtggggaatcaataatatgtcgagcaaaaagagaggaggcaactggaatagtatgagacacaactatccacttaaagtgcttaatttttggaggggctttagaatgccaaattttattccaaaacttcctagaagtcacagtagatgagggagatgggataccctgagtagagagagccaaatgataggctgacttaacagtgaaaagactagagctttctctagaccaaataatatcatctttaccagagaaaccagtgattggaacttgaaggatatcct

SEQ ID NO: 27263 - DNA, 1710 bp, Cannabis sativa
atgcaaataacaacaaaataaaaaataaaataataactttattaaaaaaatattttttttacataactaacaacaaaataaaataattattgttattttatgtctctaataacaaataacaattttaaaaggagaaaaacagttgtatgtaaaaggatatgcataattttattttaaattatattctccttacatataagaattatataaggaatgaaatgtacatttgatttattaaattttaaaatatttgtatcatatatattagatttttaaattactatttttttacgttaaaatattaattgtatatgtaattttttttttaaaaaatatataaatatgtttggattggattcgatcggttacttttatatctcaaacaacatccaatcaccataagtgcggattttaaaatttccaatccaatctgcactttacgaattggattggattggatcgtgcagattagattggattgagtattttatgaacacccctaagaattaccaagaggcaagcacatctgagagacccacattaccaagaagttgagtctgctgtcgttattactttcaacactcagcaatagatatgtaacattctactagctaaggcatgttacaatgatttcttaagtactgtgttaacttttgctaattaaatggattttaacataaaagtgtgtttagcaaattttcgcaattattaaaactttaataaacttaaaatacttttggtctgggatctcgaaattctatttataaacatatataatttatacaataaccaaagtcattgtctaacaacattacccaaaatactgtcggcggtgtcctgaagatcacaaccgtccaagtctagacgtttggatgtgtacaatcttcattaagctctgatctcattgttgttcagtctttgcctttacctaaacatggaaacgtaactgtgagttgatagactcagtaagaaaagcataacatgcacaatataaatctgacttgtaactgagcgcccatacactaaaataccatgattctatgtctgagtctcgaacgttcgtaactatagtatagttaaccataataccaaactacactcagtactctagttgtactagtgttggtagcgttaattcatacttttaatatttcctaacatatacttgtcggtatcctggtgcaactccatgtattactattttgatatgttagctacatgactgtaatatctcgaaagtctaattgtgaataattaggggttattatatattatgggtttatcaggtagtaatgtgcaggattatgatcctactaatttaattcagcgtcaattatgaatttttctacaagtggatatataagcgtaatttattaattacggatattttaatttaatataaattatgaatttttaataagtggacaaataaacataatttattaattacagagatttatttaggacatgcggacataatgtgagttattggtgaaataaaaatattttttatgttcgacgatcctgggacccgatcggatgccaaaaatgtcacgacaggtttcgttagtaatgtttatgggattattgagataagttgtttttaaaattgtcggagtattttggagtactcaaggttgaccaaataccttaacgttagaaattttttagtggctaagaaatgataaaataatttttattattataatt

SEQ ID NO: 27264 - DNA, 2165 bp, Cannabis sativa
aaagatatttacgaatttaaagatccggttccccaccttctcgagaagccaccaagactatatgaagacataattgatgagaaagaatggaaagagtttgtggcatcgagcttgagtccaaattgggcggcgaagagaaaaaaggcccaagagaatagggcaaaaaatgtttacctccacagctctgaacgaggtgatatgaggatggtggaagaacaaattgagaaagagttaggccaccaattgaacgatatttatagatttgaagtatggaaaagacttggaaggaaaaagaaggatgaggccaacgagaaatggtcagatatggagaggcgactttgtgaggtagaggagcataataggcagatgcaagagcaaatagatgaactccttcgtttattccgttcctagcatagcggcgttgtgggtacatcacatgtgtttgatctggtgttggaggagcattgaatgaaccagcacgtgttgaccttgcctctgctcccgtagcacaactatcgcgtgtttccatgtctctgctccaccagcaccaccggtagctcgttctgacactatctctgctccaccaccaccactacgtgctgggaaggtttttgctccaccagtaccaccgccacttattggtgatagttcagaagaggtaatcttaatattaattttcgaactgatttaatggaaaattataaatatagtcgatttacaaatttgtttcttgtttgatttgaaaatgcagaaattttcgtgttggatgcatgtttggctggagctcagtgagatgacactgaaagttgctacggggtaagttgtgaaagttacctacgcaacaattatcgttgggtatttctcgaacaagtccatgtggaaaatcttgatcttccgtgtcccgttcaggaagcattcacaactgtaggtcaagcgatatgatattatgtagcatggctgaaggactaccttacgccagttggaaaagacatggtattttttaattaatttattgtgtttattgattactagagagttcaagatagagaaaataggatcgccattgttagattacaaatcttagtgtgtgaattctaggagggatgttaaagagattgtttctattctcaactttgttcatcaataaattcatttcactttctgaatattggtttagctactgtcattgtaagtatattcattgtttcttgatgagatttaatccacaacagatatgttgtgatttttaagttgttttgttaatcattgtgtataagtttcttgtggtgattagatcagccaaattgtgttgtcaaatgctgatgtggaccgagatcactcgtttgtttcgcagttagttatgactgttcataactaactgtattgagttctataactatgtgcagctctgttatgatgagtaggaatagaattcagagagttttggagggttgtaaagagttcattggtaagtttactttgtaatatcagaagcaaagtcttcttggtgtgattgtcttcttgtgttgatatggattcatcaataaagtttctcagccatttcaaggctgttgtacccctcttcgatagcaaagacacaatatattgtctttgtctattgaaccgagtaaattctggtttgaattttgttggagagtagtgattgatgattactcctgttgcagttagacctgatcattttgtgttcgacgagggccgaagcacctgcacccacatgaatcaaaaatatcagtacacaaacaccattgaaatggcaggaactaagaaatataaatgcaaagtaataagaagagaaaatgcaaaccaagcagctgatgttcctttctttaccttactataaaaatatgctggcttcaatatgttggagatagaacatgttgtcaaaagaaaatgtaaaatgagataatggagctataatctaatctaatcattaagaattctcatctttataatgaaatgttgaatttcaaaaccaaccaagatattttgttttgtcaattccaaccaaacagaagttttggacaacaaaaaaaagaagaagtaatttacggcgaaatctctttatattttaatttttatacatttaattttcttattttttagcaaaactcctttatgtttattttttttttttgcaaatttga

SEQ ID NO: 27265 - DNA, 1638 bp, Cannabis sativa
ctcccgtgaaaaaatttgttgaaaaaaaaaaaatattctgacatgtattttcgggcgtgaaggttgactaagaggttatagcaggaggttgacagtagcactcctcaaataatacatgtaccttacccctaaaaaataataaggtaaagtgtagagtattggtagtacaatatttttttagggtgcatgtagtaccgtagaataagtatactttactcatttcttatttattgtcattcctaatataaatataaagtctgagaattaattatcattagatcattatttaaatttatttttcgtctataaaacttttaagaggagaatgcacccttatctatttcgtttttagaataattttttagattttttttttgaatggtcatgtacgttataattatttaagatattttataaattttgaaatatttaaaaaatttagcacgcgcaaaaatagagttcaaatcatttattgcacgcgtgactctttagtatgtaatcgtgtaaaataaattgtttaaactgctttttatattataaattattttgaatttctaaaaattttacaagatttttttaataagtataacgtacataattataaaaaaaattgaaccaaacaattttcttagatgccaaaatatataggggatgcgtcattgtataataataacgataattttaataaattaatataataataaaaagaatattctattttatttaaaaaataaataataataaagaatatttttttagtgtaactcttgtggttagaatgaaaagaatttttcatacaaaatttgatgttagtgtaacagtaatctttttttgaataaaagtaagatttcattaaactgaaaagtcaattatcattacaatagaacgtacatcaggagacaaatcacgttcctgaacttgtggagaaacatgagctgtgcgagcgagacaatgcacggttttgttatcagatcgttcaacaaaaaaacattgagaaatttcacaacaactaagtaaaagacacttacaatcttgaaccaaaagaagatgacatatataaatttagcatcaaaagatggtgttagagataaaattctacaaaattatagtttataataagagaaataagtacttctggtacctaatactttaagtgtaatattattattagtataattattaagacttaattattttactttaataaatattataaaaaaatggttaactaaattatgttgttgttaagtatcttggtattgagaaaaataaaagagaatagtaaaaatgattttcctatatgatccctaaaattgttcattttgctaaaaggtccaaacacaaaagggacccgctcattacaacgggtaccaagtaggcaagtaggccatggctgttgatattttcaagcaaaatctataaaatccattattttattcctttttcttcttcttctttctttctgttcataccaaatttcacctcttttgaggaaaaaccacagcctttttcatttcaattttgatgcaattcaactctctcttcatgtaatccgacttcacaacaagctcctccaatggccaaccagtcttcctccaatctagtcctatgcgcttctttcaatcaggacgccaggta

SEQ ID NO: 27266 - DNA, 2573 bp, Cannabis sativa
  modified_base (28)..(34): a, c, t, g, unknown or other
  modified_base (1269)..(1269): a, c, t, g, unknown or other
gtacaataacgggacaaaatcatatccnnnnnnntatatatatatttatatataagaatatgtaattatatatttaccagctctgataagtgagtggataacaatgatattagtagaggcttcaatgtgaattccatcagtgttgggacttagaggaggtgaggttatagacaagttgttaatttcaacattttgactattccacacaagtacatgaacttgtggactattaatcaccaatatgtttaaaactctaacttttgtacaaaatctgaacttcaatgtctgcaacaacaaataaaaacatttatgtatgtacacacagaatccctattgtttttttatttgttttgtaaaatgtttagtatatataccgtaggccttctattgtaacaaccctgtcaaagtaaacaaaattgggattaggaaagcttctaaataagatcaaaacaaaaaatcatataaatggaaaaattcattgttaatcaattgataataagtgtgatattataataagcatatataaatgtgggactaaattttccagctcgttaaaattgaattccaaacaattcacattattataaattagtttttagattttgttatacatgacaaatagaatgagaatatgattgtttaaggaattgtcatgtaaacatcatatgtaatacatgtgtaattaattttaaaaagataatttaaaagtttcatataaatttttttaataatttttactttaatgatctcttaataatacaaattttaaattataatttatttgcccgtatcataaaaattaacaaaagttccactttattatagtgtgaaatattgatagttaaaaacataagagacacaataatatataaattataatttaaaaagcaaaaattttaaatatatataaagtattgttaataggtattagtagtgtctagtattttttatagatgacagtctaataattagttagtaatatttcgtaaaaattattgtattaagttttatgagaatcgaatcttaattacatcaataacaatatgacatcaaataaagtactagacactaataatattctcttatcatttctgaatatgtaggtgtatgtatagagtagtataccttaaattgaggatgacgagcacaagaggcatcccaccatggttgaccacgcccatcaatagtgccactcccatttatgatgagaccattaacattctcaaacaatatcaaactatcagtgcctcctttccatttactaggacnatttggtgctacaatccctccctctatctgcaacgaaattatacttttttattaatataataaaaatacataattaaaaccatttatatcatgtagattaattaaatcattattattatttaccagaaaaaagaaattagagggtttgcatgggccagaaaagatgagtgaatggaccaaaaatgtatgacctcttggaaccaacaagctaggattcttttccactgaattacatgtagcaatccatgccttcgaaaatgcctacatttttttaaaaaagaggtaattatatttaaattttttcgtttatttattttttttttttacatttttaaggtattatataaaaataatagaaaataaatccaataactgtaaaaaaaaaaaaaataacattattatttataataatataccaagctatcatctgtaactccattgccagtagctccatagttcaaaatatttgctacacttgaagttgccatagtgtagtttggaattttgcaaatcagggccactatgtatataataataatctcaaataatagatcctgttacataacaaaaaataataaagtaaaaaaatgttaaaatgttgtaattacaaaaactttgtagaagatgtgtagtttggtatattgtgcaaaccatagtggcttttgttttggtgcaagcacaattaaaagataaatttgaattcttttcaacacattaagtaatatttgataacatttatgtttttaaattattaaatcacaaaaatgatagtatattttttaaaaaacaaaaatgagatctataaattttattttttttatttgttgaatttgtttaatataggttagagtctaagttcaaatctggggtcgagtccaaatctgaggccctaaatagcgtcccaatctaggcccccaaccccaaccttgggaccctagccctggtccaaacccctgcctcaaaactctggccttggctccaaccatgaacatgattcttaattaaacaattaaatagtgaaaagagcttatagaattaaagtattactaaaattgaaatatcttagataaatattttatttgatgtgattaaaaaaaaaatattttcaataccaaaacacaccaccaaaaaatatgcattttaaatgtaatacttaaattgaaatatcaagataaagttctagtaattagatcaaatactgtatttagtatagtaatttcaaaaaaaaatatgatgttaaaactaaacaccaaaaaataacagaaatactacaatacgcatttttaaatgcaaaaactaagagc

SEQ ID NO: 27267 - DNA, 1152 bp, Cannabis sativa
ttgcatctcaaggtgcgccgctttgtcatcttcgtttaagaccaataaatcctcctttccaaaaataatcgaccttactttctccgcaagctcaccatcgttgtcaacatgcccatcttctctccctttattacccaaccgagaagcttttcctcgagccaaaacttttgccgatttaagctttcgaccattcgcaccgttcaccgttttttccttttcatccatccagcccgttgcaaaacccgtcaccaatcctgggaggttaaattcctgactttccattgttctctccatctcaatttcacgattgccctttttccccctggttcatcatcgatctccatatcgctcgctgcctccttttccatcgtcgaccgtttcttggaatggtttgtcgatgcttcctcatttctctctttgctacggtgacttcctcttagaatcgcacctctcccttctctcttttctcccttcttcgtcgatttactattggaaggactgcttttcttctgggaatcaaactcagtaacatcaaagagaacagatgcgacttcctctcttttgttctctacgatatgtcgttcagcaatgtccacttcaccctccctgtgatgactcatctgcattttatccacctgtccctcctcacgttgactaggatccacctcaataaaattccttttgtctccattctcagcagaactttccaaaatggttaaggttgactgctccttagataaaatctctttcacagatcctctaccaacgtaaccatctcgagacccaccaactccctcagccttagccgtttttctccttgtattgtccccatgaacctgacactcttctcctttatacaatacctgctgggtaattggtggtacgacactagcctcctcagaacgaggcctttggacaccattgtttccttcctcctcccaccggcggtgactgatactaggagtcaccagagttacaaaacagtttgttatgttactctcatcctttagccaactgccgtagtaaggtaccaccacgccagagctgtgtttcgtcttaaccacttccttcctacaatccatttgctcatgtccaaagtgaccacaagtaaagcataatagcgggagactttcaaacttgaactgaatccaa

SEQ ID NO: 27268 - DNA, 2043 bp, Cannabis sativa
  modified_base (46)..(49): a, c, t, g, unknown or other
tcaaatttcttatattgataattaatcagattgtaaagagttttannnngggcataaaacccaacacaatctttctcccttcaaacttcagcttagtggctccaaatggaacttgagtcctcttagagggatctggttcattaacggtggcaaggatgtgtggtttcccatcatcctttttggttagatctacagttgaggtgagtgaattctcaacagacagatcgttgccttgtttatacaacattttgtaatcaaaggatgttcgatcaccatacggaatctgaagttgtagggtctgattgatagcagttgtgcctgggagaatgaattgcagtgcttgcttagttctaatcagatcagcagtgagtttataaatctcattctccttctcatcaagaagtctgttgagattcgtaactgtgtcctctaacttgcctttttcagtctccacttgctccaaggagctctttagacctctgatctgtttagtcatgtactcccattgggcaaacatctcctcataatcattttgtctaccaatgctgtctgcttctgatgtagtggaaactgcatcatcttcagactcaactgagtgacagctttgggccatgaaagctagtacttgcttatccgcatccatgctcttactggcagttgagttcttttcttcttcactgtcactccatgttgcagcaagggtcttcttctttttgagagtgtttgcgcactctgcttggatatggccatatccgtcacattctgcacttgattcctcgattcttttgatcagcaaatggttgtccttgtttgaagttttcacctttgctcatcttgagagcattttctttatcaacaggaaaattcttcttgtagttatttttcaagaacttggcataatttctcgttaacagggcaacagtctcatcagtaatgccattaatttcctcttgttccgatttcttattttcttgatgaatgagagtgatactcacatcagatttatccttgactgaatccttctatttctttgttttcttccatctggacagtgacaactcataattctgcaaggacccaatgagctcattgagatcaagttcctcaatgttcctcatttcttcaatggaggtcactatagtcatgaatcttcttgggagaactcccaacacttttcgaaccagttttgagttggagtaggtttttcccagggcatcacacaactttgcatgaaattctgcaactgtctcatcttcctccatggtcagattctcaaatgccttagccaaagcacgcagccttgatttctttatagcatttgttccctcatcttttatttttagcttctcccatgcttcttttgcaatttcacagttagcgatgacctttaactggttcatggagacaacattaaatagtgcatataaggcctttgagttgaagttagccctttccatttcatcagcggtccattggctcatgggtttaggaataatcattaaattctccatcattgtcggtctaaacaacccttcttctattgccatccagactctttcatccacagctctcaagaaagcacgcatcttggtcttccagtatgggtagttagcaccctctaacatcagaggtctcgaggttgatccaccttccctacattttcatcctagatagaagagaaaaacagacgcctgtactatagttgtctgagaaagaactcagagggggttagtggcaacaggatcaacagatctaatctcaaacacgtatcaactgacttcttcagaatcaagaatcacacaagtctaggatctaacacaaaatttttagaaaaatttcaagctcagataccaaatcaaagaacaagttatcctaatttcatgattcaatttaccgagttgctcaagattagattcattaatttcaacttgatcattcaagattgggattaaagagtaagcagaaaagagcacagtgacttacaagcttcgtctgtaccaagaacaaatcttagccaactagtgcttgggttccccgaaccag

SEQ ID NO: 27269 - DNA, 4131 bp, Cannabis sativa
  modified_base (3418)..(3442): a, c, t, g, unknown or other
  modified_base (4007)..(4012): a, c, t, g, unknown or other
tgcatatctagggatttccttaaatttccagctacatgagggcctccaatcacgatctctagcctatctgcaattggcacaggctagagaggggcattgcccccagctagagcttcaggttgtacatatcactaaagagtagaatgttttcgtctgataagaaactatattttgtccctcaagtgattacactcattagtgtcatgacaataattgttgtggtagcgacataatttattgatgtctctcttccttaactctttgaagggaagactttagcaatgcaacactgtagactctgtggccatatagatctcctctcttggggccatgaggatggagtaggttgtaaagtgaggctcatactctcgtaaatgcctgccctaagccttgggcttctttccacctagggagttgccttacttaccaccattgttggcttttttccctctgttagaacctcttttcttcccattatcatggacctcagtgttagaggatggggagtctggaaacttcttcttgccaccttttgagcccttggcttaagtgacaacatcttctagtttgataaagccatcggctttatggaggaagtcattcattgtgtaaacagccttgagatgaaggtcagaccacagaggattcatctcctttagtccagttgcaagtgacattgccctcacgtcctcgccatgtcttttggtcttagtggctgcctccaagaaccttttgaggtagtccttgagcgggtcatcttcctatttcttgatgtctaccaaatcattgggttcgagtttgcgttgtctgaaaggagtgaattggttgccaaatgcatccactagatcttttcatgaattgattgatccaatggataggttgaggtaccaccattgagctagatttgtcattgtggcagggaagattctataattgacatcatctcttactccttatcgatttgtctgcacttcaaagtagtagatgtgagatagtggatcttccttcccagtgcattgatgcaagtaatggttcttgaactttggagggattggtggagctttgattctttcagagagtggtgagcatcgctccttgtcaagttcgaattctaatagcttaggggtcgtggtccctttcactaaggtccctcaggtatcaaattctaccttgttgataccatggatggtggtttgcatcccagttagagattttgttacctagttagggtcttctctataagctccttcttccaccaactttttttttatttagagcgtcacgtaggtctctttgtcttccaagtcggtcatggacttcgatcgacttgttcttatagttgtcacctaaccacaaagtcatgaaggaaactctggtgatgtctctcaaatgaactccagatcatctcgggggatgctctctaggagtggtcatcaacaacattgtagtgactactcccctcaaagttgtcttctcctagatcacaagtatgaggagaggtcaattggttgctcaggttcaaatcctctccatgtactcgaaagaagtactcatactactggccattgaggccacaggcaaagtaacgacacaactcacccatttcatctcgaaagtacttttgagtataaagtggctcattggtcattacttgccgcatctcatagcctcaagtttcaaagtaaagcattcaattacctccattgtcttgagtggtaggtctgtttccccttgcaaggtctcagggcctagtatcataagagcattgaggaggacctggtggaggagtcatgttggttatcccaatgttctgaggtcactctacatcagatgaagggcccattaattggtgcctaaaagtttaagtctgttcgagatcttgctcgaaggtagcttccttctacgaggtatcaacacctagtgttttcttgatgcttgtactattaccctgtggtatttgtatttcgtgcattaagggtttctacttgagcactagttctcacgtgaccaattggtcgacagggagtctctttcaccaactcaaaaatactcctgcatggggtagttccttaacctaatcgataggcttctctaatttgtacagagatcctagctctccactattccagatcaactcattggatatcgatgttttatcatttctctatgaactagtattaaaactcttcgtgttgagtgtcgagagagtctcatagcttttgttgtagatcagccacaatttgaatgagttgttcaacttggggatcgacttcctcagggtcttgtagctccatgtgtggctctccaggtggaatttgctctctagttctaatattaggagcatttggtggccttgggggatgagttgtggagatggttttgggacctcctcctcgaacatgaggtgtaagagtagtcctggctctagcttcagtaactggcgtgccctcacttgtttttccagatgttggggcacccctattgatgctttaggaacgttttgcaaccatcttgaaagtaactttctatagttgtgcctctcaatgaaagcacaaaaatattgactcaaaaatctgggtagagatttcctagccacacccgctctcaaggttggtaagaatgaaatatttgttaaaaataaataaagagagacacaacaatttatagtacttcacttcctgtatcacgacaggaaagaaattacgtctactatgagtttttatttctcaaaagatcgtattacaaaaaaaatggctaagggtgcgtttcgtaacacatttttaatcattattctgttctttaattagaaaagttaaaacattttctaaaaacatgttctgtaaaattattttcaattttcaatattttttagttaagaatcaaaattttgaaaaaaaaaactttcaaaatttttttaaatagtttttttttttcttagtcaatattttggactctaacttaaacttggaccttgggactcagacttcgccccaagccttagtctcagacttagaccatggccccgaccctgccaaacctagattcgacttaaataaaattatcaaaaactaaaaatgaaaatgaaaatgaaagttataaaacacacttttattttctatttttaaaattgaaaaacaaaagtggctatataacacatttatttttttgaaaaaaattaagaacacaaattttagtttcatttttgtaattgaaaaattaattaataaataaaaatgttaccaaacactccctaagtgtatcaagtctaacttctataggctctcttctttaataagtgaaggagctccttgaaaatagaaaaacatagatgaaaaacataattcaaactatgaaaaaaaaatataaattggcttattttttaccatagatgaatagtcacaatatttgttgtgactannnnnnnnnnnnnnnnnnnnnnnnnctaaatactatattttagtcacagctaactttttgttgtgacttaaagtcacaattagtcgcaaaaatttatgttgtaactaaaaatttgtcattaaaggtatccgtttttttctagtgtatatttaaattaattttcaaataaaaaataaaaatttaataatttagaccaatccgagactttcatgtcgtcattgatttgatacttatacaaaaatttcagatatataaattatgtattattacaatcaaaacataaacttaagtatttatttgtaatcaaaattttagtttaaatatatatacaaactacctaaaaattaatataattaaatatgcaacaactggagctctccaaaaacagacagaatctaaaaatatatttacactacaaaaaactgttacttaattttagtgataattttgtagtcacaacataattttttttgtgactaaatgtgattttatatcacaacaaaatattgcttgtcactaaaacataatatttagttacaagttaacattaatttaattttagtcacaacaagtattgtgactaaaaatannnnnngtcacaacaaattgtaatttttgacgtgactagtcacagaccttttaatcacaacataagaattataatttataattagttaatcaaaatttgtgactaaaagtaaaaaaatttatagt

SEQ ID NO: 27270 - DNA, 1233 bp, Cannabis sativa
aagactatgatgtccacaatactatgagaccatcgattagatgggtttttaaatggaactaacaattgtcttcctgaatttgttgatactagaacaatgatggaagctatcaattctggagattcaaaagctatcaatccaaaatataagacttggatcatcaatgacataactcattggatggctatataagtctatgacagagactatagcatgtcaaccttggaaattggcacttataattttcaaggttagctgaccaagaaatgaaggacgacatggcaaaagtcactcggcctaagggtgactcaaagtcactcggccccgtcatgaccaaatgtcactcggccttaggagtgacaatgtcaatcagccttaagagtaacaaatgtcactcaaccttaatagtgacaatgtcactcgtccttgagaatgacaatgtcactcgattatgacagtgacaatatcacttggccttgagagtgacaatatcactaggccttgggagtgacaatgtcactcagccatgacattgagaagtcattcggcaagggcattgtgaatgtcactcggcaagggcattcacgaatatcacatgaaatgacttctcaaaaaattactcggcatcctctgtagacaagtcactctgcaaggacttttcaagaaatcactcgacaataacttcttgagaagtcactcgaaaatgacttctcaaaaagtcacttggcagcctcctttgaaaagtcaatcgaaaacctccctagagaagtcacttgacaatgactttttgagaagtcactcggcaacgccttctcaaaaagtcactcgacagcctcctttgaaaagtcacttggtaacctctctagagaagtcactcgacaataacttctcaagaagttactcgggaataacttcttaagaagtcactcggtaatgacttcttaagaaattactcggaaatgacttctcaagaagtcacttggaaatgacttctttgagaggtcactcggccatgacattgcaaatgtcactcgaccatgaccttgtaaaacttgttagacactactacaaatattagaattcgcgacggtcctaaaaatgaattttttcggggaccgttgccaaaaaaaattaagtaactatttaaaaccgtcaggaaaaattcagtattcccgacggtttaaaatcatagtaaacaaaaaggcaacgtttttttaataaaatgtgaatttt

SEQ ID NO: 27271 - DNA, 1281 bp, Cannabis sativa
cctgctaaaagggtgtacatctccattcctaaataattataaaatatatttccaatactaatttaaactaaaataaaattgttatcccgctaagaagggtgtttctagtacccccaatattttttcttatacacttatgtttactcgatttttctggctgtaaaaaattttcctgaattactgagattgttagatttaaggatttttatccaatttcatttaattttactaattcggtgattgtccatgtactaaataatgcttcccgaatttttatatttatcaaattatgtccatgaactttcattcatgttagacgaaagtcgttaaatccatttatttcaatagtacatgtacatgtaaaaattcttagggctaaaattctaaaaccaattatttataaaaagttctccaaggaccaaagtagttacccttaaatcatttagtttcaccaaattatagataggtacacacctgattttacagagagaggaccgttgggcatgtaatgttgattaggatagagctgatcttttcttcttctttttctccttgagctaaggaagagtaatgctattaacccaatgatgatgattccagctacggcaccccctataacagctccatgatttccattcgattctgatgatgatgatgatgatcttgagttttctgaagaagatgatgatgatgaagaagaagaagaccctgttttcgaaccagatgtgggtgaagacaagcttggtccgccattgttaccatcattatttgaaaaactgggagttggaggagaatgtggtggtgtgaatccattatttggtgaattacttgaggttgggcctttggtgtcggccggtggtgaaacaggggtaggtggggatccagattcccccggtggcggtggagatatttgatcagaacccgggggagtagacgaatccggtgatggaggagattgggtttccgatatcggcgatggtggttggttatttgagtggtttggaggaggagaaggaggattaggcggcggaggaggtgagtctgtcggattattatccgatggtggcgggtctaaaacaggtgtcgacgacggcggtggcggtgttggagttggcgaacccgaaggtggaggagaacccgaattcgatggaggcgatggcggctgaggtggcggagaatcgggagctgacggcggcggtggtgatgatgatactacttcaggtggtgggggagagagagtagcaggtgaagaaggggggggggtttgtgtgtcgccggtgg

SEQ ID NO: 27272 - DNA, 6001 bp, Cannabis sativa
ttattccagtgaaacaagttccatgtataggagttaatgcactcactcgaaaactgatgtggaatatatcaaggtgaaattctaatagttgattttgttactgactaaccgtttccaaggccatatggaaccgagatgcaacaaaaggaagaaccaatgtaggttccacatatgacaaaattgaagtggctgcagcaactgtttcagaaagatgttcgtttttgctatattgaccacgatcaattaacttcagtagcacattgacaaaagaagttctttccgattttcctagactatccgcacacgcgttcctatgagaacaacatttagaaggaagattaaaatatgctcaagtgtatagataacagatctagcagattgtatccttacagttgttcatgctgtaggcgtttctggaatgataaaaccaaatgcatcaaaaagcgctctaatgagtatgtccatcggccaccatttgatggatggtaatatctacagcaattaacatcataatttgatcaaaaaaaactcttttttaggaaggaaaaaaagtatatattaataacatgtaagtatacaaactgttctaagaggttgaccaatttctcgaagtgttcctgtgttgatccaccgggtttcaacaaataaacctgcacttccattaagaacacattataatataccgagaatcgtctcgtggacagaaaatcatctgcattgtaggaatcttacaattgacttagcaatggcctttgctggggtcattgttttgttggagaacaaaaaccttgtgtttcggggaacatccaccgagaaagggtatgacccacttccatttgccactgggacctaaaatgaaaaagttgagaagatttgagggatagaaattgcatacactacatgcaaaatttaggtatgaattattacctcgaacatgtttaagtatctgttgaaaagaatgggtaagaaagactcccaatcaataaatttgtaattctttatgacgcgagctataatggctgcccactgactattccaaaattgacaattcggtatagattcccacatatctatacactctttaactatatccctgcaatgcaaatttgaaaattaatattttactcaacacttcaggctaaaattttgaagaggaagagttcgaatcgtaaatgctcctactctgaaaagaagtcttggttgtcctcgtttgtaggaagaaagagtctcacaaaccctgatccctcaaatgatgaattatgccatggattctccaataaagacctgcatatttgtttttataagatacattgtcaaaaatgtgagtagcaaatcactaaacatcatgaattcattggtgattgacaatttttgagccttgaagcaattacctaaactcagaccatatctcagatgcagcgcccagtgggaagaacctccgacaagaccgaacaagggatgtaatcatctcaaaatgtcgttgtctcagtctccaaccttctggaccggtattcctgcaccatttacatacaatatagtatattatatattatatgcatattaactaattttacatgactggaggaaaaaagaagatagaaacattaaacttacctggtgaaatgtgtgtgtatcagagtatcataaagtgggcgccactgaactcggaaggacaatttcttcctatatttgttcagtattctaatcagaagatttccccatctaacctattaaaacaaaccgaatcaacatttagttagagattaaaaaagaaaaggagaatagcaacaaataagtggagtgagaatatttttcagaaatacaatggtagcatacctgaacgtaaagcttgttttctgatttgtgaaacaattctaacccaacattcacaacagcagtcacatcttccaaagataactcacttttagcctttatgaaactgcaaattaaatgttaaaataagttagacaataaaccactctagataacatctaccattgctttgaatatgccaagtagagagtatgctaccaattacaagtagtaaaaatcatatcctattataataaaatcggtagttgaacaaggcgaagtcttccaccatgaggaggaagaagagcaaccacctgaatcttcaatattcaataatcacattttactaagttaagtttttaacttaagttgcaggttgcactaccattggttcttaacaaagattaactaagttagagaaaccgctctaacaacccgaaagtttccatttttaacaaagaacacccatctagataccaattacaaagtactaaaaagcatccaatcttacaaccccaattccagtcattggagaaggataaacagcaagcctctgaatcttcaacattcaataactaaacttactataaaaaccaaaaaagataaacactttaacaaagattaactaagttagagagaaaccattctaacaatctgaaactttcctttttttaacaaagaacgttccctaatagatgcttttttgtttttcagatctttcttagatgatattgttagttatttacttaattttcctgagacatctctgcttcatgttcgttgcatacatgaattagcagttcgtacactcatggtagataacgaactaatttagatggatgttttctcatctttttccgatgatgatgtattaaactcaaattattttcaatgaatgttcattatccaaaaaaaatacataacatcttcacaactattttaacaaccccaagtcattgaacaaacattaacaaagttaaagagaaaccactctaacaatctcaaaattctcatttttaacaaacaacattggccctgaatcttcaacaacattcaataactaaacttactataaataccaaaaaaaaaaaagataaagataaagactttaactaaatataatccttaaaaccaacggtaatgcaattcaagaactaaaattcaattcccaattgtacaaattaatccaaaaattcaatcaaagcacaaaaaaccaaagtcattaagagtcaaccacagtgaaaaacaaaacaaaacaaaaagaaaggaaattgaacaataaaaaacaaactcacagttcgattacggaaacccatcggagagtggagtaaacagaatcgggatcgttgtcgagtcggtaagaagcatttaaggaggttagaacacgagagaaagagtctttctctcgtttagtagcttcggccactggcggtggaagccatgcattgtagagatgcatagtgatatcaaaattggattttttttttcttggctacttgaattttctcagtgattttccctttttcttttcagacaagaaaatgagagaaaatgaagatcaaatgaagtcgtttctcttcttttattacaaaattattatatatattggggaaattcagatttggggtttttttatttttaatttttatttatttcatcatcaaacaaacaaaattcaaatgaataatattaatttatttatttataattttataccaaaagattgtcaatactcaaatagaattgtataaattttcgggagcaattttgtttattcgcattaagattttagtagtttatggtttaacaaaacatgtctttcgaggagggtgctatgttgattgcgaatttctatatcgtaaattaattttttctttaaaacattgttattaagcatcagtagcgtttagcactttttataggtggcgttttacgattgattagagattttttttaaaagtattttcttaacttataggagactcgaaacttaattatactaatagtggtatgacaccgagaagggtgttagacaccactaatttgataccttttaacaattttttttaatgttgaaattgagaaattgtggtcaaatttaactttgtcaccaagaaaaaaaaaatgaaaggtttaacttgacaatcaagtcttgattttgtgataagagttataaaatttggataaattatatgtgaaattaaaattaattatatatgttggggcaatttggggaaatttttttattttttatattttattatttattttaattttcatttacttcatcatcaaataaacaaaattcaaatgaataatatttatttatttataattttatacaaaaagattgtcaatagtcaaatttaactttgctaccaagaaaaaaatggaagtgtaatacatcatgtttaaaaaacatgtttggtatcatgtcttttaaataatgcttatatgaaacattgtattttaatatatttaattaaatatttaaacttggatttgaaattcatataattattaaagaaagtttagtcaataaatatgaataatttttaaacataattattattaaaaacacaaaatactaaatatattatttagataaaattcaaaatactagtacacacctaaaaatatttattgttaaatttaaattacctattttgttttacttattaaaatatatgtttttaatcacataggcaagtttaatattctcaaaacaagcatgtaatttgtgatgttctttttaaaaaaaatgaaaatttgtgagtgtaaaatatatatataaagaataaaaagaaaaagatatttgagaagaaaagtagtactaagtgtaattattattgttgtttaaaaagtaggaaatttgtatagttcattggattacacgtggcacgcatagaagccatatataaatgcatgaaaaatggtactagaagagaatgactagactagtgtgatatctactattaatctagtacacatactttattttaatagaattgctcaaatttattatttaatatttttctcagtgttattaattaagtatcgagtcacatataatttaagaaaatagttcttaaaaaatatcgataactaatcgtaaaacaacacttataaaaagtattgggcaccactactttctgttgatgcctaataataatacttttattttaattcatttattccttaattaatattattattatatatttattgagaatacattaaagtaaaaagaagggagctaataaaaaatgaaaaagtgtttttgttagtgaagaatgaatgaatgaatattgttaattataatattattttaattaataattcattctataattatttttttttattaatggtgaataattttattcaataacttttaaccattacaatgtccattaacgaagtacgagcattaagctcattgaaggtacaatctgacataaaacaagaccctctggcaacacaatgagcggccttatttacagatcacttaacaaaataaaaaaaaaatatgatttatagaaaagagcaacaaacgacaatcttgaattaaaagaccaaatggaaatgacataggaatcgtactattgaccgcctgaatcactagtaaagaatctgattcaatcaccacctccgaaaaccctttcctctttatccaactatgcgcttctttgaccccaaacacctcagccagctcctgtggaacatgatcgcttcggctgccatccaaagcttctatcaaaccgccaacatggtcacagatcacacaaccaaaaacgtacctactctcactttcaaagatagatccatcgacattaatcttgatcatattccctattagtttttgacactgctcacaggcgttattatcattcaccaacaacaacgcttctcctttttgcttttgagccgctttccattgatcaagaacagtactagccgatcgaactacagtcaaagcaaaccaagatttattactccaaaacagatcatttcgagcttgccaaattcaccaactgatttgtgtcacgtcctccacccgatgagagctgttgtggctaagctgctggaaaaaccagctactgaaatcaatagcagtgaaattccgtattttaatattcccagtttgattatttaattaaatgattaattaaatgcggaataataaaac

SEQ ID NO: 27273 - DNA, 2072 bp, Cannabis sativa
gttgcagccatatactcaacttctgttgaggataatgctaccaccttttgaagattcgatttctaactcacacatccacctaggactgtaaaagcataccctgttatagatcttcaagtgtcaatgcttctagaataatcagagtttacaaatccctcaacttcactagttcttttgttattgatgttgtatacaagtcccaaattcacctttagatatcttagaatccatttgacaacagtccaatattcatttctaggatctgaaatgaacctactcaccatgcttagactataggcaaggtctggtcttgtgcagaccatatagtacattaaacttcccacacatgagtcacatagaactgtgtccatttgagccttatcttcttctatctttgggggttgtgattgagaaattttgaaatgaggtgctaaaggtgtggtaactggttttgattcactcatgcagaacttgtctatatcttttgaacataattgctttgtgatgggaatgtattcttaggactctctcttttgatattaatcccaaggattcttttagcctcccccatatctttcattttaaattctgcattgagttgttgttttagtttgttgatctctagtctttccttgtcaatgatgggagtgtcatcatcatgcagcagtagccaaattggtatgttgttatagtacacacaaggatcatagttgctccttgtgtaaccagtttctgtcatgaattcatgaaatcttatttttcattgtctaggagcttgcttaagcccatatagagacttctaaaggaggcaacctttgtttggtttgctactcttgtagttatctagctcaaccatgtagatttcttcttcaagctttccatgtaggaaggttgtctttacatctatttggtccatttctaagtcaaattttgctacttttcccatcaagatcctaattgaggtctattttaccactagagagaatatttcattgaaatttataccttccctttgactaaaacattttgctactaatctttccttgtacctgatctcttcacctggcagtccttccatttccttgaaaatccatttgcaaccaattagcttctgttctgttggcctagtaacaatcttccatgttttatgtttcttgagtgatgtcatttcttcatcaataggaggaagccatttctccttgttcttgcaattgacagcttcatattatgtgctaggaactaagcattttacttcttttgcagaagcaagcgcaaatgtagttcaattagcaaaactaaatctgtctggaggtttgatcaccttcctctccctgtctctaacaagttgatacccctaagatccaccttgatctatttcattgtcttcaacttattcctgatcagtttcatcatgtctagcattatcttgaatctcatcaagttgaacctgcatactgtctgtgacctttgtctgagtcttgtttcatgtgttcgattccttcataggcatttcattctcattgaaaatcacatctctgcttatgatgcatattttgaaaccattgtatccttttaccccatcaggatatccaataaaataacattaattttagagcctttggctctagcttgtcttgtctaatgtgtgcataggcagtacacccaaagacccttaagtgatcaactcctggagcatgcatggcctatccaccattcttgaggagttttaaaaattagtgctatagaagggtacctgttgataagatagtagaaagttttcaaggcttctccccaaaactattttcccaaaccagtagctattagcatacaccctactctttcaatcaaagttctattcattctctctgctatgccattttattgaggtgttttgataacaattttgtgccttcttatccctgcctcttggaaatacctgttaaactcatcatatcaaaactccaaaccattgtcagttctcaacattttaattttcttatttgtttggttttctatcaaagttttccaattggcaaaggtgttaaaatagtcatttttgttactgagtaaga

SEQ ID NO: 27274 - DNA, 2117 bp, Cannabis sativa
cctacgagaagtaggtgcaaaaaattctttttgaaaataatactcatttatctgaatataatttacatccactggttaataaattttagaggaaatagattcagcataaatagattattcatttaagataatatttaaggcctttgcggcaattttggtaatatttgtggcaaatatatattgattatatgtttcgataaaagtaattttttcattcttattatttcctgattcttaatttcttattattgcaacgactttagaggagaatatatagcagtagcaattggtgtatttgcagtgacatatacctgactttttttttggtcattccgggtggtcatcagattgtttattagggttaaatttcctatttttagccgatattaacataaactgtcatatatagttgagattactggcaatcaacattgatttgggcctttccacacctttaattatgtacgtatggttaaaatactgtactattattcaaggttagcataaactatcatatatgagtgatatccatcttaatattttgacgagtaaaatcaagaagaatattatctaagtgctaaaagtacggtgtatatatatatatatatattttagtctaattttataaaataaaattcaataatcgtgtataaattagtccaaatttaacacatgttaaaaattatattaaatttgacataaatatcaaatgagtcaaattttatacacaatatatattattttttatttactcttttgtgacttatataactagttattggtaagcatgtttacttagagttgttattatttaatcattaatttaaataatgataaaaataaaataaaaattaaacgtatttggtcatatttttttaaaatagttttcaaagttttttttttaaaaataaaaataaaaacatttttaaaaaaatatcaaccaaatacaaattatgttttgaaaacttaaaaaaaaaatagaaagaaatgtcaaatatattatccttaaaagtaacttttttttaataatatattaagatgatatatttataatttagagagtattaatctttatcctatagaaggaatttgaattggagagttgaaaattaaaaatttattctttccatctatcatttctttccttcaatgttctttctctcaccaaacaaaaattttatcatctcctcccatctatatatagcgtcttccctcttttctctactcacccactcagctatccataatgtaaaatgacgttcccatgtttatgcatatgaaattatatgtttatttatttatttttttatattgggggaggaaatattcagaagacttctttttttttgtgagtagaaatgtagaaccactaataactaatctatgcctatgatcacttataaaattatatttatggatttgttataaagtcttacaatgataatgtgtgaaaagataaataatagctagaatatataagatgaatgggctactcctcccattgttaattggttttgagttggaatctcattcatcttattttaaattctaacatggtattagagcaaaaacaaataaaaaaaatcctctaatgattatccaaccccacaaaaaagtgccacttgtgatcagggataataagccgcttatgatcgagttgtccagatggtgagcaaataaaatagctaccatcttgagggagatgttagagagtctcacattactataatgtgtggaaagattatagaatgtataagatgttggaaatttgatgaatgctttaacaaaatataagagtgttctagtgtgtgtgaagtggaaagagtcccacatgggacatcaacccttatttacaagaatatatagagtgcaattttggcatttgagtttgggctccaaggggtactagttttgtgcaaatgggtgaggactcacacacttaacccccacaattatttaataaaataattatttttttatttttttaatttaattaagaaatatgtttaattggaactgattacttagtcttaataggacacgtcaaaaccaactcaccccaccattcagaaaacgttcttcttcccgttatgattttttaatccattcgtctatat

SEQ ID NO: 27275 - DNA, 2050 bp, Cannabis sativa
aattaacgacatgattcgacagaatctcaattaatgacctttcttgtattgatcatgttaatcaatattagttacccataaaagccaataatgttggacttaattataatactatattatatatatatatagttacatcaccttaatgacatcaccaatattatatatctatatgtctatatatatatagaagcatatacatattcatgcatataacatatataagcaattttggtccaacctcgccgccgtgcgtcatttgacacacgtgcctaaaattataattaaacttatttatttatatataaatatatatatatggtcttgggtttgaacttggcattaaaagttaattacaataatccaaaataatccattgaaaaacatcctccttttccaataatcttataagttataattgtttgttttaatccaatcattttctctcaccaattttttatttatttcttcatatatatataagctaagttagcattgtcacacattcaaataaatcatacaaaataaattaaaaaaaaaataaaaattcatcatcatcatcaatggagtcttcatctttctactttgatcaattttcaactagcccagaacaaaatttctcatcatcttcatcatcaacatcatcaatttcatcactagaatctctttcatggagcgaattactcgatttccataacgacaccgttttattcgaagaactcctaaacggtacaccgcaactacaatacgacgtcgttaaagcagagcgagtagaagaaggtcatcatgtaataaatcaaaacgacgacgttgtaataacgaaaggtgaaatgactaaaaagtcctcttcgtacagaggagttagaagaaggccatggggaaaatacgcggctgagattagagactcgactaggaaaggagttcgcgtttggctcggaaccttcgatagcgccgaagccgcggctttggcttatgaccaagccgcattcgctttgagaggctcattagccgtacttaattttccaattgatgtcgtacgacaatcgcttattcaagacgacatgaacacgtgttgtcgttttgatgacgtggcaaaagaaggattttgtttttctccggtggtggctcttaagaggaaacactctttgcggcggaagaataataaaaaggcggtggcggctccggccaagaaaaataaaaatgtggtggtttttgaggatttgggagctgagtacttagaacaacttttgagtttgagtagttaataattattaattaattagttaatgatgatgattaagataatttggtaattaattactttttttttttttaatatgaaatctatggtggtcgatgggaccaatgagccaagatttgaagaaaagattttgagggatgtcatgttagtgggggtataattttaatatataatagattaatagtgtatgtactatgtatattatttttatgaattaataattaattatgtttttaaagtttttcttttgtaaaaagtttgaaaacgataggataggattaatgcatatatattatataaaatcacttttttattaaacattatcggattctttttttgtctaattaagacttattataggcattattataacttaactagcttgtcgacatgttaagaaagatatttattacttatgaacaattgtatttaagtatattttttttatctgttttagtattcagaaattagagtttatttattttgattttttttttttaaaatgtgcatatggttctaaataacaaaatgtatatatatgagatcatggaaaaaaaaaatagattaattttttttttatattgaaataaataagtagtgtacgaaaatagtctttttgagggcatgtactctagacttataacccctataattatttataaatatgtatatgaccctaagtgtattcctaatgttataacaaatacttttcattttttataaaaaatttaaataatttacagtgtgagaaagaatttcaagggagagacattcatttttcacatatat

SEQ ID NO: 27276 - DNA, 2081 bp, Cannabis sativa
tttggctagaaagtatttgaagatattacaacccaataactttaacaaattgcttacagccacacatcagtatttaataattatataattagtcaaatctatgaatgttttttcttttttctttatattgaaagtctattcatagctataaatagatgcaattttttttttttttggtaaatacatgtaaattaataaatgtatttaatcgctaattgtttatgagcttatattccatttcatttttatataaataaaaatttacggaaaaataaaacaaaaaatcattatgaagattttattagatgataggttgaaattgatcaagatcaaacacctacattttttataaagagagagagaagcagttaattataaaaattaggcagttaaaaaacaattaatatcaaattactctattaagtacgatatgaatataaatatataacaactatagtatgcgtctcacttttattcctatcgaaaaaaacatttattaatttatattttcgatatttggagatataatatatgatgttttacacaatgatatgttgtctatttttgaaaaattctaattaatttataatattgaaaacaaaattaaaaaataattaattgcacctacaatgtaatgtttgaattttatttttaatagctacaacaaattgctctaaattttttagaaacaagtgaaatattctgctataacaacaaggtgatataaaaaaattggtggactactataaaatatttctatgaatacatttatatgccatttttaaagagtatatgggtaattaagtcaaacaaatttctaactaaaagaaagacaaaaacaaaaattagacacaattaattacaattagcaaaaggaagaccctacaaaattaacaagatttgttgttgaccaatttcaaatatccaataatgaagaagtctttatgtccaaaggtaacattgctttgtgggctgtaaactgtaatgcaattgagaacctttttcttttctccattgtaagtaatttaattgagtactctttttgagtgttaaattaattaattttcaaggaagaatttggttcttaaaaatagaaagaaataaaaagaagatgaacagagaatgtttagattccttaaaaatgactcaaatattgggtcaccacgtgtgcatgcttactgagattttgcacaacacacgagactagaaaataaaacaaaaatatcaaattaaattaaattataaatataattacaattaaaaaaaaaaacagaaagaaaaacagatgtcaaatgcgttaagcaacgtcctcatttcactctctttaattaatctcaaatcccatttatagttcgttacgctaaattctcacaaatcccaattaattggaattaagatatagttttccatgactatttattcaggaacgagaatgatacagttttacgttatgccaaattatttttcaattattattgggactttagtaaaaataccctttaaattttttagtgtaacaatttagtccttaaaaaaagaattttatttacactaaaaaatttataaaacagatgttcatcaaaaaaaaaaaaagataattacaaagacacccccatttaaatatttttattttatataaatatatttttagtttgtactatttttttccttctcatattctaaaaaaaatacatacataaaatatgttttatatattaacataaaaaaaaataatatcaaaatttattagaataaaaaaactaaaaaaagaaaattaccctatatattattttttttacttatattttctcaaatttacggtttgggttgttacgataatttctccagtggtttctatgtgtgttgctatgtggattttggttgctccatcagttgttaagagaatttttatgtagaattacgtaaaaataaaaaaaaaaaatgttttgaagtgtaaaaatgaaaaatgcccaaaaaaacatacattttttgaaaagaaaatatgaaattaaaataatataataaaataaaatattaaaattgatttttgtaattgttgctccagaattcgcccaaaatac

SEQ ID NO: 27277 - DNA, 6163 bp, Cannabis sativa
tttcttttttctgtaggatatgtcatgtgtttcctatttaactctgttcatttgttaaaatttccctatatatagtaatagtattttgcttaatatatatatgtttgaaaagaaacaactttgtattaatattgcaggaaatacaaagtgaagagatcatatatgatcccttacggttataatataacagtgtaaaataaaatgactagacaaatactgcttagtgcagaaaatttccctaatctctactgagatctaggatggagagttccttatatcctttaaccttgtagacccaagttgttctccctcaggccttctgcttcattcaccgtcttcaaagattctgccatttctttctagccaaactaccatgaaaatagtgtgagtggcttctgtccactgtgaagaaattctcctacccctttcacttttcacaacaacatatgtctgcaagtacgaggcatacaccactgtataccaaatactcaaatcatcttgtgccacaacacccaagtgaaagggcctccaaaataaatgtgaaaaagtcaccccatctttcttacttgtacacaccatttttgagacaaaacctaatatggtcttctctcgtagtaatttctcatgaacgttcagtgtcacaccaaagctagaagtcatccgaattctttgatttttgatgttaagcaacttctccaaacagtttttccccattttccctcatgaagcaattggtgagaactaagtctatgaaatgctaatttacatgagaataccctgcttgtgtctgaattctacacccttctgtcatccaactgagcaaaaattggattttgctctagtattttgcattatatgtagcattgagctgctatgtttgtttcctgttgtgttatatatgttctagatgcttcatctaaaagtgtggtttgttataatttttatttggtataggttatctacatagcacctttgaaggctattgttcgcgaaagaatgaatgattggagaaaagggcttgttcgccagcttaagaaggagatggtgaatatttcgatctgttagccaaacattgatttttgggatttgatgctgataaagcaaaatgtttcccccaggttgaaatgactggagattatactccagatttgacagctctcttgtcagcagatatcattatatccactcctgaaaagtgggatggtattagtcgtaattggcatagtcgaaattatgtgaaaaaggtgcattcattcacttccctatgttatttcttacgagatttattttccttcatgattatctatttttaggtgttcctattgagactaatagatcataatgtgccttcagcctgcgtttgttaacatgtgtacttgttcaataggttggtctagtaattttggatgagattcacttattgggggctgatcgtggacccatccttgaggtacttgctaacaaatataatatacataagcattttattttataaaattagcacccttttcattacttgaagggcactgagtggttttgtatttatttagaaaaatttataaactatgcttgtaaagcaaatttggacaaaaatgctcttcgggcaaatatatatccctttctgtccttctcccttctaacattagaaacactaacctgaaatccatctctcatccaatttccatactcatgtaagcaattttgttgacacgtcccttgtaaagcaacacacaaaatcatgttgtccacataaaagctcattttgaatccattaaactaatgatctgtttatgcagtgatgtatatttgtctgaaaaacaaatattgtatttcgtggtgttttgtttatatttgcaatatttattgattgtttttttttttttcgctcagattttgaaaacttggttcaatctattattctacaatttttttcatgaatttctatctacatgttcttgagggttttaattcaacgctagttggatggtagcaaatactagttagattacttattggttgcaagtataatacatatagtctttatattttgatgctacttcttatggtagttcaatatttcgcctttaatgaatttcacattggcatttcaatggtaattcaatggttccatcagaacttaattttttcatgataattcaaatttgcatctgattcaaaccttcaagaacatattcatgacagtttcatcaaattggcaaaaatttgtagaaataacaaattaaaactagatttttagattcgcaaacaaaactacaaaaatagaaaaaacaaaaatgatggaacaattctaaatatatatggcattgtagaaataacaaattgaaactagatttctaggtttgaaaaccaaactgcaaagacaaaaactaaacagtttgacatagacatatatagaattgatttaattatatacaaatatgcaacaatattaggggcagtggggcagaaaaggagagctattagggcaacaatatgcaagattaattctaatttaattgtactataagaaattaagagggagagtgtggataagaggtttgtaggacttggactcttctacttgctatagggagatcaggtgggactctaatattatgggacacgaggaattttaaagtgttggactcattagtagaggagttttttatatcgttgttgattgaagctgatggcaaggacccagggtggtttttaagggtgtatggacctagcagatatggtgagaagttagagttttggggtgatatggcaggtttaggtgctatttgtagagacaaatggtgtttggggggagattttattgtggtttgaagggtgggagagaaaatgaatagtagatttattgctaaaagctaggggtggttatccaatcaaatttgcactattttgctcatagtgcatccgatctgcattaagtgcaaatttcatattttggatccaatccaattcgcataataactcaaatttaatctaatccaatctgcaaaagtgtggattggatcgattattttggattggttaatgttgaattatttgatatttattgaaaatatatattttttcacataactaacaacaatatcaaataaattattgttgttttatgtttgcaacaacaaattaaaataaaaaaaaagaaattcaaaagaagaagaaaaaaattatatgtataaagaaattaattttatgtaatattatatattttctttataaataagaatggaatatacgcttgatctattaagttttgaagtatatttgtatcatgtattagattgttgactattattttttacataaaattattaattgtatatataatttttttaaagtatatataaatatgtgtggattagattgaatcagttatttttacatgtcaatcaacatcagatccgtacatgtgtggatttttagattttccaatctaatccaatctgtacaagtgcagatatctgcactttgtggattggaacgtgcagattggattggattgagtattttatgaacacccctactgaaaacatatagtttgatgaactcattagggacctgagacttgttgatctcaaattgaataacaggaggaacacatggttagaatttagacaatgacccatttgttgcaggattggataatatatttattttccttaacaaatggaatgagttatattcctttgttaggcaggacgtacatgtaagaattgtatcagttcatagcccgaccgttttagattccaacccacttttgtggggaccatgtcctttccgtttcgacaattcgtggtttgaacataattctttaagaaggaacttgcaatttggtagaaggatgctcgagcagtgggttggccaggatacaaatttatggaaatgttgaaacaagttaaaagcaaaggtcaaggagtggagtcagtggtaaacgttttctgaaacaagtgttagagaggagaataacatagcttatcaggttggaggagaggggtaacttggatccacaattaggggaagaaagaagaataataaaaaaagtttggcagcaaatttcttttgaagaaagaagaatttggctgaaatcaagatttaaatcggccaaagaaatggttgcaaactcaaagctatttcatcgtatgttaactgtcaggaaatccatgaatttcatttctagaattgagagagatgacgaggtaattcttgatagagaggacgacatagtgaatgagatcgcttcattttgttctaatttatattaatcaagaagcgattgatattgagggtattgagtggaaaggagtcccacattacctagcagcacaccttgagaggtctttcaaggaggaggaaattaaagaggcaacttttgactatgatgtggtcagcaccagggccaaacggtttctcattggctgtatatcaagctaaatgggaaatattgaaggatggtttgatgagggtgttcaaaaggttctcagaagatagaagcattcaaggaagcatgaatgggacatacatatgactcgtacataaggtcttgtctctcaggcttcccctggggggttcttgatgatactatttttgaaacctaggtcgcttttttggaagaaagacaaattttagactcggacttggtggctaacgaaactgtggaggaatgtagaagtaagggaaggagtgaatttgtttttaaaatagactttgagatagcatatgactatgtcgagtgggactttctagagttggttctagcaagaaagggcttcagaccgaagtggaggaattgaatgagaggatatttatcctctctcctattctatttttattcatggcagactgagggaaatggtactaagggctagggagatcccctatccccatgaatgagacgtacatttgtcttatcccctaaatagctgtaaggtgaaggattataggcctattagtttaattacaagcttgtacaagattatttccaaagtattgtttatcaagcttcgggggttgttgactgttattgtttctgaaacttagtctgctttcatggaaaataggcagatcttagactcaatattagtggctgatgagtcggtggaggaatatagaagcaaaggacaaagtggtttagttttcaaaatagactttgagaacgtttatgactatgttgagtgggaatttttagacatggcattagcaagaaaaggttttggccagaagtggaggaaatggataaaaggttgtttatcttcagcctcttattctatttttataaatggaagaccaaaagggaagttttccgctgatcgacttcgttcctctaacgtaatctgaactattgattctgctactggttttgtttctcgttgttttagttgcctgtttcaccacgttcgcccaagatttttttgggccttctaccctgccaacttccattgcctccattgtcgatgactggttctccatcttctgtttgctgtttctttttaggattctattgaggcaccttgcaaattcactccatcccctaccttttctcaccatggttatcctattgtttttaaggacaaatagcttaatgaactcacccctcctattttggaacttctccataaagcaattgttcgagttgtttcgaaaagatctcttgtagttcatcctctgcttctcttcccttatctgcagatcttttaatacttcaactaacctcgtagctgcgaaacgattgattcattactcaagagacgagttcttttgcatatcccgaccaaccccccatcctttgttaaggtgagcataaacaccttatgagtagtacgaaagctccaatatcttttctttccctggtctccaaaagatccaggatgtttatccagaccaaaaccggtggggtagtagccctttttcttctcataaccagtggggttttggtgacgatcatggctagaaggaccatgaccacccctaacgtgcatgggaatttactcagtaagaggagagagaagagaggaacaagacaaaaattgtcaaggagtcaaacttctgttgttgctacctttttggcttagacatcttaatttcgatgtcttttttcactatactagatgtatgttctaaactttatttgtcttaggatttgttgtaatgt

SEQ ID NO: 27278 - DNA, 2495 bp, Cannabis sativa
tttcctttttatcttatctaatacttttgagtgattgttcccttgtgccactttatttgtctacaaaattatctaattctagacttttacaagtgttttaattaataataataatataataataaaagatggattaatttggataatattacataactttacaagattatcatcctctctatatttacaccctataacttgttttctcctaaattttatttttcttttggtgtacttttcgccatgcttgtgaatatgcttctatgctatatcagtattaaacaattaacaaacaattagggtcgtgtgaactagtctgatatttacaatcaacgcaagaaacccttatacaaagagttgtatatgacccttcttgcacgccataaacctcccaagaaagccataaaagtgagaagaagcaataatacaagtacaagatgacaactcactgctagcctagacagtaaaacacatttgttagttttagacgacggcttcctaatttcaccagttaagcactcatcgctggttaatggtgcttccttcgtcaatctgattcttcggtttgcagttccctgggaagcaatagactccacaggctcttgagatttctgcacattttcgggtgtggcaacagtccgatgtcgcatgtgaaaaccagcaggcatgtgtgtttcatccagtttgattatgtcgtctttcagtatttccgcataaaagtcatcttcatcaacataatcctgtaatatgcaaaaaggaacaggaatcatgagtgatcatctaagaaggtttgtatacaaagggaatctcaatctggatttatttatttttttttttgcacacataattgtatggattgtacttagaaatgtaatgtgtctttgttcgaagtgatgagatgtttgcaacttttttttttttgttaatttgcagtcatatgaagtcatgggaaagaaacttcagagggagaataaagaggagcaaaatgattttctttatttttaaaaataaactaaccttccgatggccagaacattctggttcctccaatgtgaatttttgattggattcagttgctgaatcagtttgctcaacagaataagaatcataactactactcttcttcgaacagcattcacctgccttctcagcttgatcagcaccagcttcagagacagcacagttattatcgggcactgttggtaatggtgtttgagttgtagaagcttgattggtagaatcatttagacgaaaatcaacattctttcgaagccggcaaacaaccatgaagtcctgaggtacaaagtgcaaaattaaaatacatgtcaacttttattaggtaaagtcacaccaatccgattctagataaactagatagatatcatttcaatagttcaaccttgcataagacatctccaccatgtaattattgatagaatccaaagtattgaataattatgattagaaatccaagtaggcacactttaaacttattcacagaatataaccatttatggctaccaatgtttaagaaaattgctaaaaggcattagtgatgccaccactatttgagatgtcatatggctatttgtacaatttaatatcgagtcccttatttttattttaataactactatggaaaatcgttaaccacttgtaaaggcgctatcttatggtggtgctaggcaccactattgttacctaatagcaatgctaaatgtttaatcttttcccagtccctaatgcacttaacattactaccacaaaacctagaaaatttcttgtttctttccaaccagaaaacctagaaaatagctttatggatcatctcgtaatcacaaagctaaaaagttctataatttaggacagtactcgcctaactgaggagaggttcaagcattgaggccctcaagcctcaaggcaaaatcctgacacctcaccttaagggagcttcaaaatcacctgctcaaaccatatctatcagaggccttaaatcaaggtagacattagaatataacagtaatagctaacaggcatccatgaatccgatttccacaaaatatttaaatgaattactagttaagactaacaaaagattcctgagacaaggaaaacaaatgtatcactctataacaacctttcgtactattactacaagaaaggagagtttcgtactaatacgacaacagaactgtcttcacacacacacacaggaggagagtggtagtattgaatcagcttgcaaatgtatgatgccgtttacagttgctgttttgtaaacatttcatctaacttttgaaaaatggcaattcatcggccatatcaattggtttaagaagttgggatgtgtagttttacttgaaaggaaaagcagggggaaactaggtgcaaattcaagatgggaaaaccataaaacatgtggaaactgttgtgataatgtcaacagtaaagtaagttttgtgcaataaatggcaaataatttttttttttttttt

SEQ ID NO: 27279 - DNA, 2198 bp, Cannabis sativa
atttgagctattgtgcggatttgattggattcaaaaaatgaaatccgcacttagtgcgaattagatgttgtttgaccaaaaaaatgcgaattagatcggatgaacagtcctacattaaataataaagtaaatatataattttgttattaaattattctatgacgccatttcaaatgtatatatatattctatgacgactctcatttgatatgattgaattttatagtgctaattgtataatttgtattgctaaagtatttacaataagaaatcaatatataaattagtttaaaaaaaaaaaattcaatataaattgcatgtcaaactatacatatatatataagaaaaaccgtacatactcatatcacctaaatatatacaactatatataacttcatttacatatatatatatcaaatcatttcttttaaactttttagattgctaaaaattttaccaaattattaaaattattagatttaaagattcttgtctaattttactaacggaagcttgacatagatgaaagttcagaaatacatatgttaaagttcaaaacataatttagtagatatcaaaatttaaaggcataatttaattagtacataaacaatcgtcacgttaatataaaattaaataaaattgaacaaaaatctttaaatttaataatctcaatattttaaaaaaaaattcaataacttgtcaatttcgagatgacataatttagtacgtacattaaaattcaagtagcaacaactttaattagtctctctccttaaattacttgaaagcaaaatctttcaactctcaatatatgctaaaaacctaatccaatcatagatttaaggcaatctaattgagtgtgaaaataaataaataatatgtaaagtgatataacctaaaatctgatgaagacaaacaaagtacaatgtaataaacaagccagttaggtagatttttgatttggcgttaagtaataaagcttggtctacattttaatccctttatataaattattatatatattagcaacaatattgatgatatatgcaaagaaattaagaataattgagtgcatgaatataaaataattaataaccacctaatctttggtcgagcctccaaaagaatgacagtttgccacataatattgtaaattcattatagtaggccttaataatttatatggaaatttaggtaatgataatgataataatgaacagaaatcaactgagcatatgatgatgatgactactacgaccaacccttaatggccacaaataaatgaataaatatatagtaaaaatgagaactttataatatatttataaattatatatgatattatgattataatactcacatgcttgctttggtcgactttagagttgtgtgaccaaaaatatacattctttaagggaattcatttttctcctatactttataatataatgcattaattcagaccaagtaatagtactgcactacaatattgaggctaaagaaacgagtctgaaaaagattattttaaataaaaataaataaataaaaacataaatcttgtggcaaatgtggcttgaaattttttttttctttggtagtattattgtttttattgaactttgttgcgttgaattttattaaggttaatatcctattaatcgatatcttctatatattggctataggaagctacttaaattttcataaattaggtttggctagagtctccagcactaacaaaaagttatgagttttttctttttttttttaaggtcaatatataagataatggaatgtagtgtgtaggacgaattttgttgtatatatatttcattggctctagagttacaattttaattgtttttcattgatatattatttatatgcatatagtgtgatataggacattgtattagtttttaaatttacaatggaatttataagtataagagctggttatttttttttttcaggtaggaataaatgttctgcatgaaaattattatatttaatacttattaatactattattaaattattaattaggttatgtggtgagaggcaaaagttatagtaaaaattgtatctggttcgtgattgaaataaaaataattaatatatttaggaaaaagatggtttattttgttattctatactaatattttgtttttctagcgaattttttaattatgcag

SEQ ID NO: 27280 - DNA, 2813 bp, Cannabis sativa
  modified_base (1908)..(1908): a, c, t, g, unknown or other
tggtaaaatatttccaacagaacaaccagttcagatccttgatagaaagaaaaaggttcttcgaaataagaccataaccttggtcaaagtgttttggaggaacaacaaggcagagggagccacttgggagttagagtctgacatggggactcaatatctagagctactcaagttagattttaaggatgaaattctattaacggggggacaattgtaatgaccgcattttagaatatggattagtaaagacaattagcgttaattattgatattcttataaatatttatgaatttatttagttgtgggtcccatttttttttagaaatgggcattagagttgtaatttctcaattttggagattttactaaactctagatgtattatttgtattatataggaattatgcttgtttttataaattttgctcgacaacagcgaaaaatgcgatggatggccatttgagtcacatgtgtaagtctagaacctttttttcttagtgggataaatatttgagatagatagaatgtcgggtttgagtggcgttgtggcttttgaccattttacctctagatttacatatacctattttgaaggaccaagggcatattgggtattttcatttttggaattaggtggcactatactaggatggcagctggccatattcttttattcaacaaggtttaatgttgaatttaggattttgaagaaagtcaaataattaaatgaaaaccaaggtttatctcttttatcctcccatctctcttcgaacaaaacctgcagctagggtttggcctttgagcttttcacttaacctggattcaagggctcttcttgtgtgggaaaattcagtggtagcttgaggtaaaccctaaacctttttatttcaagttttcttgagttgtaagtttgattttagtatgtatagttttggattattagctgcaagggtttgaatggtttttgattatgtttctaagttcttattgagttgagattgagttctaacagttggtttagatgagttttgttggaaatgatcaagtttgagttgaaaacctcaaacttgagtcattaatggaactttctttttgggtgtaattctggattttctttcttggaatatattgtttgagattatttgggttacctggtgcaaatgggttaaccagtttcacaggccttgtaaaaccggtgaatcggatcagaaaccggtttcctgaatttctttgtgttgttgactcgtgttatttccttgatacttagggtattggggtattagttagtaatggtagaacccttagttggagtttgagtatcccggattagggttttgacgtgttatttacccagttatgtaaatgtggcttagggcatccatccagtatgaggttttccgttcaggtcggccaactaatttgaattcggaaactatgtaagaatagtatagaacattttttatatgcgaatgtatgtatgtgtgatatatatacatgttgtgttgtgattgtacatgatttgggtgatatcatagcggcacaaccattgtgtcggttcggcaatacaatcatcgtactggttaagagttgtactcatacaagaaagtattaattggtgctatcatagtggtacaaccattttgtcggttcaatagtacatgtatcatactagttaacattggtatcatggccaattatacttttgggtactactgatgatatcatagcgttgcgaacatagttccggtctcacaatgcgatcatagtgctggtagtgggtgatatcatggtctgtactaccaattgttaagaatgttcttaagtcatctggtaagccttatggatgtgtgtatgggcgcctaaacaacagtggtgattatatgatttgttgtatgcttttcttactnagtctgttgactcacagatgctactttcatgtgtagctaaaggaaaggcgaaggctgaataggagtgagctctgggcttggatgaaaattgtacatgttgaggcgacgcgacctggagagttcgatctcgggacatttggggctttattttgtagtctcagcacgaccagattataaatatcttttaaaaatattgtaaaagtttaaatacgagatcccgacttttgcaaataaatatatgaaattttataaggtttagcaattaaatcgaaagttttaatttctcacgatttttaagaaaaatcctttgattagtaaaggttgcacagtagttggaaaatcactctagcgcgcctaattatcagggcgttacaacgctagtaagaggacctgaagaggtagtttttgtgaaaagagtacgagtaaacacatcttataaagaggagacatccgaactagagagaacttgtgaatttgcagagtttaattcagatgagagtcctaaaagaaaacccatagtagccatctgccctcgttggcactattgaaccttcacatctggactaaagaaataacacattgagctcttcatatgttttttaaatgccataaagtaatacataagagactgatcttgtttttccgcacaataaaaagctttgcaaacatcatatatgcgagatacattgttttttcaaaaatatagaaactcttagtaatccattagttctttaaccaattcacaatgattaatcaaattaattacctcattattcatagaatttcgaatttgaaagaataagcgagcatgctcacggagccatatttttcttgaatcgtctttttcttttggaggatcttcagtcaagtgatcatctttgtcaatactcctcagatacaatcga

SEQ ID NO: 27281 - DNA, 2469 bp, Cannabis sativa
  modified_base (982)..(985): a, c, t, g, unknown or other
ttaaaataaaatatgtaatttagaacaatattattattattatatcatcatatatactcatttggacaatgggaaaataagataatactagggttaggcacagtaatgatagatctaatgtgtggtgaatcctatcatttagacacgtcgtgaccacgcaatataaaaacctagccacttgatctagctgttaaacataagtaaaattttaacttaacgtatatagctagctagctcaacaacgctatataattttatataaataaattaatttatggttcgcacattgatcaaatgtcttactacctagtaatatctaataatattttattttaactataatataaatattataccacttgatagctaggttgaggatgttagcatgggaatgattaagtaatattaattaataaaattaatcaattatataatttaattattaatttaagaaactaaattagtttattcgccttatattgtattattactgaatttaaggaaggtagatttagtgatatacaagctatgttttctccttaaaaccaaaataattcctttgtacgtacatatatacataaatatatatatatatatataatgtttacgtatatataatgttttttttctcaactaatagattattaattggaaatttcgtgtgaaccatccttatccacactaagttatgaatataaggtatcttaaagtacctacatgatttatcatcatttgtatgtacgtactaagttttaattcttcataataaattataacataatatattttgatctaaagtacaatagtaacataacgttacatatataaaaatatatataatttttttttgaaaaaaaaatgtatttagcttccactgtttctttataactaaagtatattgaaaaatatatagcgaaaatgacgtttgttaataattttatttttaattttttttatttacaaaaataaaagtaaaattttnnnntttaaaaaataaaaatgtgttctacaacccatttttttttttttttttgatgaatcagccatttcattacaaacaaacacttttacaacctataagcaccttcaaaaaataaaggccttaatcatatctatacaattttatttacaatctttacaacctttcaaaccaatctatatctttgtgcttaactttctttggcattacaagtgctattctattcttcacatatcatttcacttgctgaaaaatttcagcagtagtcacgtgttttgcattccaaaccagctcattccgagctatccaaatgccgtgaactagagcagccacaccagctgctaatacctgctttttgaagcttgagcatcttgcctttcggatccatttcagcagatcagtaagttcagttgttgttgtgtgccaaccgaaccatcccttcacctgtttaagacattctgcagcaacaaagcattcaaagaaaatatggtttgttgtttctgcagcattgttgcagaatatacaatcggcaccagcaatataaccatggtggaagagcctatcccttgttttgagtctatttatcatagctaaccatagtaggaagctatgctttggaatattcaatcttgaccatacttccttggaccaaggaaccttctcccatgtcggactaaaccagttcagcccctctgctattttataatcaacagcagagaaattgttatgctgcacacaccatctaattctttctttgagttccaccaatttcctccaataccaacttccactcataggggctttgtattcccaccaaacttgttgttgtatgtatacattgtgtacccatttcacccacaagttatccttcttttttttcaatttcccatacatgtttgaccattgcagccgaattccaattagggataatcaccaaccctaaaccccctgaattttttggacagcataacttttcccaagctactgccccagccccattcataaggctcttccctgtccatagaaaacttgtacaaactgcttcaatctctttaataacctttttaggaatgaacatgatttgacaccagtaaacatgtattgacatcaaaacagatttcaccaagaccaaccttccagcaaaggataaatgcctggtgctccaaattctaatccgagcagtcattttctgcactaaaccgatgcaatctgaagtagagatccttctggcacatataggaactcccaagtacttgaaaggatcatgttgtcttgcaaatccagacatgtctaacaccctttgaatctcattttcgctcattccactataatagattgctgatttagcattgttgggttgcatcccggaagttgcagagaacaacttaagagcttgcatcatgagataaatgcttttaaaatccactctgcagaataatagcacatcatcagcaaaactcaaattatttaaccccagatcagcacatctc

SEQ ID NO: 27282 - DNA, 1371 bp, Cannabis sativa
gtaggctattaccgaactaaagggcccaaacctctttaaaatcatgtgttccttattgcttactaatttttgctttatcttaattacattcctaatttcttattaattaactcactgccgttggctaaaagcgaggtcaacaactgacatggtggaaaaagcactacgagctgagggcgcagttgagtgcattcaagtgtcccgggggactcagattggttgtggagttaccgcttctcctacatttggttacggtaggagtggtagtgaatcaaccacgattagaagagaaaggaaccatctacatccggtggctcgagtcagaacaagagattctgagggaaccaagctcatggcaatcgttagggtggttgtaaaacccgatacacttacctggaatgtcccaattgcaagaagcatcatctaggtgagtataaagggcgaggatgttttcagtgtggtatgcttggacattacaaaagagattgcccgcaactaaagaaagaagagcaaatgatagaaacaaagcctgctctagcaagggagtttgctcttacttagtctgatacagaagctaccccctcagttgttacaggtcagctcacagtcaacaactcttatttctctgttttatttgactttggggccattcactcgtttctgtcgaccaaaatttttgataaattgggtagacagtttgataattatgataataggtttggaaccctactgcgtgatagataattaattatctctaaaaggtgggttaggtctatgtagatttagattgagggtaaagagttgattgcttatttagtggaattaggcttagcaaattttgatgtcatacatgaaatggattttttgtccacatattctgctagtattatctgtaagcgaaagatggtgatcttccaacctgagggccaggaacaatttgtgtttgtgggattagtttagggatcctgaattacagtgatcttagtattgaaagctagagatttgttataagatggatgtctagggtttttggcagcggtattagataccacacggtctgaattacttcggccagaagacatcaaagtggttcattaatttttagatgtgtttcccgatgaacttctgagtttaccaccacagtagaaaagattttgttattgatttagcacttggagcagagccaatctctaaagcaccttatacaatggctccaacaatacttaaagaattaaagagtcaacttcaaaggatgttggatttagggttttctcggcccagtgtgtcaccttggggagctccagtgttgctggttaagaagaaagatagatctctacgcatgtgcaccgactatcgagaactaaacaaact

SEQ ID NO: 27283 - DNA, 1622 bp, Cannabis sativa
atttttttgattaattttcttgattaaaatgaatagtgaccttcccaacaatattattatcattatttgcaatggaagtataggttagctcaaacacaattaaggttggagttgaggtaaggcaaattaggagcttagctagttcagaggcccaaaaaaatattgcttttttaaaaatatatatttttttttagtaattttcaaaaatatcatatatattttaactaaaaggctataatttttattttcttaaggcccgataatttttattttcctaaagcgaacaaatttcagggccgaccttgaacacaactaacctactctactactcaaagtgagtttatataatggggatttttttttttggaaaacttgttaagttgggttgagaaaaagtttcttagtaaaaataattaggaaggaatcaaattggtattcctcacataacatgaacacataaaatgccaagtagtagtactctacacatttacataaagattaattaatgagtaatgaatataagtgtgaaacatttatacctaacttcatcctaccatttcaacagatacaagaagaaacaacttacatgagcaaaagaaaaaattcaagctctttctctaacataaatgaacctctcactcagacgattgcccagaatttctttcgacagattaacaccgattctttattcttttcttgattttctaggacatgggattcaacatcccacaaaaattttggagcaagagcttgaattctcgaggtgatggcttcttcgtctcgaattataataaatccctgtgaaacaaacttgtcaatgaactcttccacatgagtaaacaaatcccacagctgcaactagatcaatgacaatctcgctacgaatttttttctgttttttactctaaattctgactaagatgattgttgccatgacatgcaattgggatttgggagagggatttataaaattgatacctgaggtcgtgcaatgcgatccatctccagcatgatatcttcgagcgtgcagccttccccgcggtttttatagtgagagaaaagatggttggcgtgcaacatatcatacgtgcgaggataagttgagaacggttcgcacctgatgcagaaacaatttacaaaatgatttcgtggggaagctaaaacatcggtatataaaaagtttctcgaataacatgaacataccaatcatgaaaagcaccaaccagaccgcgatcataaatggctgacaaagtattcttcatgctagcaggaactatattcatcacccaaacaggcgatgcagtcaatgctacagcaaatccaccgcagaaagcattcatatccatgacatttcgcacttctgtctcgttgacgttcataagcctccagtatttactaatttgatcttgccaaaaggctgtatctgaagcaaattcctcctgactaatacctgatataaacataataatcagttatctcacctcatgaacaattactttgtaattctacattaacatacttgacgttctacaattgtgaatttcactaggaatgccaaaccaactacaattgtttttccttcccaaattcggatattcagtgttgttggaaaacctgttgtc

SEQ ID NO: 27284 - DNA, 6790 bp, Cannabis sativa
ctgactataataaaatattctcattgagaaatgctaaggcactagtagtatttaataatttagaggatattaattactagttttatatcatttaacgtaatattatgtagcttataaatcatcagtaaactctcaattcatggagatctgtaaaaagtaaaaacttagttgacttcacagtcaaagaaaatgtaataatggtatcctatggtccaaccaaagcaatgaaatgaatacaaaaaaacctgataaaagattcctagttcctacacgtaatattgggaaagcagacacgtgtagaatcttaattaaaaagcaacaagtgggagggactaatatttattacgctgttgccccactctcactgtttgtgtaaaatgatgtaccattattgttttttcccttatatattcttcttcttctttcgaaagaaattactttgatatattctcattgaaagctacctctgaggctgctggtgctgctgaaacaaaggctacctctcccacactcatttgggtattcttaatttacattgagatatcgatcgagtagggctcatttattattattatgatgttaatgttatttcatagtagcacgttactatgagtcatgacatatataggacctacattgttgcttacatcatcaacgcccattaagtcttattttgattttatttaagctacagtatttagtatttgtcattttaaactttactaagcataaggtgaaccaaaattctggagaacaatttgtacacataaaaatttagtaacacaatttaatatatattaaagttcgatgatgcattcgttaataaaatttagcggaattaaatgcaacaattttaatagtttcaaatttttaacaatttcgaagttaaaaatttaaaagatataatttgttacgtgttaaaattttaagaaaaaaaaatatacgtacttatataaacattatattcaaatattacatacaataatgtgatgatttttttttaaaaccacacttatcaaaattgaaacttgtcgtttgtaatgtttagatgtaccatttctaatgaacaagaagtgatagatttgtccctatggccctactacttttatatgagaaaactgaataagaaacgtaatatcaaatattttaaataagttgccaccaaaaaaaaaatagcaaatatatttgccaaataagtaattttagaaagtagtacatatttaattatttatcttctacccattcaaagatattctgctctctttatcttctcttctctactttccccctcctaagcatcccaatctaagtttttttaaataaaagcacccattttgaattcacttttttatctgagataacataatttacatcactattattacatgaaatatgcacaagttacatagatatttatgacaaagtgaagatttctattcaaaattttaaatacagtaaaataaatgtgggttcttagaattcaagagagtacaaaatataatcatataaaaataaaccatatgtcaaataaattactatcttattgagttttaaaatggttcattactgaaaaatataattctgaccatgacaataaatacctttgtttgttgttggaagttcaagccattggaatctaatctattattgaaggtcccttacttcccagatccaaagacatcatcaaaaccgcccaatccatccccataaaataacttctgactttcaattatattttcaaaatgaaaaagaaaaatgtaacttgcaagtggcagacataaactggggtcttgttttaagaaccatgcagctactctgcagcagatcttaacacaatgcttcaccacaaacacctcactatttggtcagcttgtgaattctgatcttcgaaatctcgtgaaccccttcagctataatttctgagccttttgcttgcatctcaagtcagcaacgagatggcggatgtgtggggcgtaccatttcactctttccatatgttcaacagaaacatcccaacaaagacctgcagatcaacaagttagacaccattttgagtttagaaaggctatgactaaacttattatttgagagctttaatctagtttgtcttgaattgatatgtaccttcagatttagctattgcattgattgattccgctacatgttctgcccatgaagcttcctctgtgtctttcacatttccatgaatgtgtagtattccaccctcattcctgtactaccaaagagactcggtgaaaatgtgcgcagcgagagttgaaataaatagagactgtaattaaagacatttcacatagcaaataatataggaagatatatcaccttagcgcccgaacagcagtgacccaactaccctcgctagttggaagaagaccaagattaacttggtcagccactccctgtaaggaaaagaaatacatctagggattagcattcacagcaaatgtcctttatcaacagatcggcacaacagcttaatagtaaacacaagaaaaaaaaaaggagcaatgaagaaaattagagaattaatcgtattaaagaaaaccaacgggcaaccataccttaggtgctgtaaccctgttatctccctccagtacaatacagcgatccgcaacagaatttagttggaggttacgtctaagtgcctcaatagcatgggggttccattcacaagcataaactagttttgccttcgccctaatgattcactcaaacttcattagtcaaggtattaccaatgaaaaaatcaaacagaagatagagaataagcataggaaagctcatgtaatgaaagactatgccaagatagactagatagtagagagagatagctcattgaaattgaagacactagcacaattaataagtcaaataaaaaatatatataccccacaagaaatggcaggacaaagtatccgattccggcaaacaaatccactacaacatcatttctgcagtccagttgtgccatacgtcgcttctcagaaagattgccccaagagaacatgcacttggtagtgtcaaatgaatatataattccattttcacggtgatccacccagccactatcccccacaagaatctccaatttactgtcccttgtacctgtctgtgcaactcgcccctacaccagcaaattcaaaacatggtccgtaaagtagacagattacaatgattcttttagcatgaaaaatcttaactaaatttcccaaagatcactggttgaacttggtatttcaattttataataatatttcagcttacatgggaagagaagcaggtgggatcataacatacatgcattaggacacacatgacagaccagagagccagaccaaaatgtataaataacacacctgacgagcaaggcggcgagtattaagtgatttggcaacagtaggccagagttcttcctctatcgattcccataaaggattcttgaaagatgatattgggagcacagtaatatccccaagccgttcccatcttaggataaataaaaaagacaagtacacctagtcaataatattactttaaatagaaaaaaagatcactaaaaataataatgcaagactgccagcaaaaaaacagtaaggagctcatataatcaattttccatctgatgcatggttgcttaacgagtaaatggatcatataagtacaactgacaggccaaataatattaattttgaatttaagaaaaccttgtaggtagctcctcgagaagttccatagaaagacctttatcctctaatagagaggctacagcttcactcattattttcaatggagatttggcagctttccttgcttcaacaacgttgtctgccagcttagaagcaccacattccttcagaatgttcaaggcttttgaagaagtgatatcattagaaactgattcatctgttttaactagggaaactaaatgatcattttgcccttcaaatgagtcttgcaaggaatgtggcttctggggatacaaacgacagaaattctcattcacaggaaagcaaatatgaactccatcttcttgagagtatactttccttgcaagatctaaccacccaaacttcttcaatatatccttcccagtttttgcatatttccgttctagctgtagagcccagtgtagagaagcaagctgctgctctccttcattaacagcagatatttcaccctcaatatccatgttaggatcttcagttccagttagagcttgtgaaagtccagcttgttgatttcgaaaatctttgtcactttctctctttgccacttcacagccatgagaaatatgcaatcttccattttcaattggtttaaaattatccagatgatttagagaaagcaagttaattttcactggctcactaaacttagttccaaaagcatagcaagctgctccaccgccaatcataacaagatcatcaccaacaatgttagaagtgctgcgcagaaataaatctttgctaaatgaatcgagcttcacatgcctccacacacggaattgcaaatcaagtaatgataactcctcaaaatgttgtcgaattggacaaccaccaataataccaatatagtgtttgtaaacaaacattgagtgagagaatcttgcatgaggacttcttcctgctgcatcttcccttttccattgacatttttctatattaaagctgtaaagatctccaagtgctttattgccactgtaaccaccaaacaaaaataattgagatccatatgcaaccaaagaatgagaatgtcgagcacatggctgctccccagtgaccgttaattctctccactgcatactatccgtgtcaaggacatggaaggatgaggagaccgtatcattgttaagtccaccaaacacatatatctctcggcctacaactgcagcagtatgtcgatgcctgtgaaaatgaaattaataaggacatagaagggatcaaatttaatcttccatcttaagatagttgatgccacaaggatatcagaaaattcagacttcctaataaaagaataaaaatgcttaagaaggtagataaaagcgaaattattaccatgtgcataaaggttgtacagccatttacagtttacagactgattctttacataacaccaattagataaaggtaacatcaagataaactcaactacaagattgtaaatgaaaaagattgccacttacctggaaggaaagatgcaaccggagcattctacaagcttccattcacccttagccgtgtttaagacccaaacttcactcagaatgttctctggatcagccctgcctccaataacaaacatgctatctccaaccaaagaagacgaatggctcaagcgtggagaagggccaccctcagcatcaaaagctttcaatgtgccagtgaatgaatcaagtagcaaacaataatttcgtcgtgaatgtcttcccatgccaccaaagccaccgaacaccatgattccattgttgtttgagctacccaacttacaagctgagtgaccccaaacaaaaagcttttcaacaggttcaccaacaatctccatcttaacaacagataaactaaaattgggaacttctgccgaccctgccaatgtttcaaagactcagactttgctttcgcattaaaatgaaaggtgtcctgcaatcaaatgcagtattagtatgtaacagtatttactcaatttaccaaataacactgtactttcacactacgaattcattacataacgttaatcctcatcagtccatttatgagtcagttctttagtcccatactagaatacaacaatcaacagagacataaattttagttccacaaatcataacacaatacagccagatatagagtacaacattcaacataaccaaattaccagaatggtttacaccgtcttctttcccttccaactcaacctcttcagctttgtcatcaagtaaggaaccgttagtatactctattccatcagtgtcctcaacccccgatcccacaaaaccacttttgcgcaatgtgagtagaaacccttctgttctcttcctattcgcctccattttctcgttagcgatcccaacaaggtatttaacgtattcaggagacaccataagcttctgagtatttcccaatggcaactccaagcgaattgaacaccgaatggcaataatcacccgcttactagcactggtaatgccagactctctaaacccagaagcaattgctaaagaaaccaaaaattgagccgaggaaaggtccttacactcgatagcgagaatgagaggctcaaacctgaagacgagatcagatggaggatcgctcggggtaggagtcgagtcggagcggaatagaagattgagaactgaatcgagttccgccggttcgtgggtaatgaagagccatgatcccccgaaggcctttttcttgagcttggttgtggagggcggcggttgggagaggatagagatacggccggagcaggaactggtagtgaagaatgaagggtgagcgttgatggtgttgatgagaggtatgattggtatatccaacgaaccctttggtgatttgtcagtcaccgttgatttcagagaagctatcgtcgccgctttccgcctttggaactccatttttgttagctctgcaaaatattattctttcttctctctgaaaagtaaaaaccctcttaaatctcagttcagaaaagacaagactgcgaaatgagagagggtaggatcgactttttactctaccagtccacaactgggctgggctgaatacatggattt

SEQ ID NO: 27285 - DNA, 1844 bp, Cannabis sativa
tctgccttattttatgaatgggatcatattgatataacttgtagatctgatccattggtccacctttaaaagctggtttggttcaatgaagccgacttgtctatatagtgaaagttgtcagaagtgaaaactcgtgttacttttaagttatcatgttagacttcaatacattttgtattgcccacattagcacataatatattcgtttgactaaatttgcttcagttatgcatatcatattgatttgttattgttaaaggcgccaatctaaatctaatgtaaatcagtaaattaactgtataatttttgttgcataataaaattgaacatttgaagtaacgtgcgttattgtattggtgattcttacaggttttaatgttaatgagaaacctcaccttcaacttgtgtaacccagattttgagcctattgtaagtattaccattccttcttactagaaatatgtctatatgacccgtaaaacttttatctaatacacatacgctactattttcttgggatgatgtatgtacatatctatatacaaacattattaagtagtgattgttttaattgttattttttaggtacgtttagtatttttggttcatggattaactggaactctattttcttttcacatgacgttgtataatgtagttacaggggacctccctctaatttttaggaaattttgaatgatttaagatattaaaacagtgattaaaacaatttgctgcatggtgtttgttttgcgcgtgcaacttactgtttgaattctaattttggcaacttaaatttttcgaaattttcagaatttgtagaggtccctgttactatattatacactataatgaatttttgtttacagcttatctatgtattggaaatattaaaagtatttataaatagtgattaaaaacaatcaacaaggttacctgcaatgtaggtgttgtttattgacttgattgtttatcaccaattttatcatgtgttaccaatattttctttagtggctctaggttagataaaaaaaaattgcagtgtctgtgtttagagattacatgttgacaagatcataatcctatacaaaagtctaaaccagatgcttatagcagcataacagagaaaatttgtaaaaagatttacagtaaatatgtaatagcaataagctgctaataattgagaatactctcctcgtcatcatatgacttctctcaactgtttgcatagccagaaattatgtgacttctcttattttaattggttgatttggttggtttattcggataaaggttatgtcatcgtatggcatcaacgcaaaatcgatgggaattgctaagcagaactgtgatctgccagtttgaactacctagggtgtttacaacttgctgactagtatgtcttccttctcatctttttctctgttctttagtttctttaccatcctttcgaactttcgatccttaataccgagttctcattgatgctatagcttgttttgttatgataggtaggatcatggctctaaaatgtaaatggtgctagcacagcaagccacatatgaaacctttagtttagagatgaatgcaaccacaacctttagttttgtaatcatctttattctatagtgtttggtggccaaaacagaaagggataatggagtcttaaggttattctgtttattaggcattctttaaccagagaagtgtgtatattgtgtaatattcattttgccttgaaaaatgtaaaaaagcccttatttttatcaattttgcagggcttgtacccctaaagccatgtattacaagcatttaaatgataatacactatttgcaaagtaaag

SEQ ID NO: 27286 - DNA, 2903 bp, Cannabis sativa
tatagtttaatgtcaattgatttatatatttatttattaagtagaaatccaagtaacccgatcaatctacttggatgaacaaaggagatgcatttatttatatattttcaccctgaattgcagaaataccatgtaatggagtctatatattggacattttatcgtttattatacacattcttctagttactagaggtggagttagaatattctagttacgtaatgtaaccaatctgttgtgtgttagtttttttgttagataggttttactcggttgttcagttagatttcagttttgttgttaccttgtcctttagctcattcctatttatagctgcagtttgtataagaaacagtttttcaatacaggattctttctctcgaactcgtcgttattgttaaagtttatagtgtgaaaattatcgactttcctatcttcatgccttttaaatctcatcaattatgaagtttctgtataacacactactcctttacaacgaattaacttacaacttttgtggcttgaattttgatattaattacaacgaagattctggctcaatatgtatcaattcaaaggaacattttctagatttgaaatgttgtacccgcaatttatataatcctgtactgtatatatattttgtgggtgcattttaatgcctacgaacctaatatctttttccctgttctttattccagaagtggcacttctgaggtgtctcagagggtttctcctcgtactccacgtcaaccgaagccaactttgttagagaataattcaacatcctcctctaaccaagctattagaacgccaaaagaaagaagccctaaagtaattgagcgcaagtctccaagaagcccagttcctgaggtatttgaaatcgtttgcatgaactttgttttcttgtcaaaaactaatggatcattgagacgaatagttttgtcctgagactcttgttatgttagatattataatcttatgtgttacatttctgcaaaaacatatcatcaggtcaactagtgaaaaatttgaataaccataagtctctcattgtatttctcatctcagctcaaatgtgtaatctcatttcagcattttaaaatacatgtattgcttcaagtttatgtaataaatttgtttgtagtagtttcagaatttgccagtacaaatgtctgtttactaccaagatgatccacttttacctgattataacatgttaatgattcttattctactgttgatccagaaaaggcgcccaaatagaataaccgagttagaatctcagatttctcaacttcaggaagacttgaagaaagcaagggagcaattgtgttcctctgaatcaggaaagaaacaggctcagcttgatgctgaggactctaagaagcaattgctggccttatcttcaaagcttgaagagtctcagcagcagcttcgggagctatctgtttctgaggaaactcatcttgttgagctccaaaagatttcacaagaacgggatgaagcatggaaatctgagcttgaagctattcagaagcagcattcagtcgattcaactgccttagcatcggccaataatgagattcagtgccttaaggttcagcttgaaacggtagctgcatctgaggctgaacaaacaaaacatgcagaatcagtaaatgaagaacttcagagcctaaaagaaaatttagcagagacgctttgtcttgtggaaaacatgaaaaatcagttaaaagattgtaaagaatccgaaactcaagctcaagaagtggttagtgaaactctgcagcagctggagactgcaaaaaagactgttgagtctctcaggttagatggtatgaaagccattgaatcttacgactctattgcttcagagttggaacggtcaagagctcgtgttagcttcctagaaggactcgtgagtaagctcaatgcaggcctcgataatggtagtagcaacaacctgcctttgattccttcaagtgaatatgaggaagagcttagttatctgaggtcagaagtaggacggttaagatctgcccttgaaaccgccgaggctaaatacagtgaagaacaagttagaagcacagctcaaataacaagtgcttatgaactgatggagcagataaaatctggttctactcttaaagaggccaagctcgaatctgaactaaagaaaaccagagttgacattgaggaactgaaagctaatttgatggacaaagaaactgaattgcaaggtattatagaagagaatgatgggcttaattcaaagcttgagaaaagtttgtccagccaaagagaatataagctagaaaaggaattaaaggtcttgaaggaacacttagcaaatttaaaggcaaatttaatggacaaggagaccgaattgcagagtatagcagaagagaatgaaatgttgaaggtagaaatcaaaaagagtaaagtcgagaatactaaaaatggtgttgcagaagtagaggcagctaggtcttctgagagagaagctttatcgaagctcggattagtaatggaagaggcagataagagcagcaagagggctgcaagggtaaccgagcagctagatgcagcacaagcagcaaatgcagaaatggaagcagagttaagaaggctaaaggtacaatctgaccagtggagaaaagctgccgaggccgctgcttccatgctttcgggtggaaataatgggaaattcatggaaagaactggatcattagacagtagtttcagtccaggtggtgggaaaatcaactcattatactcggaagatatggatgatgattatctcaagaagaaaaatggaaacatgctaaagaaaattggggtgctgtggaagaagccacagaaatagccaccaagcttgatttcagtacaaggttatgtt

SEQ ID NO: 27287 - DNA, 1908 bp, Cannabis sativa
ccatattaaagtataattaacatttagaaaaattatacatttttttaaaaaaatcaataaactaaaaattaattaataattgacaaaattatataaagttaaaattaaaataaataaattattttttttcaaattaattactgttgttgacatgacactgatgtgtcaattgtctaagcaatcatataattattttatttgtcacatatgataaaatttgacaaaaaaaaccaatttacaatattataaatagttcatgtattatttttaacagactaaaaagttcaaataacacaataataaataaatcacagtttaagagcaaaaattttaaataaccttataattaaagtaatacataacttccactcaagaaggaatgtttaaaataaaaatggaaatccccctccttctgtgtaacttttgttaccgttgttatcttaacctttatcggttatcccaacaaaaaaaaaataataaaaatggaaaaacacactattgccaaactctttattttttctaataatgagacttaaatctcctatcaattatttaagtagcaaaattatttgttcaatcaacacaaatttggacagcagcagcacgatccagtaaaagaaaatatgaacacacaaaaataagacatgtaagcatgcacaaaaatattttaatttcatatatattcttttaaaaataaaaatttgaaagtatataaacattttcttaaaaaatttaaattacttagaaaaaatacaacaataatattatttattttcaaaaaataaaaatttgtttgtagaatgggacagaagtaccatttttttttccataaactcatattataacccatgtatttttcaactaccataaatttggctccctcataacactaatttatattctagtaccatccaaaatcaatttctcctcactcctccactcctaaaaaaatgcaactaatatgacaaattatttactttgaaaaggcaaatgcaaattataattaaaaaagaaaaaaaaaataaagctaattagaatttttgtcgcctaaaatttaacatgtattaaatcatgtttcttgaactttttttagccgttcaaaattcgccctgaactattgaaattgttagatttaaggacttttgtctaattttatttaattttactattgtagtgattgtttatatactaaattatgctcctcaaacttttatatctaccaaatcatatccctcgacatatactaaatcatactctctcaactttcattcatgttagactttttctactaaaattgcacaaaaatctttaaattcaactatatcaatagtttagggacattttaaatcagaggccatgatttgattaggacaaaaaatcctaattagcatataaaaaaggaatcccactttaatgtcctgttcattattggcttgcttagtcatctcatctagataaagcctcctccgctcctagctctacacacagactattctatatatataagtattattaggttcaagaagaaacatcaaactaagctgtttatataatgaagatgaaaatgagtgtgatgaatatttttgtgttgatagtgagtgcttctttgatgatatcggtttgcaatggtgcgatgattgagaatggtaatgtaatgggaaagcgaatggagcacgaggaatgcttgaagaaagtgagtgagcttttccatttcgacgaggtggagatccatcaggtttgcagcctggccgaggacgatagggtcagcaccgatgtggacacttgcatcaaacaagtgcttgaaaatgtacccaacccagctgaatactacgattctgtcaaaagatcttgcactgctgtacatgatctattttcctctggatcggtgcaatctggctgagctgatca

SEQ ID NO: 27288 - DNA, 1647 bp, Cannabis sativa
gatgttgccattagatacttaaagaggaagtttaaagagaaagagaatggactaattttggagggaaagttcttacatgtgagatgtatggtgtccacatagtaaacttaattgttagtgaagacttgaaagaaaaacatgagtccattgatgcaatcagaaatgtagtgaggtatgttaggtcttctcctgctaggcttaaagcatttaaggaagtagtggtggagattgaatgcaatggtcttctttatttagatgtcccaacaaggtaaaactcaacattcttgatgcttgatagtgcaataaaaaaaaatcagcaaagttagtgtattggccttttaggctttaaaatgcattacaaatgatctttaccatatgaagccctaacccttgctctaagaggatttctctaggtctttcttgtagaagaagagagcttagaatgaaaccagcagagctttgactaaaatattatgtccctttgcataaagggatagcaaaatgtatataggctaaaatttgagtccagacatacccatgacccatttgggttttttcgtaaaagctagctcactatcgtggtaaaacacacaatatacatgattataaggcccactaaggatgttaggctcgcaggatgatgattttgtactgatgaggagactgttcactacaaggcacatgttgcacggaaatcacacctgacaaacaaaggtgtcagtggagttgtcagactaaaatgggtattggtggtacatacactactatgttctgacgtaggggacaatatctaatcttgtgttagagaggaggacacgtcattctagggtagacatctggctctcatcctgcggtggacatccagtattcaccctgtggtagacatccgactcccgatctgtggggggctttcgactgccattttttgcaacttgccttcaggtaggcccttatcttcattaagaagtattcattcctttcgtgtcccggaaggcaagggaggctttcagacctcgagagagtgacatgtcccagaggtgaagtcctaaacctttaccgggcttgggcctttgctgggcttaggcccattctagatccgacttaggcctacattgaaatggtgattactttttggtggtgccacgtgtctcttttaaaaattacatataacaagaacaaaaaaaatatatcatttatatattatgtcaaaaaaatcatttttataaaaataaaaattattgtttatttactttgattttaaataatttcttattctctactgatacttgtgataaatggcattggtctcaagagtctttaggtaactacttagaagtgcatatagtttattgcaagagttgatgttggatgtcaataatcattttttggaagagattgtggtggattagatcagtaccatcgaaggttttaaatatggcatggagagccttatctggttgtttaccaatattgttacaactaaatttgaagcatgttatatgtcactttggtatgtccattatgttccctttcactaccttatttcttgtctttttgcattgggctgctggaaatggctggtttttctgttaattctgaggtggaacgatcttttggcaactagttccaagaggctgctaccaggtg

SEQ ID NO: 27289 - DNA, 7445 bp, Cannabis sativa
ggaattttcaaaaattgttaagcatagaaaaagaggaaaaacttattatttttcacttatcttttatctttttctttgaaaactcaaaattttcatatattttttatggcattaggattaattggattgaaatcatattccttgctgaacatgacattctagatttaccttaaatcttaatagcattaggaattgttgttaccttttaaatttagaattcatattcctattctcataggaattttgaaattactaagccaaaagtagaagagaaaagattttcatctttttcttatcatttatgttttcttttaagctttaaatttaaaacactcccaattgtattaggattaagatattaagctcacctataaataagaaagctttcaatcgaatttttctcatttcccacattacttcgcacgtccaagcctttctgagagcttttggattttattttcatcagttcttcaagtgcttttcatctatcaaggtagaatttttttttttttggctttttttttttttgaaaattctctccttcttccgtctttgttgagcttgcttcaaggattctagaactcccaaacaattcttgaatttcttatttgagaccttcaaaagtccaaaatactatccgtgtaagaaattttgagttgagaatgtttttcttctgaaatcaccttgagtttcccttcccaaagccaaaataattttcttgagtcttaagcaactgaattttgaagtcactatgcctcggatgaagagaagcagaaggattcctaatgaatatgatccccatgtggcttagtttataagagctaagatgactgtgcccaagtctaagaacttagacaaggcgcgtggtgggaagcaatggcaacttaacttctcgaagctaccattgagagtgatgactcaagagatcaggcttttaagttgagacctcttatatttagtaccatcactaaacaccaagtacaattaatcagaatgactatctccttccagaaattgttgtctgaaagccacgatccagatgtcccagtggctcctaaaatccctattatagtgcttggtcgaggtttcatatgaacgcaggtgcttacttgcctctacacccatggtttatatcaaaagtagatttctttagagtttttccctaccaaataaatccaaatggttatagaatcctgtctaccttcttcatcttctaccgcttgagaaatcggcctatcccaactccccatgaaattaacttcctttgtgacttgaaaagcagtccaactagaaaagaggagggattctatcacttccaccaatgcagtccatgtatagaaaatataaccaaaattaattacgacctttaccatcaggaatacttctatgccccagtccttccataaagacatattacattccaaaaggttggccctttcaaaagacctgctctgttgattgacatgaaaatgagagcagatgtcatgcccattaaaattgatgcatgagaaagagataggaggactttgttcactactgagaacctctgcaaatttgacacgataatgtctcgtcagtaagtttatgttgatacttgcttctcttttgattctttgacgatgtcgtcaaataagaagaggatggtcagagtgcaactgccatcatgtctaagatattgtcagaagatgagagcttagtttgaaaggactaagaatattcagggagaatatctgtgtttataaagcgggatgatgaagaagttacttctactcaaactgttctaaaaaatgacagggaatcagtaggttgttaatgcaccatgctttgtagttgtaccttgttctcttgcatttcttttattgtactaaccacttatctttcttctttgcaaacaacatgagtttctttgctgctatggcatcctgttcaaagaggaagataccaacgccaaaagtgacagaacctctagtcagggaggttgttcaaggtatccatgctgcttcttctgctcctacgaagaagaagctcaggaagaggagtagacttgttgaagttgatctccctgcccaagacactatcaaggaaaagtcaaagttgatgaagctgatgagggatctcccattgatattcctccaaatgagactgagaatggtgttctaaatctgagttcagacctagtggagcaactgcgtccgcaggactcttggcttcttgccaatggtgatgccttgattggttccaaggctgagaacatcccattgcagaagttggttagctcaaaacctatgcatgttattttccaaagatgttttattgatatctttagggtaactatttttcttatctcaaatttcttttacttcgccaatgtcattcttgttgatatgcattcacctctcaccttacactcacgacccctgaagcacattcacgcaacacacacaacgattcgcatgcaaggctccccatgggctcgcatgtgagcccccaacacctaacacccaacacacacacaacacaatgcacacacacacacacacacagctcgcttgtgagcccccaacacctaacacccaatacacgcacacaacataatgcacacacacacggcttgcatgtgagccccccactcgcacacacatgcactccttacaccatcacagctcgcatgcgagtccccatctcacacccctacaattgtgcaccctcatgtgtgtatgcgataccttggctcactgccacattgcttcattgcatcgcatgaatgttaccatggctcgcatggatgctccatgacgggccatacggatgctctaccacttgcataaatcctccacgacttacacaaatgctccgcgactcacataaatgctccgcgactcacacaaatgcccccggctcacccaacatctcatggtctcacacaacagctcgcacaacatgggcttgcacaacagcccatgggcttgcacaatagccatgggctcgcatgccaagttgtcacaatttaggagtcttagtattttggccataactctcgcaatatatatcagaattggatgactcaagatgcgtttggaaagatgagaaagagacctatgaatcttatgtttatgaaaagatctaattcttaactaatcactatgaaaatccttaaacaattataacttagtaagttggtcttactaactctactcatgcgttgttacgggattttcctctgagttgcacaaatatatcctgatattaatgagccttaggccatatacattgattcattcattccttaactgactcttacagccaatgtcttttaaccgttgggactaattgttgactaatctcgaaaatcaactttgtcaatttttggggttaacacttgcccccagtctacaagaattcttttaagtgtacttgtcagctaagtgagttggagaatctaccttgacgtagtgtgagaccctcttagttttcttcgaggcagtgccccctttgtattggggcttcccttgcttgaaccttactttgcatcaatatgttagtgtaatggattttccttaccttggttggcccttttttctctctttcccccccccctttttttaccgagcgatctcattcctcatgcggtcgagcaacaattttactgacattggctgaatgactctgagggtcattctttggcccaacaacttttgtaactggcgttggctaagcgaatctggggtcactctttggccaagccatttttgtaattggcgttggccaagagactctaggttcactctttggccaagctatttttgtaacttgctttggccgagcaactctagaatccctctctggccaagcaattttcataactggcattggccaagtgactctggggtccctctctagccaagccatttttgtaaccggcattagcaaaatgactttagaggtcactctttggccaagcaatttttgtaactggcgtaggccgagcgactatgggagtcactctttggccaagccatttttctactgtggtaagcgggcatccatttgatgggagtatggctctttgagcagtctcaacctcttattatttcttcatccttttactcagatgggagggagcttatagtacttgactgcgctaccctcttgattgaaaaacgtttgcttactcttgagaggcgtccctctcatttcaacgttatgccatgagtgtctttcaagacctcttgtggctaacttttgttgggataagtaggaacatttctcttgtctaccaagggtagctagtccttatcgatttgaaaaatatccccctttctcttttgttttcttttgtgtgccccctaagtgtccaacgtcatccactttaactcggaggcccacctgagtgccttctttgatttattgtagcacacgaaaagtgaacttgctattgttatgaactttttcttgcataagggaactttacttagagggatatcttggatatttatttttatgggctatatagcagaggctttacttggatgtacgagcattggagttattgtctagtagatcctacaggggtctgacgagcttcccgaagtacattttcttgtgtctgtttccaagactccattttcttcctcaataatgatatatcttttcgctctctcgtagaagtctttaatgtcaaccaatttccttttaaacatattcctccataatctactcctagggtgtattccagcagacatggagaacttatgttcatcgttggatattcttcctaccttggtgactttggcattaaagcgttgaatatacccccttaagccttcattctccccttgatttacattggtgatactcgttataggcataatgtaatcacttgtcgcttgatgttgttgaaggaattcctctgaaaattatttccaggatgtaatgctccaggtccaaacctcttgaaccacttatatacgacacctttaagtgtaaccacaaagcactggcaccttgccttgctggatacctttttcatcttcattagctcattaaaagctcctagatggtattttgggtcaatcgtaccatcatatggcgtcatgcgaggctccttgaaattgggtggaagtggttccatttgaatttctcttgagaaaggggattccttgtcaaattcatcatcctacgaatcttcctttgatgttgtagccatccttcgacgtagaccttgcatctcttcttctagctctttcattcttttattcatcctttcttgggggttggtgaatgaaacttggattttcccagtagttcacttggagctttgagtagtactcctctcatcccatcattgtgcgactctccatcatggttgaggggagacaccttctgctttcttttctcttgagagggaggtgcaagtgcagtgttcccttgcacaagattctttggctgaagtcccttcataaaactacatgatgtttcccctattatggtcttaccccagcggatagattcatgtttctctgagcgacctcttaggttcttctttcgcgataggccttttttgctctcaccctctgggtgccatccgtcgatgacatggagctcttcatgtctccgtgtgcggttgagatcgcccacttttgccagtggtctttgtacagaaagtgcagggtttgagtttttcctttgagaatggtgctcagtactttttacatgtcggccactatagtatctagcctttggctctttccgagaagaatttttatttcgtcttcatagtggtaattttgggattttgggcccatagagttagctcgcttctcctttctggggcaatgttgcgaggtacttggatctcacggtgttggtggtggagggtgcctaggtgatgacgggagatccttccttcgcctcacaccttcacctttggtcgtgatggaagcagtaactctgttgcgctattcatccactagaatcttttcgcggtgacagtctccttatcttgcttgaggttcccacctgctcacgccctctcctcctacttgaggctggacaacgttctcattttcttctcttacttgagagtcgtgaccattagtgccttcttctctgatgatgggcggagggaggtcttgcctcgaagcgaccaactggttgtcgtcaaggcaaatctccacgtcctataggcggtgagagcgtctaggcattttgtgtcgatggtgtgtaaagaaacgacttggcttaagcttgtcgttcccacaaacggccccaaactgttgaaggtgagaactcgtctaccaaatggtgaccgaaaaaccaacttgagctttaggttcagaaatgagatgaagaggaagatgaaatatgaactcaaatcgctcttttgaaatggagagaataatggagaaatttctattgctctcaatataattttacaagtatgatcttccaacctccctcacatctgagatggagggaatttataggctctaatggcctggtgtacaaagtggtctcatggagacaaaatattcctttcccgctgcatgctacaggtgttagaggcagactggcaccgcgtacacttgtttggtatcaggtggtccctagttgtaggtaacaagagggtggttgcaatgtctggtccttgggtacacaagcgtgttccctgattgcatgcgggatggtccttgagtacatgttgtaggagagtggttgcaacgtacccttggttgggtccttaggccttgcaagtccgttatcgccactacttgtacctccttcctctcagtctttagaaagtgtggtggtacgctcttcccttacacgccttgtcctttgattcctcacccaatatcattcttgtcgatatgcattcacctctacccttacactcacaacccctgaagcacattcatgcaacacacacaacggctcgcatgtgaggccccccatgggcttgcatgcaaggccccaacacctaacacccaaacacacacaacacaatgcacacacacgtctcgcatgagagccctaacacctaacacccaacacatgcacacaacacgcacacgcacacggcttgcatgcgagcccccactcgcacacaaatgcactccttacaccatcatggctcacgtgtgagcccccatgggcacacgtacaagcccttgtctcgcacccctacaaccgtgcacccacatgcgtgtacttactcgcatccatgcaagcctctcatgggctctcatgcgagcccttatctcactcatccgttgcttcgttgcgtcacacggatgttaccatggctcgcacggatgctacatcgcgagtcgaacgaatgctctaccacttgcgtaaaggttcctaattaaggctcaaatttgtacatttaagcctttaattatgcatataaaattaatataaataaaatatttcataattttaat

SEQ ID NO: 27290 - DNA, 1796 bp, Cannabis sativa
aagtagagatgggtcaatttcaacttctcacaacaaggatggtatttgaattcatgggcttctttgttcaagattcttgtaagatattctatgacaagcacaaacaacaaaggggacataagatctccttgtcgaagacctcttttagcctctatctatccagtgagagcaccattgatcataaaggagaatcgaggagtcgtaacacagttcatgactaagtcaacatacttagttgggaatttaaacgccaaagcatttcataaaagaattcttaatcaggagtatcataaggtcaatattgatcatgcacaaagcctttcattcttcctaccataacttctcaccatattctaacagaccataatattatgagcaataaatttctcttcacaaaatcacttcgattctctgagataaggggagtatctcacgaagcctagaaaaaatcaattttgacgccactttataaacaaaattaaattacaacaggcaatagggagatactcactcacattcagagggcatttattctttaggataagggtcactgtagtggtattgatctctttcagaatctttccagaatgcaggaatgaaagaatagcgttaacaaaatctttgcctgttatatctcaagtctgcttaaagaaagcactaccataaccatctagagcaggggccttatcattcggaattgaaaagaggctaaccttgacttcatcttcaatgtaacactgcagcaagaaactagctcgattctcagtaaccattgaaccctcttgcaccacatcaactagaacatgtttacaaaaagactccttcgtacccaacagaccttggaactattgactgtcacagttgtcattcctgggaatcattggattattctgattatcatcactgacaggggctcctaatgccttcctagccttcgaaacgcgaggccttcctcgaggacaccttgcatacgggctggccagtttgagtacgaggtgcatctctcaacgctgcttttgctgcagctgcttcgctttctaattttgtgtttctccatttagactcagtcaatctttcccaaagtttggaattttctaactccaccaatggctcatcatagcggttttgatcgtaagcagcacgattcctcttttctagaattcatcttcattaacatctcgttcaaaatcccattcagtgggacctcttcctggatttcagttttctttggtgtttgccacttgaggctctttaccaagacgacatatttcccccttattttgtacagaatcattgtttagagtatttttcatgatcgtgagatgatgaaagttttgttaatggagggagatgcattttttaaaagtttaattctcaaaggctctcaatgaaagcactaaaatgttaaatcagattttcgttaactaataaatgagccttaattgataaataatactgaagaataactttaaataatagacaaagaagttttgtttgtggtaatttgcacacgcaagtgtacgtatcgttaacaagtaataaactcaccaggagtgaggtcgatcccacaagaattgtagttaagtactttaaattaaatctttacttctatttggttaaataaaaattaagaataggtcaaaactagaaaataacaaaaacagtgaaaggagaaacaatttaaggaaattaacggttagtaaaaacgagggcttcgatttcaattgtatctactgattatggcctaatatgattatctttttgttaccaacttctatgcaatagcaggtttacta

SEQ ID NO: 27291 - DNA, 3226 bp, Cannabis sativa
aaacataataaccacgataatcatgttcataattaaataactaaacaaaagaataaagaagaagaataagaagaaaagaactcttaatgatgaaagttgataatgatcgcttcgaatctcttctctcttgctctttaatgtgttttctaatcttaaagttgcttgtttctatctctcaagtcgtccctcaatccgatttatatcattctttatataggccaacaaagatagatgaatccccttagaattaggattttttttttttataaaagataagtgttgcgctatagcgcctacaccctgcactatagtgcctaaaagaaatatcccgaaataaccacatgctgaaattatctttttttccttgcaatattttttccagtcctgcactatagcgcctacaccctgcgctatagcgccaagcaccaattttttacacttcagcttgtttctcgactcggttactccttgattttggtacttcgcccaattatgtacgattcacttgtaatttatcataatttcatcaatttatgcataatactgcacactataaaaaacacatcaaattatacaaaacataagaaataaatactaatttaactaataattgactatgaataagtgtacaaatgtgcactcatcacatactcattaggcaaccttctgcttctcttcaccctagccatctcaaattcaacaacttaggctacttacaacacaaggaaagtcaaacttggttggaaaaagtctaagtagcttggaggagttttttcaaggcaaaagaaaggagttgtggatttttgtgaggcttggagaaattatttcaagggatttttagagttaaggagtccttatagtaatatcagcaaaggaagagaagaagaaatcttgaggtgctcactaaatgattaggcgtgtgggagggaatgagaagagtgaaaaaattagttcagaactcacttatttacagttgagtccaatctcctaatcctaaagctacttcgagtcttttaaatttaaagctttctaaggaagaggtaaatgataagaaaaaaatataattatatcttttcccttctcctttttaagtgtatttcaaactttctatgcaacttggaataagaatacaaacttcaaaggtgttgcctcggatttttcccaaaatacgtggcagcgattgcatgtggcacatgaatttcaaggacacctcacccacaaaattcgctaagttatatatagacaaacaagtgcactttagggagcgagcccccgaagaggagcataaagcccgcctttactcttcgggagctagagatacaacaaagcatctccgggagaaggagaactgttcaaacagtcatttcacatttaatgcggcatcggagaaacgtattagaacacccataaaaaggatgtgacagatggcgtcagcatcatttacggtgattacacgataatcaaagagtctagtgacggatccattatgaagaatcacatcaatcaagggaggataaagattactctcacctaatccctatgacaccgacgacataggtcatgtatgtcttattttatgtatcttaggaacttgtgtacctagggggctggcactcaaagataagtgacccctttttaagtaatccttacaaagctttataaataccctggaacaaaacgaaaaagaggatggatcgatcgaaaagagaaaatgaagtgagagagagatttctccaagaacattctctatataagaactctcattaataacaaagactcgtggactatgactcattaatacccgaaccacgttaaaaccacctgcattaattattcccaaagctctcctcattacatcatttaatcggttgccgaaaacctcggtcaacaaaaggtaatagcaattcctaatgttgttgggattaaagaaaaattagagaattcaaaggaaaaaagataaattttaagcaaaaaaaaaaaaagataaatgataagaaaaaggccaaaagtcttttctcttcttcctttctctctctactatcgaatgacatattcaacaagaattaggatttcaatccaattaatcctaataccataacaaaaaacaagaaaaaattaaattttcaaagaaagagataaaagataagtgaaaaaaaaaagaataattagtaattttaccccttgaattttcgacaatactgattctgccccctaaaatatacggctcactaagaatccccctgaacttttacatttacacaaatttagtcattctgttaggttctgtcgcattattccgtttaaatactgacgcgtctttgtaaattagcaattttacccttaaactttgacaactattaaatcgtattccctcaaaataaaaatgagaaaaaattcagcattttttttagtttatcttaaaaaattaatttagatcttaaaaaaaattattttgaatgattaagaaaattaaaaatttaaaactaattaagcgatttaaaaaattatttatgcttttatcaaaaaatatattaaaatttaaatttttataaaaattaaatgttgaatatattttttttgttttctctaaaaatttagatttatttaactaaatataacaatttttttagtttaattttaaacttttttttaaaataatttatatttttattgaatttttaattattttattattttttaatatatgagtttgttaatataaataagtttaattttttcttcaaaaaattttagtttatttaaattattaattagattttcagtaatttttgtgttattttttaagatacataaaataaaatttgaaaataatattttaaggaataatgtaggttttttcaagtaaacattatatttttttagttaatttaatatttttattaggttttttaataattttttattgacttttttagaattaataaaatattataattttaaaattaatattttttaataaaaaggggtaaaattttgtatttgtcaaaatttaggggtaaaaatactaatttttaaaggtaaaagaaaaaaaaaatttaaacgaaaggacataattatgtaagattaatggcacgtttactacacagtatttaaaattagaataaagtaatggaaaaatataatggaataaataaagaataatcggaatcaatatttgtaatatgttgtttactaaaacttcttggaaatggaatgatagtgattt

SEQ ID NO: 27292 - DNA, 2368 bp, Cannabis sativa
attttctaatccaatccaatctacacaagtgtagatatccgcactttgcggatttattttatgaacacccctaataattacatagtttaatcacattaattagcttaaaatggtgatgttttgtaattgtctaatgtaattctacctaattcttagaggcgacataagaatgagaattagagagtgtagttgaaacaaacacgccaaagccaaactaggattgttcatcggagttcacatccaatggatttataaatactgtgttttttttcaaaaatattgtgtattttttatactgtatactgttttaagtttttactattgttctatgattattttttagttgctctactgttgttttaattgttctgttttgttgttttacggttaatttataaatgaacattatttttgtaaaaaaaattcatgtgatagtaaaattgtaaagtttgctcaaaattcagtatttttgtaaaaattcctatttattgagtgttgaattttatcaatcgatccaatccaatcgaattgactcaattgatctaaaccaacagatatattggattgaatcgattttaactattaaatgcattaactaattatttattggattagatcaaatctatctaatcatttttaatcattatttagggtaaatttcattaaaaataaaaagataaaataagcaaaatttaaacatgtttctgataaacgcacaaatctaaaatagataataattattagtctaacttaatttttatgatcacataattaaaatatgataatacaacacaaatctaattcaatctatataataatgctatcatactctttatacgtcttaacatctacacatatatacttgaaaatatatgtttacttataaacacatctgtaatttagaataaaattaataattattttttaaaaatataattataattaaatcggtttgatcagtttttcattagattggacgtcttatttgaaactgatatgattcaattagaattttaaaatttacattcaattcgattcaattttatttaatcaattatgtttagatcgatcaattataattggattgaattataaaaaaaatcttgtcttatgacatgagtggaatgtgagcgtgagtgtaagtgattttctgacgttatttcaatccttgggtgatacagacagaaactttgttttgttatggcttctagtagtacttttgccaccagattttgaggatagctgttcgaagatacaactggaagaagaagaggaagaagccctgttatgtgaattagcagatgatgtgggtcaaccaattgatgatagatggtgtctcgtgggtaaattcttaacaagcagagttattgattttctgtccatgcaacacacgatggcatcgttatggcaacctgggaaaggtatgttcgtgaaggaactccaaactaatctgtacctctttcaattctatcatgaagctgatattgaaagagtcatagaggggagtccctggacttttaataagattcaactagtttttgaacgactcaagaagggagaggaacctatgttagtgaagctttgtcgtctagatatatgggtgcagttgcataatcttagacctggttttatgtctgactctatagtccagagagttgctaattatattgggtcgtatgttaagtcggatcctaagaactttaatggaatttggagaacttatctgcgtgtaagagttagtattaatgttgaaaaaccgttgaagaggagaatgaagttgaagaaaccagatggtgactggttatggactgatttcaaatacgagttcatccccacattttgctttatctgtggcattataggccattccgagagattttgctcgcgtctctacgatactcctttggaactaattcaaaaaccatatggcttgtggatgaaagctgagcctaaacggaagaataagttgatcggagctagatggctccgaacaggcacgacgacggatgttcaatttgctgatgatgttactgcagttaatgcgcctacaattactccaacgagcaatcagggattgcaagataaaaacactactgttgaaggagattttgcaataaatagcatcaatcaggggatgggggttcacaaaggaattgccaaggaacaaaggattgcgttagtcaatgccaataaggaaacactagctgaaaacttccttactgaggccatgattatcgttgattctaaaaaaaggagattgggacagaatggcaaagaattaatggaggaagatgaggtggaaggaattgatcatgtgcttgatggatcaaaaaacgggtctatggtgggtcctggttctcaggcccac

SEQ ID NO: 27293 - DNA, 4073 bp, Cannabis sativa
  modified_base (3776)..(3786): a, c, t, g, unknown or other
gcctgaacttaaaactcggcccgccttatgatcaacagaaagagaaagtggagacagaaacatatgcaagtacgagaaaaacgaataaaagggattattatacaatcatttggaaaagaaacgtattcattcactgtttaataataattgtttcaagaaaaagtatgtacacaaagaacaatttgagttgaatcaaatatctacatcatggaatcgtacaatcgtacctaccttttaacatgtatttgattgtgtatgaagatttatcatgtgaaagaaccaaaaaaagaaaagaaaaataaatcaagagtagaaggctcagctggccaatctggaaaaatgagcatcaccagaatttctcctattcttaactcataatattgacatttatctttcacgtccaggtacaaacgtaaccgttcttgtctgcggaagctaggggttttccaagtccactccatgagcagcacaggactggtgtagtgtgctccttcagagtgctcactatatcagctttcgatatcgaccatatgtacacagacccatcagcagatccagcagccacatggttgtcatctggacttaagcaggatctgctccagttggaagctactcggtttccagtggctcttagggtattgcagacttccagagtccgaatgtcgaataaattatgcatattgtctctcccactagtcaatactatgttaccatttcgagacagagagatggatgtaatagcttgcgagtgtgcagccacttcagtaagtagctttcctgtttgaacgttccataatcgaagatttccatcaacatgacctgagcaaagggtttgtccatccgtgctgaagcatacggcattgcagttgctgtggaatatgattgtattgatgcagtagcctttctgcaaatcccaaagtttaatggttcgatcatacgctgcactcacaacatgacggtttgagattttgctcacatctacagcacacactttatcagtgtgacctgtgagagtatggcgaaccctccctgaattaatatcccagacatacaagttatttgagctgctggctgcaatgactgatttgttatcatgagtcatagtaagatcaagaacagaaccaaggcagccgtagagtgtgcgacttaatgatccagtattagtatcccaaattttgattgacctgtcctgtcccccagtaatcaattgaccggaattgtactcaaacaatatggaggcacagccaccttcatgtgcgtggatcttgtttttgcatgtagagggaacaaatgactccacaaagtactctgcaccttcttcactttggcggaccacaccatcaacctgctgccgagcaagtttttctaaactggtggcccttagccgaccaattgaatcttcgtaaagtgcgtttagctaggcatttacattagaaatgagtaagaaatacaacatacaaaacacagaaaattaatatatcaatcttgtattgtaaacaaatatgtccacatgttgaactctagagtccccaaattggtgctgtatctaaatatacaaaagttctaattgttagatactacaaaaataatgcatttacctcattaaggcgctcagcatccttcattttttcaagcatccatcgatctattaacatcttattttcagcctcagcatttttagctttaatagtcatctgttctagctgcgctctaatctctatgttctcgcttatgaccaattccagagctttaatcttttcctctaagtctgccttcaactgagagcactcatccctgaagcatatagctaaatgggaatcaccaatagaaaaaccttgaattctcaaaagcttctcccaactatttagaataagtaggttaccttgtttgattcagcttctcctgtgcatcaatgattgccgcttccctttcttgaagtgtggcttttgaagctctggattcagctacttccactacaagttgctctgacatgcgagattgagctttgtaacattgctgaagctctagttctagattctcagccttttccttccattctgatcccttcaggacattgaagagtaaattaaaacaatatactgtagacttaaattgaggatatatgtttcatctatgagaattagcagtatgtagcaaccaagaaccaaggagttacaaagcaaaatcaaagccaaacatgtccatgaagatcaatttttccatgcaccaatttagataatcacttaatgcaaatcatccaatccaatttcactaaaaacccaaagcgcaagattattaattgacagggcaaaaaaaatttacaagccaagataataaaattggacaaaccaaataccaacttagtatgttctataaaacaagaagaacacacattttggagaatattttttatgtagcagaaatccctcaaactcacatttgcaaacttcactgaaaataactcatttcaatagagttttattttccgtaataaattgaagggaattgaccattacagatcattaaagtcaaaattttgtacaaaatagatattcaatcattaaaattcaattctacaatacccacttatatgtcattaattaagaattaaaaactcaacaagagccaaaaaaaacggaagtttacaagcaattatacttatactgataaactaaaggaaagctccattaacagaaaataagcatgtcaaatgaaaaggccttctaactcaaaaattactaaaattacattatatatgcattaaagcatctaaatgcgtgttgcaccaagcacaatcaggtttcaaagttagagtgaaaacctgagaaactagaggcttcgatagagcgataaaggccggagcatgagcgccttcttcaaccaaatgccgctttcgcaaagcctttaatgcatgctttattgcctccttggctatttcttcccgcgacctagataaataacaaacccaccaaaaccatagtcaaaaccaacactaacacagctccatccaaatatcatcactacaatcactcaaaccaatctgattgtttccccaaagaaaatgcagaaaaaaaaaatcaaatcaaatccacaaatttactcaaagcaaaatcaatccccaatttctataatccgtaattaataaaccaaggcagtccttcgtatataacaaattttcccaggaaacaaacggaagtagcgttggaaaaccacattgttaatcgaaagacttacataacgatagaagtggaagatttttgagcgatcgactgatcgaatctttcaatgaaatgggtttaggttttgaccaaaagagtagagtataaacgaagcgtgagctgcataatcacttgtagggttattttcgtaaagtgaacgcttcttctcttttgttttaccaaaaagtccattagtttggtttctttcaattaccaattaatcaattcatatctatttgttacaaaaaagattaattaaataatttaaatagaggttaaattttactttagggaaatcgttcattggagtcctaccgccaatctcttataacaatttcttagtcaatctccacactcaaaaacacatgccgaaatatttttttttcaaattttttttcacagtggtgttcattatacttagaacatcatccatgtaaatttttgaaaattttcgaatagtttacagtacggaaaatacgtttgaagtttttttgaatacgcatggtaaattgaaatatcaggaactctattttcgacactgtaaactatttgaaattnnnnnnnnnnntacaagaatgatactgtaactataacgaatatcactatgaaaaaaaatattccgacatataatttcgaatgtgaaggttgactaaaatgttgtaattagcactcctcttgttcaaaatggcttgtttttcatttaattgtcaaaaataacttgctcaagtttcataaagttttatttgttttggtatgtttgaatacccgttgttgataattttctaataaaatttttttagttttctgatttgttttcagtttattcagattcgttagctttggtgacggctatca

SEQ ID NO: 27294 - DNA, 2276 bp, Cannabis sativa
atttttcaccaatcatttatttgtggagaaatgttaagtggcaccttatggtgtcaaacgctacaagaaatgacatgttgttattaatataaattaatattaggtgccacacaatttgatttaataaataatatagaaaactgttaatcaatcgcaacgcgccacatcagtatgttgttggacaccatatgatacctaatatagcaatgttgttattagtaagaaaaatgaagggcatccatggtacctaacactcttgtgaggtgtaatatcgttattggtacaactcaatatcaggtctcactcgttatactttaataaatattatagaaaattgctaaccaattatagagtgacacttcattgtagtgctaggcaccatgaatgcttcatagcaatgctatatttgtaatattagctaatttcatagagcattgttattggacactagtggtatccatcaccgtagcgccctataattagttagtgatatttttttaattttttttttaaaaattatatgggatctgatatttaattagaccaatagcaatacaatattaaaaaatatgctagacactaataatgcatttagcatttcttaatttcataatatcttctttttttcctgatccttcttttttttttttttttttttaaggctggacaattatatccatatccaatccaagtattagtttgccgtgatgcccatttagaaagtagaaaagtgaagacaatttgaaccacgcacctaagattccaaatctttttattaaaagtttggtccctcccaaaattaataataagaaataaacaaatgataataacttagccttgtttttttctttttttccttttgaaatagagcctctcttttatatctggtctacacttattcttaccaaattatgtatattgatgacgtagtgttgtgacacgagataatcctttaagacaagaaaaagaggactttttgtgtgtggaaaggagaccaccaatattgacttgactatccattcaatctatctatccatctaacaaattcgaagtcaaaaactaacacttatctgaaccaaaaacatgaggactcaattactaacaaatacattgaaaaataatctttggtattagaatcttaaatatacggtgtgatcgatctatcttaaatatataatatttgattaaattagaagatatgaacaaaaatattaagcattaattcaggcatgcatgcatgtatactgatatatgttcacgagaaaattaagcaaagttggtgtgaatggataacgtacgtagttattgctaaaaaagaaaaaagtttggataaggatcataatatatattttacagctataaatatagccgaaaggcagaattggaataggaactttccaagcacttaattgggttataattattaatataataattttcattcacatacgtttactcgttttgtaataactaattaatatgtttcgttcatatcgaccgacttttattttgcaaaacttattatttacacgagtattactaacatttactacttacatttccaacaaaacgaaaagaaagaaaaatgtacaatattatcaatggatggatgatataaaatataagttgactttgtataaaatatggtatatgtatatttttataataaacttgacttaggtataattagtgcatgtagtgaacacttttgaaaacgaataacttaacgtagtattaggctggtgttgcgcatagctgcaattttgcttccaaattgaagacaataataaattaatgaaagaaatagctagctaagctaagctaaccgattaatacacacaatacctacttagtattattaattatcaattatttatatttatttgcatgtttgatgtttcctttcctcttaaactggctacctttatcgtcgaaagaagcaatatactatttatgtaacaaaagagaagctaggctgcaccaccactataaaaaatttacttttagtcacaataaaatttgtaactaattataaatcattatttttataacttaaaggtctgtggataaaagtattaatcacaaaattacaatttattatgactaaatgttattttagtacttgctgtgattaaaattaaattagtgacaacttatgtttaaataatatgtttcgtcacaagtaacattttattttgactaaaagtcacatttagtcacaaaaaaaatatattgtgactaaaaaaatttcgcaaaaaatagcagttttttgtagt

SEQ ID NO: 27295 - DNA, 1773 bp, Cannabis sativa
aaggggagcttgttattaggaagctagctagtattgtattgcattaaattcccacatgccatgctattttggtcagcattttggctgagatgagccccccctataatctatatatacatacatatatatatatatatagatatatattcacaaaaacacatgcatatgaatttcccatgtgagtttcttttatctgatcaaacaacccatattacgtagcatcatatttatatatgtataaatatatatgttatgggaactcatggactacttgatcttaatttggaggcaaaacttggagccttgtacaagttattcctatattcctttcctgccccttcttaatttatacactgctttagaacattacttgtgtaggttagtaaaatctatatgtttctatctttggttattgttgtttttttttttttcctattatattatttagagtgttttatagttaaattctcttaattatcgttcaacttgtacttaaccctttaagtttaaattttagctgaaatttttttatgatattactgtgttaacaaatttaaagtagcatctaattaactaccaccataaactgtttatatgtacactcttacttacgtggcacatttatattcgaaaaaaaacaaaaaaaaaaactctattattttactagcaaattgattcctcaattatgacatgtagtaatatggagagcttgattcttggatacaatattttgatatgcatgtgttttgaaaaccctttttaacatatgtaatataagagtagttaattatctaaaggtactctatatctaaatacatatattatatagatatatatatatatatatgactttatgatgatatactcatcaaaaagattacgcgtgctttgacatcacacagtacaactctctctatataaattttctttccatgaaataaaaaaaggtccataaaaacaaaaagactatttttttaactctaatctttcaatgacaacattcttttcatttagaaactgtttgttcttttcttgacattcattcaaacagctgagacttctgtgacactgatataataatataccctttattatcaattcttttttttttcacaaaattaaattgaatatcagaatcattgactatatccactttttacatcccaactgttaaattttcacttatatatattggtagtagtaactaagtaataatggtgtgagttgtctaagtgtatatatatatatgtgcgtgtgttttccaccctgtaattattattggtacatgttatgatgatcccttgttatcaataataattcatatagaatttaagcaaaacaaaaagattatgtgattaattatgattgtctatcaaagttgctatattcccggactacattatgattgtctttgtaattgttccctcttttgggttttgtgtgtaagtctctatgtactctctgctatgttataaccaaagaagaggaataaaattcattatcgatttttatcactttttattcccattttagagaactggcaaaaattacatataatgcaataatgtaagtgggaaaaaaagttcaaaagaaagaaaaatgaagtaccttacgaattactcgccactagtatggaggaactcagagtcttgaaaaaaagtctcatatcgaaaaagttagaaaaataaaaattaattcgaactgtacaaactacaaacgacactacataataatgaaacgacatagatatctaatagcaaatctaattattac

SEQ ID NO: 27296 - DNA, 3794 bp, Cannabis sativa
  modified_base (590)..(598): a, c, t, g, unknown or other
tgttgataatgctgctgaaagtaaggggaatccagtcgagaacttgggtagtgttagaaaattagaaaagagcaacactgatggtaattcagaggaatgggtaattgattctgaggaaacagggactttaaaaacttctactatacctgtcagtagtgagaactgggtgactcctaagaggaaaggttcaaaaactgttattcggcctcaacaagaagcaatcgccaacaacgattatgatgtcttagaggatgcagagggtgtgttggctactgatcttaggcaccattctaatggatagtctccatcttttaggttggaatgtaagaggcctaaataacattgagaagcagtgtgaggtttttgaacattgttagataaataaggtgggttttggggctctttttgagactaagattcatcatgatagagttagtaagcttatgtctaataacccgaactggaagattcattccagccaggagatttcgtttagaattttgttgatttggattgacaagctagttaaagtggatattttgttggaagataggcagctcattcattgtaaactcaaaatggtgggttannnnnnnnngttttttctcactgcggtctatggaagtaattcgttaaacgagaggaaggatatttggaataagcttactagcattgggcacctaaatggtccttggattattcttggtgacttcaatgccatgtttgcatacaaagatagaagtgggggtaggaaaattagaggcattgaaatccaggatagtcaaagctagcttgctaggggtcaagttaatgagatgaagacttctggcttcttttttacttggtctaataatcacgaggaaggcagtcgagtgtactcgaagttggatagagttttcactaatgaaagctggttagatcatttcccgaatacagaagccagctttagatggggggccttctcagatcacagttattgcctagttaaacacatcaaggctggtaaccgtgggaccaagcctttctgtttttgcaatcactgggtgttcaaagaggatttcagagagaatgttcttactacttggaagaagcacatggttactgatttgcagtcgttacaccaccaactgtttagggtgaaacacatcttgaaaaattgctatgttaagaagaacgaggatattattggtcagtacaatgatgcccgagacaagtttatggaagctcaagaagccttggccatcaatccgaagtgtcctacaactgttataactgaaaagttgagccgtgctaactacctagatgcccgaaaacagttttcagctatttgcaccaaaactcgaaagcttgttggttaaagtttggtaatgaaaacacaagctattttcatgcaatcataaaaaagaggagagctgagaaccaagtgtgttcgttcactgtcaatggggttgttgttgatgagtatgacaaagtggttgagcattttttaaaccacttccgcaatttcatggggagacaaagctcaacttcaagaagattggatgaggactgcctcgagtttgggaataaacttactatcgaacatcaagcgaatctaattcgtccgttcagtaagaaggatgtcaaagaagctttatttggcattcattcgtccaaaattctgggccctgatgggtttggtgcgggttttttcaaagagctgtggaatgatattggagatgacttctcttgtgcggtgttggggtttttccaaactggtaagcttcctcaggaactgagtgcaacatccatatctcttatccccaaaattgataatcctcaaggagcttttgactacagacctatagcctgttgcacaacaacttacaaatgcatttcaaagatgatttgtaccagactctcggaagttctccctgagctaatacatgaaaaccaaggtggctttgttaagaagagacttttatctcacaatgttctgattttgcatgatcttctcaaaggttacactaggaagaaaatttcttctagatgtatcatgaagattgatctaagcaaggcctatgatacggttgactggtgctttgtggctgatatcttaaaagctctacacttcccttccaagtttatcacctgggttttaagttgtcttcaaggagcctcttatgcccttctgcttaatggaagaatccaagggtcttttaagggagaaaaaggccttcatcaaggggacccgatgtctccacttctatttgtgctcataatggaatatttatctagacttcttatttagagttctaagaagaaagggtttgggtttcaccctctttgcaaatccttaggccttgtcaatcttcgctctgcagacgatcttattatcttctgcaagggcaatgacaaatcagttaagatggtgaaagatgcctttcaacggtttagtgaagcaacaggcctgattggtaacaaagccaaatcaacggtatattttgggcgtatcccaacttcctataaacagtaaacagagacttgctaatatcttacaaatggaagagggttctttccctttgaagtaccttggtgtgaatctaagaccaaccaaatggcgatctgctgattgtggtatcatccttgataaactccacaagaatttgcacacttgggcaagcaggaacctcccttttgctggaagggctcaattgattcattcaattctgctgggaatcaggaactattggatgggtttattcttgcttcctcagaaaattacgacggctattgacaaatgtgtcagagacttcctttggggctccaagggaaacaaaagcaaatttcacattccctcttgggagaaattttgtctccccaagaactcaggagatcttggcttcaaaaaagggaaggtttggaacatagcgcttatggaaaagtatatctgggctatatctagcaaacaagacaacctttgggttaggtggattgatgcaatatatctgagagggttgagcttctggacagttgaattcaagcaagatgcgagctggtacttcaaaaaaatcctacgtcttcattcaactattaatgaatcaaatgtcatagctgctgtaaaaagaggtaagttgagtgctaaactgttttatctctcttatattcaggctcacaaggttgactatgcaaggaacatttggaatagaatggtccatccaaagcatagattcgtaggatggcaaattgtgaacaaccagctgctaaccagagacaatcttagccggtttctgtcaatctcttctcccttatgcccggtatgctgtagggaaaatgagtcgcaccagcacctgcttgtgcactgctgctttacccgaaacttgatttgtgagattaccaaatggtgtggccattttgactggtcagtcgacttcagcaggtggttctccaaggcagccaacaatatgcaggaaaggattatcaacacagttattttggcaaccttgtacacagtttggacaaacagaaatatttgtatttttgagctgagttgtaagacagcgagtaccttgagtaaagagatcaaatcttgtgtaaaatctagatgtttaatgggtagtaatgggggaaaagggaagctagatagctacatttttaatgtaatttccagctagtcttaaagtgtagggtctcgaactgctgctgtttttgtaatctttggttgttcttgcctgtttgaataaagaatcttcttcttgttcaaaaaattaattaaataattaattttcaacttaatatatttttctacttaatta

SEQ ID NO: 27297 - DNA, 2920 bp, Cannabis sativa
  modified_base (2873)..(2888): a, c, t, g, unknown or other
tatgatttaatgtattaacttttacagaatatcgttaattaatcacaagacactacctctaagtgatgttaataacaatgctcttaaaacaaaattttagaaaatttgtgattcatgtttaaaaatattttatatttatttaaatattattttatttatatttggtaaatatatattaaaaatatatattaatatatgaatagtatagaaaaaaataaataaagaagcagtgaaattttaataatgtattttaaaagataaaataaaaaagtttatgaaatgctcttacttgtatttatacaaaagtattattattaggtacacattaccgcaaaataatatcttgtaaatggttattaataattaaattatattaaatttaatatttaattatattaataataatatgatattatacaatgacgtgacagaaatggatatgctttatataaatgaaaattagaagtgtgtccaaatttattctttttcactgatttagttaaaattaataaaatatgcatctcttaattaattaataaataaatatgcatccattaattattttatatatactttaatggttagttaatatcatatttcatattattaatgggtggttattgtgctttagattaaatagaactgtcttaactaatagggtagttggccaaaaagattatgacaattaattagcatttttttagtcattatggactagtgcgtgagttaggaaacacataattaattgaattagattaacaaaatatgttaaagtaaaaggtgagatttttgtttttatcactaataaataatagtaattataataggcctaagcaataatatagtagaaaaatctacaacgaaaaataaaagaaattattacatgaagtagtcagagtggcgtactcgtgtataagagtcatcatttcgtgggtgtaagggcccaatgggagtttgaagtactaaaaatgtctccaacaccttaaaacaacctcaaacttcctaaaaccttccaattaacatgtagcaaccggtcgaccggttggccccaggaaaccccatcgaatcggaattcaaattggggaaccaatctaccagttgggataattttggaaccctagtttttcccctttttgtgttatttagggaattgccatgttattcatcgataggaatatttctagttttgattttaaattcccgagaagtgtcttagcgtgtctttcaccggaatttaaaatattgtaatttagggccctgtaaagcgtcgagttgcagttccactcaggctaatcgacacactttagcacggaaacgacgtatgatagcataaagtatatatatgtgaatgtatgtatgttattatttgtttacactaactgttaaagatgtagttataagggtgttagtacagtgtagagttttagggtagttacagtgttaccaacacgagtaccaatgggtatggagtgcatgtggtacaacaatcagtaactcccgaaagtacaatattggctctaccaacacgagtacggagtcggtattctagtacatatagtacagtggtcgtacttccgttaagaacgttcttaaccatttggtgagcttagcatttgggctcaggacggcttaagcataaagccggtgttgcattgtttatgtatgttttatgcatatcttactgagtcggtcgactcatcagtttgctacgtaccttgtgtaagtaagggtaaaaccaagctgaaggagcaatgagttgggcattggcaaggattgtacatatcgcggcagtgcaacctgtagggttacggtctttcagcattttaagctatattttgtagttgccctgtagtttgtaaaaaaaaatattatgtaactttatatacaatatatgtattttcaacaagttgttttttttaaaactcgggatcccgatttacaaggttatataaatatattataattagattattttcaaattagcaagtttaaaaagtcggtcattacagtttgcagtggaacgcgacgttgggccattagaaagtcatattttatatggtttagaaagttattagcacgacatcattgttaggcattggaagtatcaggaattgtcggggtttcgaaagtgaccaaactacctttgggtttcattttggtatttgttttatatgtcaacggcaaaatggtcaacatgttaaggtatctcttgtcttttgtgagctttattattcaggtttaataaactcattagttaattgattttttttagataaacataagcataaaaaaacctagaacctttctctctctctctttcgaattgtcaagaacctgcaaaaaagggaaggaatttcagttgtgagtcaaggaagtacagcaaaatctaggtgtttcaatctaaggtatatccttctaacatagctattcattgttttcataagctttagttgagttgttgtttgattttgaaaatttaggaactgtgaatgtgtaacctgcttgatttcgtgtcctggagttagattaggtttatgatggttgatttaagcagagttggtaggttgtggtgtggtttgagcaaagttgagattagagaactcaacttggtgctttaatggtgttttgattttctgagtttgttattgaggtttattgattgaattgggttcattatggtatatacaggtattctgaaggttattggagagtttggggttaatttaaggtgttggggacgattttggggttccctgtacttaaccgaaattccggttggggaactggtctatcggttgggacaattttgtgaaccctagtttttccaattttgggatatttaaggtattgccatgttattcatcgatagggannnnnnnnnnnnnnnntttaagtccccgggaagtgattagatcggaag

SEQ ID NO: 27298 - DNA, 2401 bp, Cannabis sativa
  modified_base (2364)..(2369): a, c, t, g, unknown or other
aaaaaaaaaaaacaaaagacaaaaacaaaaaaacaaaaaaaaaaaaaaacaaaaaacaaaaatctcacaacataattttggatcgtgatttaaattgggtttttggaaacaatctactaattgagcacacactatctcttctcttcaaagaaagaatagtaagaatttttattgttacactaaaaattaataatactaatatattttaaaatataatttttacataaacttaatccttttattatattttatttatttttttcgtaaaataaaagatacaataaatgatggttgataaataaatataaattacatattttactctttttacgttaataaaaaatagaataataatttttttataataattaaaatatttatttttagtttttaattattaaagtaaaaaagttgaaaagtatataatttgcatcaatttatcaactactatttattgtgtcattcatttcacgaaaaaattaaatagagtgtgatagaaagaccacgttaatataaaaattatattttgaggggaatccgagcccgttgtcccaaatgtctcgctctaaccaacatttcgatttcatctttcaagtttttacaatcattggtggagtgtcccacttctccatgatactcgcacttcttactcgaatctctcttgaaatttcccccttgaggtgtctgcgggggctttctataatataccatgttgcaagtttccttataaaaattctcacgagtatccaccagactggagtactcagtatatcttggttaatatttcttcttgagttttttggagttctcgcttcgtcctggaccctttcctcctttcttactccatgattgacttgcgttctactttggaacttccgctttagattattcaagagtgatactacatcctgtctgtgccgctccataccccgagaaatgggtttgcatgggtacttgtacggatgtggatggaccgtaaaccattggggtatactgaattcaaagaatgtaagctggtgaggtaaatccaggagtggaagcaacatgggctggtgctggagggactccataaaggctttctgataagaataatcttccaaactaataaatcttctttgtgccttagccatgaactcggatagtgttttggccctccttctttgtatttctccccacaaaagagaaccaactgcgagtccagattgtaaggccactagtttcatgtcatcgtcactttggtcttggctgccatcattcgttgaatgaaactcttcaagctttcttctacctattgcttgatgttggtgatggaacccatctccaagtcataatcgcaggcagtaataaattatttccaaaaggttgactacaattccttccaagagtgaattgatctaggagccaatctcttccactaatcttcaacaaacttggtaaggttcaaggaaaagcccaaatatttggcatcctcactaattcttgccacttgcatcatcttgttgtacttggctaaatgggttttaggattagtgcgtccatcatacaactcaatttgggacattttgaagttctccgagaggggagcttctgcgatcctccttacacgggctttgagtcctcatctttagaatcggtgagggccccactttatttttagaccaattttgtcagtgcaactatctgttcttccaacctctttgtgtcactgtcagggagatcccttccacagactttatcatttaagtggttcctgagatcgttaccatgtggcctcgccatctcactttttttctttcttttacttggtatctaaacatcttctaagatccaccgtggatcaactatcactagagtactatccccatgtcccactgtttcggtttactgaatcactaagacagtttttccttcccttgcgctttggtactttcgtaccagtcccttttcgcattacatggcctttatgggctgaagtgcatcgagcccagaggcgtagatcaccttctgtgcctaagaatgcctattggcctaattcacattttttcaaggaagttgaggagcatgtgggttcttagggtcacttaccttttccttccccttgtcatgtggaggagcagaggttccaacattagtaaggtttcattttgtgtttccttcgatgcactccaccgaggggtcattgttagaatcttccttatctatatctctgaacttggctcgaaggcaagccatcatcttctccatcttatgggaaaacttctcttgatgagcttgctgggttttgtgccctggataaatttatttcaatataatcagatttactaattgataaaagatcagaaatcgttttatgttgcatggttnnnnnnatttatttcatgattatttttaatgtataaat

SEQ ID NO: 27299 - DNA, 1301 bp, Cannabis sativa
tattattacatgtgttgtaatcttattcttctacctttcatatatatacatacaatatatagtgtatatatgtgtattgtgtaacatatatttaatcaatctatttacttgtccttgtattatttttacaattgagttgtatattacttagtttatcttctattgtaataaaatctctaacagtaaaagtaaattttggagaaatttcgtatttggtgtaaaaatatctctaaaaaaaatagcccaaattaactaaatgtagagatgatatatattagagttagtcttacactattcatgtgtgaaaataaaatactatatataagatgaataggctactcatttcattgccaattagttttgagatggaactttattcaccttatcccaaattttaacacagtttcagagtcatttgtgatctgttgtgagcccaaagtatcgtcagtacacgagccataaaagagtcgtttgtaacccgttgtgaacccaaagtgttgcagatccaaaaaaacgagccaaacttaaaaaaaattgttgtctcccctctaaccttcatttgggacctttcggtcaatgtgtgccaatacccatattatccagacccaaatgttaagaggatgtattagagttagtctacattgctaacgtctctcattaccaattagttttgagattggttttgagatataatcttattcaccttatcctaaatttcaagaatatacaagtgttataaaataaattaatcaattttatttatttctctctaataaaaatattattatatttttcttttcttttttcataattttttgttactttaattaataaattatttaaatatataatatttaaatgatgtgaactaaatttagacagaatccattctaacaatattatgtatatcgcaatatcctaaacacaaataagtaaaatatatatataaataatatattatgtatattgcaaacaaaagttaatgactagccaaaaaaaatattattttgctcccaaaccaaaaaaagcagctattagctaatatacatattacataacagtttaaatttataatctgagatccagcctctatttgtttggattttacaaccaagacacctttactaccaaaattttgtagaaatagaactaaaattaataactaaagacttactagttaaaagtttattttattatattttgcttttctttggattctaaccactctaatcagtacttgtcaatgtttaatggtcacctaacgacataaatgatcgaattttcaaaactaatgcttagtt

SEQ ID NO: 27300 - DNA, 2809 bp, Cannabis sativa
atctgtcattgaagcctatccaaactaattaattagttaatccaatattatatgtataaataaataatgtttagccaattactctataagtatatattcttgttctcaagaagtgtatttatgatgattggttaattgttgtaagttttaattatgcatgtttgtgttattattgccttaattaattagtgaagttattgtgtccttaattgcaatgtggctccattaatattttcatgtgtgaattagtgtgtgtatgtttgtaatttttatttgatattttaattatgatttgtttttatggagccaccaattataatcttaattttcacatcataaattatataatttctttttaaatatttttataacttactaccattaaaaaaagctaattataatttttattctctgaactttaacgtttacaaaattatgtactaaatttttctaagcgctaaaattttttcttaaaactattaagattgtcggatttaaggacatttgtccgatttcattcaattttattaattatgtgattgtccatataatactccacaaactttaatatctactaaatcatgtgctcgaattttgatatgtattgaatcatgccccctgaactttcatccatgttagactttccttatattaaaattagataaaagtcattaaatccaacaattttaataattcaaaagagatttttaatggtcttaaaagttcaggggcatgattttgtatatatcaaaattcgagaagcaaaaatcttaattaatctaaaaaaaaagagcatttataaggcactcatggtgcgtagcaccacgataaagtgtcaccctataagtgggacatgatattaaattgcaccaataacaccatgatgccctttagcatttctctaaaaaaaaattatatatcattgcttaaattatatatgagaaatgttaaaaggtattagtggtgcctagcatcatcctatgtgtcaatattactattgatgcaattaagtatcgagtctcatataacttaatattataatttttaaagagtatcgctaactaattattaagtgatacatctaaaatgttttaggcattactggtacccaataacagtacttgtaatatattatatatttattaattttttttattttgtttcctagtggcgtacgttggtattattgattgggaatttcaaattgacaggcaagttatttttcaccatagattgatgatccaaaagtgagtgagcttgtactattccacactaatgggaagaaaaaaagaagtggactaaacataaatgcaaagaaattaaacacaaattcaatgcatcctataatgttaataaagccattaatatcatcaacccaatgaaaggaattaataaaatttatatgctagctgaataaattataaagaataatttgtatttttttttcatccaaacgtacgtacaacattacattaaaagtttatatgaacttttacatttatagaaatttagttcttatattggattttaaaattagcattttttttactgatattgggtactttatatgtactaaagaaaataattaggtgtatgtaagttacaaactcaaaattttgatacttattgttagaattttaccaaaatctgcagcttttgtcccaacacacttcaaagacaaattaattcaaaaattacaaaaatggtattttcctaattttatctttctattatgcatccataattaaaagatgctaattttataactcaatttttgctatattagtttcaggcccaatatcaaaagcccaagattccaaagagtcaacacaagtcaaagattttagggtttcccaaaaattttcttttctcttcttattttctctctttgaaactaatagatctctctttttgttttttttttttcacatgaacacacaaatgagctatgcaaagctctctaggaggaactctctcaactgaagcactctctcaaaatggctctttatattctgaaatgaaaggaaaaaatatcctttttatagactaggttctgtgacttctgatctagggcagagccctagtgatttatgttgtaactgtattttgctgtaactattttttctttagtcttgatcttgatcttgtgtttctattgtaagtaatgggtaaaagttgtagttttggaacccaatgaatagtattctgaagcttagggtatataaggaaactattttaacaaattccacctagatcccttatgtacccaataatagttgatgatactctgagggcttgaatgaccactagggtcagctccatttgtttattcctagcaagttttgtttgggttatcaccttgttcctcatgtctatgacatctccttgtgtcaccttgtctctctcccttgcatagaccgaattacaaaacccttccaccaaagtttggttttgtgactttctaaatacaagtttaacacctgttgtcctctttaagtacctcaaaatccattttatagtcaaccaatgtatcttcccagtcattaccatatacttgctaacaacaactatagtatatgttgtatctggtatgatactcatcgtaagatacatcattgaaccaaccctattagagttgaagatttgattcatatcctttttctccttctttgtcttagggcatctttctttctgtctaaggggccacatatatttcacaacactctttctcttgggttttggaactcaaacccaagtcttcttcttcctcaaagagtcttgtctcttcatccattgcattatcccattt

SEQ ID NO: 27301 - DNA, 5208 bp, Cannabis sativa
  modified_base (5175)..(5178): a, c, t, g, unknown or other
taataattaccattcctaacatgggaaaaatcataacaaaaaccaccatatgtgctataatcttaattataacactccattattcaattttacatatcaatgcagtaaaccactcctcttccaaccacacaagacaaggccgttgggaccttttacgtgaaaacgtaggtgtagtagccatgcacatgaccttaactcaccacggcacagtaatcatcttcgaccaaacacaagccggcccttcccggtacaagctccgccgccgtttcagcagcggaagacattgctcaagttcaggcgacgacgccaccgactcttcatgctacgctcactctatcgagtatgatatatcaaccaacaaaataagagctctcagaatggacacagacccttggtgctcctctggatctttcctaagcaacgggacactcctccaagcgggcggaaacggccgaggagctcgaagaatcagatactttcggccttgtaacaacaccgaatgtgactggagacagtccaggacacaactctcggaggagaggtggtacgcttcgagcttggcgttgccgcaacgcgatagggttgttgtggttggtgggaggagagtgttcagctacgaatttgttcccaaaatgttatcgaacgatcatcgagcttttcacctaccgcttctgagccaaacaaacgacaggaattcgagagggaataatctttacccatttttgcatctttcgtcggatggtaacttgtttatttttgctaatagggactccatactgtttaaccacagacggaacagggttgttaagaattttccgagaataccgggaggcggttcgaggaactatccgagtactggttcttctgttatacttcctttgaatcataatgataggtttcagagagttgaagtcatggtctgtggtggctccgcctctggggcctaccaagcttcccgccgccgtcatagatatcttcagggcttggactcatgtggaaggatggttatcacaggtacgtacggttaggactaagagagagtgcttcatttaatttgtttatttattactttgtctaaaattcacatataagggagaaaacactagctatagtacactagtacacctagctacttgacacatatcaaatacttgtgattatgagaattgctaatattatgtagcattgggattactacatgtttcgatatcaagattcaagattatatgtaccttatttcacaccctactaaaaaaatagcattgctattagtcactagtagtactgtctagcaccttctcgacatgtcgcgttgcgattggttagcaatacattctaaaagctattatattggacccgatacttagttggactaatagtgatatactgacacatataggagagtgttaagcatgcaccactggtgccctttagcatttctcactaaaaaattgtgctatatatttcggtaccccaatctcagtggtttctagtgtagctacctagatcatgtgtctaatattcttttattattattggtacaattaagtattaagtgaagtctcatataatttaatttattaagttttaagtaatattgctaattaatttcaaggtcacatagacatacagtcctaagcatgatgcccaataacaataacaatgtagtaataatttttttaaaaaatatcgctaaccaatattattttttaggttcagctagcatcactatcaatgcgcttggtaaatttatatatacattacatgtaattttcagtagtataagtactatcatcaattaatatttttatatttttggtgtttcattaattaaaaatttaacttgtttgtgcaaaaaacaaaaaaaaaggcaacacacacagatggagaatggaacgaatgccaggtcctcgtctaatgaacgacatgctactcctcccaaacggcgacgtattaatcataaacggcgccaaaaggggcgtcgccggttgggagagagcaagaaacgcgtctttgaggccattcctgtacaacccaacaaaaccacaaggaagaagattctctctcctcagccgcacaaacatcccaagaatgtaccactcctcggcggtcctccttcccgacgggagagtcctagtaggtggcagcaacccaaacgaaaggtacactttcaggggcgtagattacccaactgagctaagattacaagctttcactccctactacatggacaaccactacgaccccactagaccctcaaacgtcactttactcagccaacaccttaacggcgtcgtttacggtgcagagtttcacgttcggtttttcatgtataatacaacaacaataagcaggcccagtcgcgacgttgagtttgtggtttacgcgccgccgtttacgactcactcaatgtcgatgaatcagaggttgttgaggctgagagctaagagtgtggttacagataataagagcagtagtggttgggttgaggcagttttggaggctcctccttctcctaatgttgctccatctggttattacatgcttactgttgttaatcaagggattcctagtgtttctcagtgggttcggttcatacatagttcatagtttatagtatttctcttgaggtttatagtttgaaatgggttgaagaataagtttaacaatgagacccttttaattattatatatagctcatataattaatgaaagaattgcacctttttattcttattacttggataattaatgggttgaagattctctctccattagagttctatttatgggagcattattgactttgatatacatgtggttccaaaaagataaaacataccctaatttgtaactataaaattagaggtagtggttgcgaactccaacccagactcaacactacaagaagaaaacattttacgggcatgacaaaaggagtgcttagaagtccttttctcgtgcccaacatcctattgacacgacatgtcgtgcctattctgtcgtgctcaaaagttggtgccaaaaaagtgtactttggcatgacaactgacgacgtgcatgcctataatccaagtatcgagtccatgttcaattcgtaatacattaggcactacaaaaaaactctataggctctactttattgtgcctactgtttcttttaattaaaaatatttttgtttaatttaattatattaggaaccaatacaaaataatttacacatttaaacaaatataaaataatttatctttaaatacaaattgcttttacactaaatgaaaaaattgattaaatttaaataaacggcaatactaaaatcatctcaattacaagttaagtgttctcttttaattgttataaaaaaagtgttctttttaattctgtataaatttacaaaaaaaaaaaatctatttttataaagtctttttctcgtctctctttgtaaattccttcgtgaaattgtaatatatgcctcctccacaaacttaaaaaagtaaataaaagttttagcttatagaacattaaagcgacaacaaatatttatttatttgaagaaaagtgagttcaaataattgatataaagtaccaaaacattttgaatctcggtaaaatattactagtgcatccttgataaaatatacacatataagattcacttgctaagagagaataaggaaaggaaaattgtgtttgaatgcatagcagtcccaacaccatctctaatagccatgatagtcatgatctccacattaaagttcaagtttaatatttaataggaataattgcgctaaaagtctctaaaaatttgaggttaatgtagattagttcccaacttcaaaaattggcagtaaaaatacctaaggtatcgacaaagttgtaatccgttcatacccattccgttagtgtaagtaacgtgacacgttgacgcccaaatttaatcacagcctttttaatttctattttcccctaaaatctaaaactaataactaaaacaaataaataaaatctaaaacaaataaataaaataaatctaaaattaattaaattggttgaactaaaataaaaagaataataaaaaaaaataaatttcataattcatttgagaaaccataactcaaatccattatcgacacccaatatccaaatccctaaatcgaacctaaattcctaagaatcgaagacaaaaactgtgtagttactaaaattcaatcgattttgtccatatcgacccatttgatcctcattcctaagctaaatccttgaagattgaagagagaacaataaaagtactcagaaaccggtctatataatggaggacgacgatggtggaggtacaatctcatttctcttttctttgattgtttatagtttattttataatttgaatgaatcaaaatgatttttactatatttctttctttctgttttattaaaaaatggttcttaaattttactgtctctttctttttttgtttctcgttcactgtatgaaaatagttctagatggagtttgatatttatattaagttgaatatattgtgttaagtatacatatttatttgatctatattgtttttggtggagcatgataaagttggtattaaactattttgggatattggcagctaaaccacttgaactttaaattttttaacacttaaccacaaaaatcattttttgggggcaaaactacctaaatttccattctgttttgctctatacacctccgtccaaatatcacagttaagtgttataatagactgcccacgtgtacacacttgtacacgtggtaataatttttttttagtggcccgcgtaataataatatttaaaaaaaaaaaaaaaagataattttaaaaataatttcttttcgggatattggtggctaaaccacccgaactttaaatttcttaacacttaccacaaaaatcgaaaataattttaatttttttttctttttctttttcttcttctttcttttttcttcttctttcttctttctttcttaaactttctgaaaccctaatctctcagccctccctcccaagccctctctttctctctctcgtctcaccacctaagacctcgccggagccgaagcacccatgccctcgccggagccatttgccctctctgtctctgtctctgtctgtctgtctctctctctctctctnnnnctctctctctctctctttctgtctctctct

SEQ ID NO: 27302 - DNA, 3853 bp, Cannabis sativa
cattgaattggaggataagttcagaaagtatcacgatggggaacatgggaaattacccagttatgactcggatgaggaaaccgagccgtttcatcgtaatattttgaattctgaattccctcaacgattcaaaaacccacatgtctcgcagtatgataggactacagacccagttgctcacttgaataactttaataccataatgcgagccagcaatgtctcgaataatttgtgttgcatctttttcccaacttcttttactggagcaacgagtagctggttcgacaaatttactcatcattcaataatgtcttgggaacaactatccaaggactttaagaaacaatttcaagctactagagacaggcgacttgaagcgtcatccttaactaacataaagtaccaaccaggttattcgcttaaggcttacttgagtcgctttagcgcagccgctgcaaaggttagaaacctaaataaaagtattcagcttactactcttcaagtagggatcacaaccgacctttctacggctagaagtgagtttcgggatgacctacaaggtcgtccactaaggaacattaatgaattcaatgaaagagcacaagtatttgtgcataaaggagaagtaaggaacgagatgaagttgctaaagactagctcgcgaagtaaacccagcacgagtactgcaacatcaagtaccacctcaactaaaatagataatccaagtggttcaaacacataaagaaaagatgactctagagaatcatctaaaattaaaaagacagaaaaaaaaaccatgacaagtatgtttaaatctacttagtatacaacgagttgaatgaaactcgtgacaacatttttcttggaaatgaacacaaggttacatttcgcaaaccttagccaatgagacatgcgagacataaacaagatttaacgaaattttgtcaatttcataaagatatagggcatactactgaagagtgtcgacaactaaaagacaagatatagagtctaatctagcatggatatttcacacagtatgtgaaacatgaagggaacaagccaaaccaccccaatcaccctattaacccgaataaccatagaatgaacctctccctattgagggtgaggatatattggtcatttcgggagggccgcatctcgctggaaacaataataatgcccagaaaagatatagcaatgaaataaagaacgaacaatcgatgtttgctctagaaccagtaaaaaaagcaaagatagatgaacctccaattatattcttggaggaagatacaaagcatatgcggtatctgcatgtcgatcctctcatcgttacagttcaactcggcaataagagagtgaacacagtgttagtggataatgggagttcaataaatatcctttacaagaatacatcaaagaaaatggggttacacgatatgaagttaaaaccttgaatggtaagcttatgtggattcacaggtgatagtgttgccagccaaagcatcattgaacttccattaactgtaggagagccaccattatcaacgacgctaatgcaggagttattagttgttgatcttccatcagtttataatatatttatgggtcgccctacattgattggactaggggcagtaagttcaatcaaacacttatctctaaagttcccaacacaagcaggagtaggtgtagtacaaggcggctaattgttggctcgcaaatgttatagcatagaacttcaaaatagaagagccaatcattaattgatggtagtcataatagaagaaggcgagaaggaataggaggatctagatcccagagtccaagacgagaataaccagcttaaaccaattgaagagctgcaagaggttattttagatccaaataatcccacaaaatgtctctatattgggaagaatttggatgaaaaactaaaatagcagttaaatgattttttaaaggcaaaccaggataaatttgcttggagccattcagacatgatagggatagaccctaaagtgatctgtcatcatttaaatatcgaccccagttacctagcaaaaggacaaaaacaacgacccttagaccccgagagacaaagggcacttaaagaagaggttgataaattattgaccaatgactttatatgcgaggccttttatccctcgtggatttcaaacctagttcttgtcccaaaaccaaacagcacctggaaaacttgtatcaatttttcagacttgaataaggcatgtcaaaaatatcgtttcccactacctagtatcaaccagttagtggatgcaacagcaggacatgagctaatgacatttatgaatgcatattttggatataaccagatcaaaatgcatatccctgatcaggaacatacaagttttgtaacgaatatgggactttattgttataaagccatgccatttggtttaaagaatgctagagcgacgtatcaacgactaatgaatggtatgttcgggaatgagatcagatgaaatatggaagtctatgtcgatgatatgatggtgaagttgataaaaagtgaagatcacactaaggacctcgcagatgctttaagatactcagaaagtttaatatgaagcttaatttaaagaaatgctcttttggggctttcttgggaaaatttcttggtttcatagtaaatgcgagaagaattgaagctaacctagaaaaaattaaggccctagtcgagatgccctcaccaataaagcctaaagaagcttaagctttgacagaaagaatggcggcatcaaatagattcatctcgaaatcaacagataaatgccttccattctttaatgttttacgaggcaataagaaatttgaatggtatgcaacgaagcttttaaaggcataaagaagcatctatcaacacctctaaagaaactttatacctttattttactgtcttggaacatgcaatcagtgcagccttagtgcgagaagagggaaaacactagtaacttgtttactatgttagtaaaaggttattgggggacagaattaagatatccccctcttaaaaaactttcattatgcctgattcatgcatcttgcaaattacggctatatttctaggtacatctaatcaatgtcctgataggtcaactactaaaaccttttatcaaaacttgatgcttcagaaagattgataaaatgttcgatcaagttgggacaatttgatataacctaccaccagagagcatcaatcaaaggtcaagctttggtcaagtttctaattgaagggataatctcagaagaagacccagttgttaagcacgatgcataaacttggaaattatatgtagatggggcatcaaatgagaatggctaggggcagggttcataatgatgttgcctgaaaactcaaaattccactatgcattgagatttcaacttgatacttcaaacaacgaggtagaatatgaggccttgttggctggattgagaatagctgagacattgaaggttaaaaaccttctatgctttggtgcctcacaaataattataaatcaagtcttgggagaatcctaagcaaaatgcttgaaaatgacgaaatatttagagaaggttcaaaaaaacttggaaaagtttaattattttaaaattgaacaaatcccaagagaacaaaactctaatgtcgatgcactagcaaaattggcatcgcaatccaaactcgacaagttgaatttggtaccagttgaattcttaagcgacccaagtgtgaaaaggaagaagttgagatagtagatacttcaccaacatggatgacacctatagtcaagtacctgctccacagagaacaacttgcggacaaagc

SEQ ID NO: 27303 - DNA, 2733 bp, Cannabis sativa
aaataatatatatagtgtttttagataatgtattataatttttaagtgtgcagtgaagaatgttatacataactttattaaataaataatgttattttaagaaaaatcaaatatttaatataaaatttgaaaaaatatataatagtaattttttaaaaaaaaaaaacatttaatattcagtaggtttaactatttattatttttcattattttaaaataaaagattccaaatttaaaaatttaaataaattatatggacataattttaatttgtttttatgagtgaaataaaaatctttaacttacgatagtaaatttacagtaatgaagattatccacaaaccgtctgtattgatagattgaccaaatatatgtaattaattgaaattatatgctctttgatcacattaaaaattatcccattataaagtttatagatttcatcataagaggaatttgtttattttaagaattacttttttttttacctgaaaataaatattttttttcttaaaatggaaatattaagaatagaaaaaagagaaattctattcacttagggacaaattggtttgagattagaaaactgtgatctgaaatggttggagaaggaaagttaacgtctccgtctattttctaaaaagaaaaacattttaaaccaataaatgagagctcattaaaatccaaaattattgattagaaaaaaaaaataagaaaagagagtctgcaatctgttgttgtcataacttacataaaaaatcatgttgaaacatcacatgatcaaatataagattgcccctcttctactttctacaaaaacatacatattattcaatacacatttataatgaaagagggtgtctatactcttattatcgacacattagtaatgacattttatatcctggcacagtataatatttataaacatagtaatcatacatagtaaatatatattctttgaacaggctttgctggtgctacaccgttactgctggcgaacatagctattggaggagatgctggttggagatggctgaatcgccatcaacggtggcggaagatctggagaggagagagaatgtattgagatctgaagcccaaaatcgcacttcaccgagaaaaataaaaatagaagaagagaataattgactgaaatttctatcttacattatatagttttatttttcaaacagagagttcgggattatattgttaaaatcttaaatatctgctattattaatattatttattttagtgttaattatttaattagaagaattcaatccatcaatttaaacgaatagtttaaaataatataaatttttgttaaaaaaataatataaattaaataagaatattccgttaaagttaacggaagaaacaaaacaatatcgttaaactaattgtcgttagatagacacttttaatatataaagataattaatatataatttctttctattttttattcagagtaagagcaatctgtactcaaatgacgagataaatattttgcgtgatcagtggattaaatacgtctgaacactacagacatgtagtgcgacaagggctattatgatgatcagtttctatttttgtttatactttacactataaccaattactttcatataactaacaattcaatttcagtacgtagtttgtatgtattttaatttttgttcatttttaatttatatttatactttatcctaactaattagtagtgacaatataaaaattagtaaaaattaattaatgcgggaagaaaaagtagattttttttccttttttttttgcaacccaatgattggcaaaaatcgtcgctgaaaaatacgaaaattataatcaaactgaaaacttttaatataggtgacggtttaaaaccgtgcctataacattataggcgacagttttaaatcgtgacctatagtataggcaacagtttaaaattgtggcccatactatttccccgactgttttcaaccatcgtcgattctactcagtatttgcaacgttcgtataggcaacgattttatggactgttaggaattctttgatcgacaatgtaaaactgacacaaattcaggatttttttagtagtgtttacactttatttagatttttttactatgccaatgctaacaaataaagtgtattttttttttacatataataaagtgtaatttaatcctaactaataatccaatcaagtctaatctaaatttgcatagcaaatacgagcccatataagacctctaactaataattgagtcttaatttaatcgtaactaataatctaatctaatttgattttgcaaaagagatattttcataaatgcctaattaaagtgaagtagcaaataaactcgagataaaaaaaaaaaaggaagaagaatacatatggaaaagaaaagaaagatttttgttttttttcgtaataagtttataatttaaattaattttttaagaggatatagtttaacgaagtgtgttgaccaaataaatgatggggatatagtttccaaaattattcttgattctaagaggaggcgtatggagggtggggattgttgtgagaatgctgaagtggcatcagatgagtgtattatgatggataaggaagaggatattggtgttgggccaaaaaacttatcaaaggtgggtcttggttcccaagcccacccaacattatgagtctaattgcttggaattgccatgggcttggg

SEQ ID NO: 27304 - DNA, 4381 bp, Cannabis sativa
tcagggtattttaggtacaaaacacataaaaagaagtatgtttcaattaaatataaaattagaggtaaatttaattaattgattaataaaagtggtatttttcaacttaccctatgtaaatttccctaataataataaaagaccaggcctacactttctttctttttttttttttttgaaagaagcccattacactttctagacaatgttttttatttttgggattattttacaaatatacaaaaacaacaaaaaaaattacaaaactactgtttcacgaaattttatacatttttttgattttttgattttatttacagaaaataaaaggttttttatgttgtactcttgttaatttattgttgatttttttgttatctgtatgttattatttgttgttgttttgatgtgattttcatgttacttttagttaattttcttgttgttttcgtattgttcccataatttataaaatcagtaactgcagtttacttgataaaattgatgttacttcatttataacgagttatctccatagtgaaagcaaagcgaagtagggttttattaaactattttaagaaaaaaaaaattgaaggacacaaattgtatgcataagaacaaagagaattagactgacaagtatcattcttatatactatagggattgtgtctttaacttaataggtaagccaagtgacggtctcttaattagggagaaagagcaccaaattattatcattatcttctttctatatctaacttttatatttaattcaaaataatttttgtgttaaattgtaatttattttcattcccctcgataaatgcatattatgaaactggattattatgggtttgtagtacggtattcataaaatttttaatccattcaatccgaacaatttaatctaattcaatttgtaaaatacagatacttgtacttatgcagattgaattgggttaaaaaaatctaaaatttgcactttaaatcaaatgttgatttatatgtaaaaataacctttacaatctaatttgcacctatttatttatctaaaaataaatatataattaatattttgaagaaacaaaatagtaacgtaaaaaaaattatacatatatattttaaaatttaatatatgaagtaaagaaaattataatcttatataaattatattttctttcaacatacaacatacattttctcctgaatcttagaatttttttttttaattttattttagtggcttagaacaataataatttatattttaataaatattattaagtaactgatttaaaatattgcgggttagattgaatttgagctcttgtgtggttggattgaatccaaaatataaaaagataattacatgaaacatcaatttttgtaaaaaaaatatatatttttacgttcataatttttttttttttttttttacatttttacagcattctacaaaaatataagaaaacaacaagaaagctacataaaagtaataagaaaacaacaacaaaataacattaaaataatataaaaataacaaaaaattaacaacaaaataacaagaatacaatataaaaatatactaaaagactatattttatataaataaaatctaaaaaactaaatattaaaaactcggtacagaaggtatttttgtaatttttttttataatataaaatccccatgcaaatcacatccacattcacattcactacactacggtagtacggtggtgcttgcttgtcttgtcaccttttttttcctaagaacaacgccatatctcatactagaatggccagtgatgcaccgatgcagcacatatgacatgattactcaatttggacattttgctctcctactaacccaacaaattggcacaataaccaataatttcgtttataaaataataatggccagtctggactctgcaccaaacaatccagcaataatccacccctactaatgttaaatgctaaacattataaattaattaactaaaatcgaacacacaaactagtggggcttcaactattagactgctaatattttaaaggcttgaaccacaaagaatcaaaatcaaggttcaattcatacacggacagctcattgaactctgtctacactcttagaatctcatcatacttagtattactcttgacccaaccaaaccaaacttttaaaaggtctcatttctatttttctttcctaccataaactcaaaagtctgcaactaaacagaaaaattgaaattaaaaattcatttattgtcaaagaaaaacaataataataattacaaattaattatggcatttcgaacatgttccgtctattagaataaaactgtaatgggaaatcaacctaaaaataaaaggtgtaaacgaatatgaagaaaattgaattataattaaggagtcgaagttgagagttcatactcaaaacccttcactctccggttgtcgtttacatactcaaaaggtatatatacatacaacttattctattttttttttcttttctttctttcttccaaaacatcctcttaaatcactgtacatacattaacctcttccaccaccatccaccccactaaaattaacaactgaaatttaaaagcacaaactttaaaactgttctctctctgacatatcagacgacattgtaatttataaataatattgtaccaaacgacatccaaaaaggaacccatcatccccccatgaccaaattttttattttttattttaaatttgcagcaaatttgtaatctaattaatatatatatgatgaaccaacttatggctatgacgatgatgatgatgatgatgaagcctcatccaaagaacaattcgaagttgaagcttctgaatccataaacgaagagctagaaaatgacaacaaaggcctaagcttattctcccaaatctctttgtaaagattggaatcaccaccttttctcttggcttccacaaccactaaggtctcagtcaacctgtaaacctctagacccattaccaatttaccattatgcccttcaatctcgactccgaattcctttttcgtcttcatccttaacctctcgcctttggcgaactcgtcaactttctggatgatcttttccggccactcctgcgagatgagtcgttctccttcctggactgagttgttcgataaatcaaataacccagaaaggtccagtcccgatgagaacgatatgatgtcaaacgcgttcaagttggccaagctcagatcctttgggtcatgctcgccatccccagacatttttggggctggttcggattcttcgtcgtagaaattgatttgagctctgtacccaccttttctgaaccacggatccttcaaaatctcgtcaatggtgatcctggtctcgggattcgtctccaaaaggcgagataagaatcgcttgagatctggggacatccacctggggcaacgatattcacctttatagatcttcttatacaaggccatgagattcccatcattgaaaggaaggtagccggctgttaaaacgaacaaaacgacgccgcaggaccaaacgtcaatcttagccccgtcgtatcccctctggttgagaatctcgggtgccacgtaagctggtgtcccacaaagcgtgtggaggagaccatcggaccggatctggtcatcggcaatggcgctgagaccaaaatcagagaccttcaggttaccgttctcatcgaggaggagattctcaggcttgaggtcacggtggaagatcccacgcgagtggcagtaaccaacggctgagatcagctgacgaaagtacttgcggctgagatcttcagaaaaacgtcccttggcgaccttagcgaagagctcacctcccttaacaaactccatcacgaaatagatcttggtcttcgaagccaaaacctcgtgaagcttaacgatgttagggtggcgcaaccgcttcatgacggagatctcacgcttagcgttcgacctgaggttcggagtggccaatttcttcttgttaataatcttgatcgccacgctctgtccagaacggacatccctggcgtgatgaaccttcgcaaaggcaccacacccgagaagccgtccaacctcatatttcccaaacaaaacattttcaggcgcggcggccgagccagtagcggcgatgttaccatcaatctgttcgatctctggcatctggctcgatccagagaccgaacctgtcggctcgatcagaacgagattacggtttggggtttggttttggcgctttacagctgccgaaaccgaatactccggcgacgatgacggagtaattgcgatagaattattgcgtgcaaacacacgcgccgatgttagaacgagtgtctctgtttttcttt

SEQ ID NO: 27305 - DNA, 6286 bp, Cannabis sativa
ttcaaaattaactccttatcccgatcattgaaaatatcggaaatcacttccaaatcccaacttctttctcctagcaccatgagattgttaaccttccactgctccacaccattagtgatagtagtgacccacggatgtgaagcatcttctaattaaccaatgatcaaactgaacactaatacttgtaccaagaccaacaacctgtcgagcacctttcttgatcagctcttgtgtttcgaagatgcttttccaaataaagctaggttaaaaacgacccatgagagtaatatcgagatgaaaaattaattggtattattgttattttggttattttaaatttttagttacattacacttatattaataatatttttacgaaatattaaacttaaataaatagtgtgataatttttacatatttttttgtatatttttaagttaataataaaacttaaatttgtaattaaatatctaattaaaaaattaatttaattcaattagtaattaaattagattagatttaattttaattaaatacaattagattggaagatgatgacttttcaaatataataaataaaacaaagttggactaaatgcccaaccatacaaaaaatgcataaatttgataaatctttccacactgtcatatttggatcttaggtgcgtatatatgcgacttatataaaatcataataaattaggacgacactcaatttcatggcaccgcctaatgtaataaatgcatatacggtattactataataaacggtacatatatacattatcctatccttttactacaatacaagcttaaatttgagtcttagttaattagtcgactttaaactatatatataaatactctcctagctatatctatattcaatactacaaattaaaccatatagtaaccaaaaatatgaagttgacgattcttattaacttgatgacgtggcttgtaattgccatagcagcagcctcagcccaatcggagagcaatccagttctggacaccaccggaaagcctcttcggcgcggcgtcaagtactacatcaagccggccattaccgacaacggcggcagatttacgctggtcaacggaacccagtggtgccagctgtacgccgggcaggaaatcgattcgagggggaaaggatttccggtgacgtttgagccgttggcgaaaggagaggaggtgattagggaatctagggatctgaagatcacattctcttcaatcacaatctgtattaagtcgaccacgtggcagatggaagggatgagagattccgttagcgggaggagactgattgggacaggaagctcgggaaaggcaagcaattactttcggattgtgaaacagagtgggttcgatgatgggatctacaatatcggatggtgtccagcagagttctgtaatgtttgtaggttcgattgtggctttgttggggctgtggtcaagaatggtaagaggtttttagctttagatggttttgttcttcctcttgtttttgagagggctctatcatcatcatcatcaattctcacctgagtactcatcaacgtcaactaacatatagttcttttaattttatcagttcgtatatgattatgtaattaatattaatattgacttttttgggagcaattaataagtcaataattaataaaaataaaaataataatgtgcgtgaaaagggacacaggccgctatagcctatactggcttgtagggtcgcggttctcaaatgaagttggttttgcatactttaaggaacatgtaataaattgttagaaatttaccaattatatattctttcaagcacaaaattaaagttaataaaaatacaatctttctaagcacacatatttttggacaaaataatcgaaaattttcctcaaaccatgctacataatcagttccatattagctcatatttgactcataacacacacaaaaataaacaagcaaaacaaacaaacaaattaaaactaaaaaaattgagtttacccccaaacttaaatgatacagtgtccccaaaatcacactaatgaataacgaataggaaagaaaatttacttgagcgccacatcagtatagtagtagtggaggtggtggttggtacgggtgccatggcgggggagccgaaaaataattaggggacattgggattcatagtccacataaagttgaatttaatttactcacttgccgatgagcgaatgtattttgttgcttaaggtaggtattgtaaaaatcagcctgagcatgagcctgattcgattggattatgtattgattttgacgaatgatataatttaaccaatcataagtgccttgagtccttgaatccagtagaggctcgatttataatggaagaggaagaatttcactagaaccagcttcattgtcatcctctgcttcattaccatcaccattgggttggtttattgcctttgtggcattttcgtatctcttctgaaggagtgaaggatgcttctaaaaaataatcatcttcatgggtagcttaatgatatccccatctaaggctcaaatgccatgttggctacataaggctgtaatcacaacaccatgagtcgtgccagcagtggtgcgcatttgagagacaaactcaaaattcttatgagacagcctagcaatgtcacaactgaactaagacaacatagcaaacactaccatgcaccgatcataattccctcaagatatgttgccatgttggcaataatcgtgcattaacaaaatagactcatgctctagcctctatgttaagttgccaatgatgcaaaaacttcattgcaaaattgggtgccctcctagcctaaaacctcagccaaccaacgtgaataaccaacctttcatctaagtggttagcaaatgttggaaggttcaataggcgattaataattttaatgctccttggtactgaaactccccttacataaacttcgtttattttgttctggaaaggataattagcaaagaattcaaaaatgaaagtataattggcttctcccacaatttgagaagcacacactctttgccaatttcttcacacaatctcttatggaattacttcataaccacgatccttctcgaatggctcatcttgaaagtcaaatccccactctcttattaccccttgcttttgatttttttttgtatccttcggctgcctcgtcattgatgaattttggagggggttggttcgatggttagttcctttgggggtttggattgcgagaagatgagccttgttctgttttttgggcttgagtagtggttcgttcaagtctagaagccatgaataactagtcaattcacacaaaaaatacaaattcttcgaaaccatataaatgaaaaattgggcagcacttataaattggactttccgaaaattctcaattcaatctcaatcactaatgtcaatccaaattagtcactataaaaatcaccacaaaccaaaaatttcacaatagtccctaatttcttcttgttgatcaaactaatttagacccaaataatacaaaaaacttcaaagcacaatgattagaaccactaacttgcaacttgaaaccattaagaagcttgagttcatcctcatctaccaagaaatcgcaagaaatttgaagtgctaaagtaattttcgaattttaggttataactttatttaacaaattaatttttgaataaaaataaaggatttgaaaattttgaaaaacaaaaataaagaaaaagaacttgtaatttatattaaccaagtttcacatgctagaaaactatattagcaactgtggcaacccatttataattatattcgaaaattatatatttattcatttgagtcatcaaaagcgttacgtatagctctttctttctttgttttttttttacttttctttttatcaactcgttactatatatctcgatgatggccaggaagaattatacaaaaaatgttaagggtatcttataacgcagcatcattggcattaatacaagtatcatatattttaatttaataaataatataaaaaattattaattaatcaaaatacattacatcagttttgaaatacctcacctaataacagcaatttcaattagaagacaactacttcagtatggaaacaaaaaggaatagggttgcaagagcaagtcaacaaaactcttgaaccaaaagtaaaaaattattgggggacaaaacataattaattatattaatctttatacgaaatgttgagaaagaaatataaatatatatattttaatttttgtagggacataaatatcataaaaaatatttccttgatgacaatgacacataaaagcaacgcaatacctcataaattattgaagtaattataaaaaatacaatcatttaatttttaatttgtctttatttatagttaggtgatgagtagaagtatactcaaaattgtaccatgtatatatacatatatcggttattgcaggctaatcagcctcttcaaatataatgtagaactagctttaggccaaagcttaaattaagggggatatcatataatggactttggaaactctctgattgtgccaagtgtgcaagaattggcaaaggatcccaatatggtgaccatcccaccaagatacatccgccttgatcatcatcatcatcaaagtcaaaatcaaaccaatattctcaattctacttcttttgatgaaatcccagttatcaatttccaaaatttattgcttatttctgggtcagaattatatgattctgaacttgctaagctccacttagcttgcaagaactggggcttcttccaggtatatatagtaattatatattctctcctatatattttacaataatatttatattgaaattgaatatagttattttcatgtaataattaatttgcagttagtaaaccatggaataagtagttctttggtagagaaaatgaagaaagaggtggaagagttgttcaagatgccaatagaggagaagaaaaagttatggcagattccaggagaagtagaagggtttggacaagcttttgtagtttctgaggaacaaaagcttgactggaatgatattttctttctcactacattaccacttgctttaaggaaacctcacttgtttccaaacctccctcttactttcaggtttttttattaaaaaaaacataaaaaattcttctcttcttcatcctccttcttttttttttttttgtttaattccttaacaatagtcaatgaatattgcagggacagcttggaactttattcattagaattggcaaaactagccaaagatataatctccaaaatggaaaaggctctaggaatagaaagcaaggaaatttccaagttgtttgaagatggaatgcaatcgatgagaatgaactattaccctccatgccctgaaccagagcaagttataggtctcactcctcactctgatgccgtaggccttaccattctccttcaagttagtcaagtagaaggactccaagtcaaaaaagatggcatgtgggtccctgtcaagcctcttccaaatgcttttattgtcaatataggagacatactagaggtaataacgcataacccactaattattattcttcatataagtaatattgtttcattaatttatctattgcatatgatggttgtagattataacaaatggaatgtatcgtagcattgagcatagagcaatagtaaactctgtgcaggaaaggctctctattgccacattcctcaatacaagtgtagaatctgaaataggccctgcccacagcttgatcaatcaacaaaatcctgctctatacagaacagtgggaattaaagactatatcaagggtctattctctcgtgagcttgatggtaaatcttacattgaagttatgaaattgtaaactttactgtaatgtaaacggaggactggactgaggtttactaagatattactttaataaaataataaatctttgcttcacagggaaattctatgccaagctacaaaaagatacattactagttactgttaagtaatgtctatttgttcttagcttcttggttggaagacgatacaattttacttttaaatactgtaaacctttataaaaaaaaaaaaaagttgtccacttcataattcacattttaagatttaagccaatatgttgaaaatacaaaggaatatttccaaaaatatttagttgagagttttcaaacaaaccacaagaaagaatagtacagtaagttatccta

SEQ ID NO: 27306 - DNA, 1708 bp, Cannabis sativa
tttttttttttttttttaagtggaatgctacttttatttcaagaggaaaaaatgtttaattatggggtacataaaatgaaataaaaggaaattactctatatattatttttaattttttttttaaatttataattttggtcgctttagtaatttttatgtgagttgctatgtggattatggttacaatttaagttgttttgttaatttttatgtgagtttttatatgaatttttgttgtaataatgcaaaaaaaaaaaaattattattttaaaatgtaaaaataaaaaaactaactaaaatgaatttataatagatcattacttttgcatttaatgggcgttttttttttttttttgtagctagagaaattttatcgcaatttttttatatacataattttgtatatattatgcatagtatgtttaaatcagtaaattttaagcatataaaataaataaatttaatacacgcacacaactgattatttagtattattttcaatactgtacattattcaaataaaaaaaaaaatcaaagtgtctactataattataatgttagtggttatatataaaaaaatgttagtgaaacaagttccaatttggatgcatcttgaagaccttgaactcaaatacgggggccagaaatctcttttcaagattgttggtcaagttgggaaaccgattatggttgatagggtgataagagagagggagaggctgaattttccaagggttctcattgaggttcagatgaatcaagagcttccaaacttattagaatttgaagatgagtatgggtcggcttgtcatgtgggaattcagtacgaatggaagcctatcacatgttcaaactgttctgggttaggacataagactgaggactgcaggaatggtaacaaggcaaaacaggaatgggttataaaagaagatcataggaaacctaatccattgttgataatgaaggttttcatgcagtgagtaaagggaaaagagtcaaagagcagggacaagtctcgatcacaaaggtgcacaatgggttccaagcactagctgataatgaagagttgggaaatggtgattgtgagattgatgcagcaggacccgtggctgatgcagcaggtacagcaatggacaataccagagggggggagttccctcttttggtaatggatagaatcatagtttggaatgttcggggagccaataaccagcagaaacaacagttaattaagcaatttattaacaatcaaagagctggttttgttggtcttctcgaaactagggtcaaggttcacaagcttggagccttgtacctaaatgtgtttaatggttggtgcttttcatcgaatatagcttggcatcaagggggtaaaattgtgatagcgtgggatcctaataaatatgtggttgatatcctcaaatgcactagtcaattgatgcatgtgaaaatcttggtagtggatggtagttttgagacctatttgacagtggtgtatggggccaacgatattgagggaaggaaacttttatgggctgacctgtgtggtttgagaactaaggaaaattggcttgtcatgggggatttcaatgctacattagccaaagaagaaagagtgggacacagagtttgttatcattctgatacagattttatacaatgtgttcagcagtgtcaacttgaagatgtcaaagcaacgggctgcta

SEQ ID NO: 27307 - DNA, 1925 bp, Cannabis sativa
  modified_base (1864)..(1868): a, c, t, g, unknown or other
cacgccactgccgggacggaacacctggcgaacgacccgtggagcggaacgggtggaacgggtaccggcactactgggacgacaacgacgacgggacacctcggaacggagccgtggccccacaccgctaccggtgggaccggacaccatatggaacaccacaaaggaggaatgggactgcatgatggcggtactggaatggaacaacacgcgccccttggtagagtgggaatgcaatgttcagaacaccacgcaccttttaaaagtagtgatgcgtgggtccacggagccaatcccgcgggagctactgacacccgcggggctggctttcagccctcgaaagttgattcggagcggccaaagggtgaaagtaccaccggactacgccgctccggcagctcaagttctagctcggtaagattgctattaattcatcctttttaaccttttactattttatacaacatatacatatataataattttttttaatacaacataatattaatattaatgtacaattaattaagattttcatttcgtgttataatttgtgtttggtgtaacggctacaaaaaaattgtcacagaacttttgttcataacaaaattgctatcaacatataatataaaaaattataatttgaatcactaaattttttatttacattttttaatattttagtattaaaatataaaataataatataatataattatatatattaaaaatgaatgattaatatatataataaatataaaatgggtggatgcagtcagaggatgatggagctggagggagaaggaagaagaaaggtttaggaacaaaaataaaagagaaacttactggaaaacacaaggacgaaccaactgctactactcatgatcctactcctcttcacgagaagaaaactgttatggaaaagatcaaggaaaagctacctggccaccattctcatccccagcaaaattaattaattaatagtttattactatctatatatatatgatcattaagttaaatgtatttgctttttattttataataattattagtcttaagcttatatagtactatgatgtgaaaaatgtcatcattgttttatgttttgtttattttgtcggttcggattttttgtttttttttgggtgttattttgtagtatgaactaataattaatatatatgttataataaaaatgtattagtttgtttttgaaattagttattgattttttatacgagcattattaagatttaacaaaaactacatatacaattaagagcgtttcttatttgtatcagcatagatatatatgttatattttgaactgataatgagatacaagtgatgatggaattttttatttttgttgtgattaataattccttgctctctttacaaagtgggttagcatagatttatataagcttagtctttggccaactgaaataacaagaaaataaaaatgaggagtgataactaaccaattgtgcaagtaaaagattaagtgactagatcacctcacaataatttcacaccattctcttcaatatatttaacaagtctagacagtgtataaacttgacttgggtgacacatttagtgagcatatatcttctagaatgtgatttgtgctgactaatttcttcacttgaacatctttcttgacaattatatattttttgtcaacatcgacatagggttcttcatcaagtatataacactttgattgtggtaatttactacaaagtcttctgagttaaaaatcctagctctcttgtaagtccttcgagcaatattgcttccactatttcatacatctaccttgagttgttgtcacagtcagtagtcccgtgatccnnnnngggaaataccgggtaagctgtacaatctcacaccgcctggggaaggtcaagtgggat

SEQ ID NO: 27308 - DNA, 2096 bp, Cannabis sativa
agatttgggttgatttgaatgggttgtattattcgttagtttttattccgtgaaagcctaaaatatcacattgatttgtccacgtttccatttttgtctagctaggcttactttgtaaggaaatctgggggacgtggcgactaggaaaactagatcgagtcaaggatggcaacgtacgccaactcatttataattatagtttattgaaagatgtgacatttttatatgattaattgatttgacttgaatttactgttgatagggttttccattgattatttcacttgattttggataagcttttgaccaaaatatatatcggcagtgcattttataacaatttcaatggtttatcatcttttgagataaaactcatgaagcctaatattagtgtgggaccgtacgagaggtacctaatcggtcaaaacatgtaaattaattatatatcttattttaatgtatgctattgcaattgcattagtaatagaagaagtagtccattcatcattccaatactgaaaattggcacacattggtcgagaagtcaaaatagaggtcacaacggatcacaaacagctttttagaccggtggcaatttaagctcacaacgaatcaccagtggctctgataccatgttagaatgtgacaatgggtggagtagcccattcatcttatatatcacaatttatttctatacattaacaatgtgagactaactcttaatatatgcctaactagatttttctcaccaatatgtagtgataaaataatacaaaaatattaatatatataatataatatttaatataatataataattaaaattactattataatattcaattttgttttcttttaaaaacaataacaatgtaatactaattacattatgcaatcgaattttattacattaaaaaaaactatatatgtaatgataattatattaaaaatattaaataaaataaaagtaaaatgacttaaatagtattttttttagataaaattaaatattaaaatatagagataattttatgaatttatatatgacttatttaaattttattccaacatcatgacaaatatcataattaattctcattactatttttattttattacattattattgatatcaccaaattatatatcacttaagctcgtataattttttatattattatttactaataaaaaaataaaaaaaaacaaataacaaataacaaaaaaacaataaaaaaaacaagagaaaaaatataggcagaaaaatattcaaatgatcaaatatatgttaaaaatagagtacataaaaggtttttttttttttttttgaaaaaaaaaaagagatttatatttatagggatattagcggttaaactacctgaactttacgttttgtaatacttaaccacaaaaattaaaattttggtggcaaaacctactgaactcgcattctgttttgctctgtatccctccgtccaaaaatcacagttaagtgccacggtggactgtccacgtatacacacttgtacacgtggaaaatttttattggttcacataatttaattattttaaatattagaaaattaattaaattttaaaaataatttattttgaaatagaaaaataatttaaaaaataaaaaaaactctattttttttttctttttcttttttcttttttcttcttcttcttcttcttcttcttcttcttctaccaataccaccagttatccacgtgtgcttcccataaaatcaaaaacttaaattaaaagaaccctaaatcaccccacccctctgcccctttcaatagtaagaatcctaacttcaaaacacaccaaacgaagagacacgaactagtgcttcgaatcataaaatcaaaagaggaagaagaagcttcgaatctgacaaacaagaaagatgggtagacgaagtagatgaactgacttcgaaatacaactgacgaaggggggagttttttttgtgacaatgcatcttcggcaacttcttggagacgaagtagacgaaccgtctagttcttgcgactaagaaagggagaaagcattgactgtgtttgttatagtttgctccgtctagttc

SEQ ID NO: 27309 - DNA, 3223 bp, Cannabis sativa
aactctcaatgcaatgagtcacccacccttttatttattctagcacaccatactaatcctggggtctaatagtgttaatattaactgttcatcctgtattcacagtattagcatatcaataaattgatattttgtggtatgatttgatgattcaggtgaccgcaaagaccaaaacactttggaaaagcttcgggcagaaaggcaggcgaaaattgatgagcttaaagaaagaactaattattacaccactcaacaactaattcaggtgaaatgattgtttgatttgtactgcccgagttgttgttttgttcgatgttccatcgtggtgaaacatgaagcagtagtcattagtttatttatttgtatatttcggtcggattaatttagttgagtttcagataaggttacttttggccaaccccgggacaaattgtttctgaattttttgaatttccaagtcaacatcttgaaaatgtgttaaaatttagttcatttgctttattttcagaaagatcgatacatttttcacttatttaaaataagtgtcgtttaaatgtgacatataatattttactatcattgtgtctatgaaatgctttctgttcctaaactgggttcactgttgtggagcctgcaaataatggttaaacttactatccacttggggctagctgaagtggttggtctatatgcatttcttatacaaacatatttgtcatttgatgatgtattatatactggaagctctattatttgtatgtgataatgaaggtaatctccttaatgcagagatatgaccctgacccagcagcaaaagcagctgcggcaactgttttagcatcaaagttgggtgcagattcaggtctgaaaatgtttttgggagatgaacatgaacctaatgttcaagctacaatgggaaagagcaaagatgtagaccttgttcagtctggtggacttcggaataggaaacattccaacactcactcaatctccggagaaggtacacatcaatctccagggagtgaggatcccgcccagacttctgagcagagcccgttggttgttagtcattacaatcctactcaaggatcctctgctcacgacggaggatggattgctcgaattgcagcattacttgtcggtgaagatccaacacaatcgtatgcactcatttgtggaaactgccatatgcacaacggtgagacttttcgtttaacctactactagtttggttttttaactaaccagttaagtggactggcctcgggttttttctttgcacaggacttgctaggaaggaagatttcccattcattacatattattgcccacattgtcgggccttaaacaggccacaccaatccgaagagcatgtttcttctggttctagtacccctaattcgggagccatcgatgtgttgaagactgctaatgtacttgcaactgagagtgtagtcgcaggtgacggttccattagtagagccatccccgagaacaaagtcgaggaaatgaccgaaacaacagaggatttggccagttgagaaagcaagcaagcaaacttaaacttaagtttgaggctcaaagttgaagtgttgtgaaaattatttgactagaaaattatttgtataaacacacaaaagaaattatttagatttcaaatagtttaagactggttttaatttcaggtgaggcggccgcccatgtttatacgtggtggtgctactatttttgttctccttgtggtggtgattctggtgaagttgaaaactctttcctcagatccaaatatttcttaatttttttgtcttttacttttcatattcattacatttcaatatatacttaattttattttatttaatttttgacatttcaacacgctttttttttttttatcaaagaacattcatatttaaacatgttattttttttaacaaatatttcaagcatgcttattgataaggaagactttcaaattcaatatttattttgttctcacaatattaactattaagtttcttttctttctaatttttcaaacatgtttcttttgttaatgacctcgcctttgaagctagacttagtcaagttgtaagtgttatcatcccacttcttggaacttgaagttctttttcaaataataataataataataagcgctttttttatttttacattttaaaacatttttttttttgtgtatttttacgaatttttatgtagaaatttctaatgcaacattgcaacaaaaaatcgtataaaaactcttattgcaactagcgttgcaaccactttaaaaattaaaaccgtaaatttgaaaaaaaaaaaaagttaaaaaaatagtatatgcggtaattccccaaatattaaatatataaataaagatttatttcaaaatttaaataaagtaatatttttttatgaaagattgttaccgtcaaccttttattatagctttttaattaactctgtgcttaaaaatatatatcagaatattgtttttcaaaaaaaaaaattatagcagtatttattatgtttacaacataattctaataaatttttgaaaattttcaaataatttaaaataccgaaaatatgtttaaaagtgggtaaatattattttagaactcgtgctttgcaaaagttacagattggataatttgttttgttaaataacaaaatgaaccctgtattttctaaattggtacaaataggaccttagaattaattttttgtaaaaataaaacttaataataatctgacttggagcctggaggtattatgacaaaactaataaaatttcctatatctgttcgtgttaggaattgtcttcaagttattatattaacaacaaaaagttgtcaaaaattaaactcagagtcctatttatacacttttagaaaatataaggtctattttaccatttaacaaaacagattgtccaatctgtaacttttgcaaaacacatggtccaaaatgaaatataccctttaaaattttgtaaacacgcggcaaactgaaataacaagaactttgtttctgttactgtaaattatttggaatttaaaatttatgaaaatttatatcactataaaaaaaatattagcaaaaattgttcacactccattatttatattaagagttatttgcggcataacttccttaagtggccaggtttttgcaactaaccccaattcttaaattttggtggtaaaacctccta

SEQ ID NO: 27310 - DNA, 1821 bp, Cannabis sativa
gagacatgacatgaaatatgaaatgtgaaggtattaaagtatagggtgttttaagtgctccctaaaccttttttatgttttcatcatctatctacatagttttaatttaattttattttaattatatgacaatgtatattgtagttgtttagtatgtactttacaaagttaagataaatttgaaataatttacaatacaaaagaaactgtataaaataaaagaactatttaaactttgctttagtgcattaacctattttaaatattttaaaaattttgcatgatgttttgagtaactatacactattatataaaataattgagataaaaactatctggatgttgaaaacaccaaagggtgtactgtagaattttgctaaaatatatgatatgagagactagtggtgtggtgtagtgttcttacttagccttcaaccgaaagttggctatggtgttcagaagagtctactttttcaatacaaagtacaaacattaatagtaagtactaagtaccactcctatacttgtacacaattggtttgtttagtatatcttaagctactactactagtattgtatttacaaccaatcataaatcattatcataattgccactcctccatcatcaccccccctaacgaacttttctttttttctctttacgtcttcacatttatatacatttatatttatatatatatatatagaaagagagagaagaaagaaaccacttttactcattgcactttcatcaaattgtcactcccacactaagaaacaatcattttctctttctttccccatacaacggtaaagatcctttctttttggtctctcttgtcttgttatagaggactacttcattttcataacttctcatacttcaatggacaagaaaagtttctgggtgtttttcattttgttttctggcttttgggtacttgctttatctgatattaaagatggtatgcaaattttttgttctcttttggtcattttaagtactttttgagattgaaactaatgcttgatatataataatgtataatggggtcttatttttgcaggtttcttgagcttatcttgtggtggaacttcaaattatactgattcatctggtgtgttatggatcccagatagtgattatattagcttaggcaacataactaccattaaatacaatcaaaacaacttcacaacaactgtttcagctcggtattttccagttttcaaaagtagaaagtgttataggataccattaaagaatacatcttctttggttcttattagagctaagtttgtgtacaaaaactatgatggtcttggtaagcctccatcattctctgtttcacttggtacagccattgttggcactatagaccttgccaaaaatgatcctcagatagaagagtttgtatggccagttagtaaagagacattgtcgttttgtttgcttggtgttcgacgaaaaggcgcgcctgttatttcttcacttgaggttagaccacttcctcagggagcttacacaagtggtgttgaagattttcaacataagtctcttaggaagaatcatagaattaattgtggttacacaaatggttctcttaggtatgaacctttcactttcaacctttagattcttcaatatttttaggctaaatgacattttgaattctgtgcttataaaagttattgatcagacctttgttttgttaaatgacaaccagtttagtttattttgtaccattttgaaaaatacagagtccaaattgtcatttatcaaaacagatagtccagtttataatttttacaaaacacaga

SEQ ID NO: 27311 - DNA, 2594 bp, Cannabis sativa
aaaaataaatattgaatgcaatatattagtgtttaagaaatctggataatctaactgtaaattgttattaaatgaatccaaacataaatcaaaaattaatatttaaataataaaccaaacacaacttaaacttgtggaaaattaaaaaaaaaaaattaaaaaacaatctctaaattgttgataattgaatttaacatacatatatttaaaaattgtagaaaaaaataaggattctcttaatggttgggttttaatttttttttagcttggacagagataatagtatttttttttttttttttgataggaaaacttgttttattgaaaaagaaaagaaaactacatagttgtcacaaggggaacaacctcccttaaaacagtcctcttacaacagcgaaaaactctagcaaaacgggccaaaccatccgccaaagagttttcacaacgaggaacaaacccaaccaaacacaaactaaactttgaaattaaagataaacattcataaaaaacaggaaaagacccccacataaacggcaattctttgttgcgcaaagctttaactgctatagcagaatctgactcgattaagattgtctcgtatccttcctcgagcgcaaatcgtaaggcctgaagaatcacattcaattcggcttctaacactgtcattccctcggagtaactcagcaacacagttgcagcatcctccccaatcccacattgcagaacccccgtgcctgcttccccatctttaaccgaagcatcaacttgaaagtggccatcccacttaaagtgatttaaatgacccctatcttcagagcatgaattttcagaaaccacagtctgatctttgactcgcactttcataaattcctgagctctctttaaagtcctgcaagagatttccaagacatttggcttgtgacccttgattctcaaatcatttctactgcgccagattacctcaaaaagagaggcagcataaatcatcaacatctcatcttgcctattaaagagccaaagcaagaactcctccatagtcgaaacttgcatagtatccacccttaacccccaggggctgctgaaccagatgcttctagtaagattacaatctctgaacagatgaataacagtctcagtctcttgtccacagaaccagcaagctccgtccacttccgtccttaagccccgccattgtacaggaagacaaccagaaaggcatctccataacagcagggcttgcctcgggtgaatgttcactttccaaagatctttccatatctgtttctcaggttgtagccgctccttttgagtccactagtaagcacttttaatggagaaccgaccatttttacttcctctccaaaaaagaatgtcatccctatcctgtaaaggcttaatccgaagaatggcatttgccaccggttgagtaaaacattgatttatgacattttcatcccaaacgtaagaatttggcttgaacaagtctgccactactgagaaagagtgagtaaaggcataagtgaaactatccctaacaacttcgggactaaaactaggaacccaaggagtcaaccacatgtcagaattaccccttcccactatcaaaccagcacccgaaactaccacatcacgaccattaagcatccccttccaaaccatagagtctccccgattcgcttccacattctagaaactcaaatttttgcagtatttatcccttagaatacttacccaaggccgatctgaattattcaacatgtgccaagcaagtttagacaaaagagctaagtttatgtccttgaagcaacgtaatccgagtccaccattacgctttggctgacaaatctcgctccaactctttggagcaaaataacgatttgagtccacaggtgagccacctcctttccaccaaaaccttgcaatgatgctatccaattctgaacacacactcagaggaactcttgaagtagccattgtatacgtttgaataccatgaagaaccgaactaatgagagtgagcctgcctgcttgagacagtaattttgttttccagccttctaaccgccccaagatttttgctttgagaaaggaaaaatcctctctcttacgggcagaagtaaaaaatgggttacccaagtatttctcatttctagataaaccgcccatgcccaaagtcgagaagatcttatttttcatatcctgagtagtcttcggggaaagaacaattccactttttgccttgtttaccatttgaccagaccacctttcatatttctcaacacaagtcttgaaagcaattgcttcttccacctttgccttgcaaaaaaagatagcatcatcaacgtagaaaatgtgcgaaataggccttgcctgcttcccaatcccgagtcccgtcaaatctcctctgttttcagcttgcaaaatcagtttcgaaagcacttcgctacatagaatgaaaagatatggggacagggggtctccctgtcttaaaccacggccaggtttgaaaggttttaacggggcaccattcaacaatactgaaaactggatcgtagttatgcattgcataattaaattgcaaaagtgattgcaaa

SEQ ID NO: 27312 - DNA, 2605 bp, Cannabis sativa
aaatccaatcaaaagttattcattcgtttgaaacacttttcaacaattttttaatatgtacttgttgatgatgccattctttttgggcaaatttgcattataattaaaagataatcagtcattttctttttgttacatgtaaggaaaataaaattttaaacagtatgacaaaaatgaagttgatattgatgctagaatgtacaaagtaattaaaacacacttcatatatgaaacaaacaatatgtatagatgtaactaaaataaatgtattttaaatttataaattagatattggattggttttggttatttctagggcaaaagtgatacaattcaatttaggttatctttcgtaatcaaaattactaccactctaatccaaatgagactgattatacaagaagaaaaataaatattagattagttggtttgatatattgaaattaattgttgaccaccatgaataaaactgctacccctggtttaaagttaaaacaaataaaaactaaagctacagtcatataccaacgagtagacccacaatgcttcaaacaaatataatttacttcacaccttcttgagaaagatgttcgcttctcatcagatatgctgtaatgatagttgcgctgcaacaaatgcattcaaagaaagagttgataattcagtaagcttttaaacttgtttaaccatattgttgttaacagctccttacttttttccactctatatcccaaagttaatctaaaactgtttacaggctcaagtttgaaacgggagtgtcctatataactaagttcttcacaaaagcatgaaacttgtgattaatccattaactaatccagagaaaattgaaccctaggccatgtgggagcaaattataggcctatcctatgtccaagcttacccagcatcagagtgttaatagtttccttctctcacttatttttttaattggtatgggatacaaacatacaagataaaaagttctaagtctactatatatcatcaagactagacaaaatcaatagagattgttgggaagaacttcaaaatttaaagggaaattaagcatacataaaaggaagagtctagtgccagggaaagaagtaccttcttgacacgccggcaaaacagtgcaccaaaacggatcccttttttctactttcgtcaatgaaattcaagcacacgtccaagtggtccaacagattctcactctccatatctctcataggcactgccatcctcactaccttcaagtccttgccagcatattccaacgagtacaaaaccttccctggcgacatggcgctacttgacaattcagtcgattcatcctctgaagctgaatcatcctcagtttctgaggcaccaacataatgtgtttttatctcctttgtgggaattgttagaccacttcgccattctgagaaaatggatatggatgcagtactaagcattgataaaatatgagtaatatcgctgctaccattttggagaacttctgctgcgtccccaatattgccaatgaataggttttcacggacaaggtacggcatgatgataaccaataaacccgggaaaaccctagtccccaaaatccattgcaaagcaacatctcagtttccatttcatcataacaatatgcaaaaaaaaaaaataaagaaataataaaaaagaaagctagttatccatgatccatccagtaaaagcttgcaataatgggaaaaaataccagaaaacttcaactttatcaaccctagacctagcataaccaccacttgttgactcaatgggaaagagttcatattgtcagacaaaataaatatttaaacaaaataaaaaatgacgactctaaacactctttcccaaattttctttccaatcaaacaaaactagaattcacctccataaagaaatcaaacttcttcaaacaacaagtaaattattaggaaatatgaaatgattgatattcatgcgtttcatcaatcgaaatatctatatgaaaaataatacaaatatgtagaatacaataaacgttaaaaaaaaaaaaaaaaacatgctgcagattctcgattggaaagagaaatcaaaccttaatattcgaaatagtccgactatggaagttgtggtttttccttttttctttttttacgagaagaaaaactttatcagcttctctgtacaatcacaaagttagggagttttgcctataaatatatttagtgattcgcacgtgagagtaagaaagaaaagctcgacgtagggaagacttggcacgcgcgggtggggggcaattgcgtgtaccggtgcgcctagtaccactgaattgggacttttctcttttccttttggaacatacacttcgaaagtattttcgtgtgggaagtgctagggctctatattggttggtttgaacggtttatcttatatattttttaacctaatttaaaatttgggctgttaaaatttaagtgcaacctgctcaatttaaaaaaaaaaaaaaaaattgtaaaccgctaaaggccaattttttattttttaatttcaaagtcaataaaaattaaaaatatcgaatttcactaaaacacaacacaatatatatgac

SEQ ID NO: 27313 - DNA, 3101 bp, Cannabis sativa
atattttattaaactaataaaaactgttaaataactacattttatatttaaagatatgtctaagcaattaaattaacttacaattataatcagtccatcctattctttgattagccaaatcatagaccacaagtttgtcttttagaacaagatctgccaaaataataataataataattaatggaacaaattaaaattaatatataaaaataaaacaatttcaaagtatgagcaaatctcacctcctagtattgttgtatccttattctccataaatcccatgcaccataatttatcaccatcctgcaaatatatatatacataataagatgttcatttttgtaaagttggtgtatttttttttaaggaaattataaattctatgagaatttatgttatctctccgaaaatatgatttttttttttatgaaaaaaaggtttaataaaaagttaaaaaatatgggaaaatcagataaggataaccatgtacctttaggtatctagttaccttatactatttttatcacattttttaatttttttttttttttttataaaattaactttttttttttttataataagtcattttttaaaaaatttataccttaaaactcataaaaataaaaattcattttttttaattgttataagtaaggaactaaggatagagcaaatgacatggttattaggtgggtcttggctccaaacctgtctcaagccaattgaggatcatggtccaaaaatctaattagacatttttatataaatttttttatggtttttgtacgtatagtgataaaaatctaaactatagtattttaaaaaatataaataaattctttttctaaatataaaatatcaaagatagtataatgacaattaaattaggtattttttttttttaaaaaatagttatatttttaacaaataataataaaaatactaaacataatattaaaaaaaacaaatttaaaatttttttgttaaacaattttttgggtctggtgggaatcctaaggcctcttccaaaattttaatttataacaaaattatagtatatttttcataatttgttcgattaaaaactgacaattaattcaaacaaattttgtaaacaaaattattttgattaatctaaacaattaagctatattttatatagagaaagaactactcacagttgaattttgttgtaagagatagtctttaggtttaagaactagagatgcaccaccagaaaagttgaaaatcacttctggaaatgtactatttatcatgctgtaaataatttcttaaatttaacattcaatattatattataaaaaaattctacaatacaccccttaaaaataatacacagatacacttctatctattttgatatctgtaataattttttaataaaactttttcctataatcatgtacattataattatttagtacattctgcaaaattttgagaaattcgaaaaaaattaacacagcgaaaataagatttaaacaatgtgttgcatgagtgactattttattttatacgcgtgttaaataaactatttgaacattgctttctatattataaattattctaaatttatcaaaattttataaaatattttaaaaatttataacgtacatgaatatataaaaaaaattagattaaaaatttctttttaatgcctaactaaataaatatatctttttaagaagatgcattattaaaacaccctatattataaatctcttaaaataaaattacgtatattaattaaaattaacctggaatcaacagaataacaatgatattcatatgtatgagctaaacttgcattatttaaagcaacttcatcaacctgcatatgtaaatataaatatatattacaatattttttatattaattttttaacttaatttatttaaaaaaatatattagaaaaagaaaagaaataattacttacagccatgataaaagacttgtaaagatgttttggaagataagcaagagttgttccagaatcaactactgtgtcattagtggttgataataatgaatactcttttgaatcaatgcccattaattcttttccattaacagatatattcacaaggtttatgttataatgaagcctgaaaattaattaattataattaatactatattagacatataattattattattggataaatattattttataaattttgtgtttaacaaaaattaccaattgaacattttgttttattaaataacaatttgaattctattttttaaattatttgttgttttataaacaaccttttttgtgtttaacaaaagggataattattttttaagtctagggttagaatataacaatagtaggtttgttacattttttccactaaaaattgtttacttattagttatatataaaaaagttgactaaaatttggattagggtattattatgcaacattttgaaaaaagtacgggatttaaattattatttattaaaatagagaatttaatcggtaacttttataaaattcataatccaaaataatatttaccaattattatttgataattaattataccttaattaaggaatttttttaaaaaaaatgacttactttgatggaacaattggagtataaaccatatttggatgttgaacatcaccaaaaagtaatgtaccaccaccattatcatctcctttcaaacaatgtgaaaaaatctttggtgaaattccttgtgaggatagttgagaaatcactgacaatttattttgacctaacccaaaaatcccatctactgcactttctgttctgctcaattctccacttgcaatcttgctacacctgaatatcatatgtatctatatgtttatattaaatgttactatataacatataagtatggatgttaaaatgtgtaacaaaatatacaatttatcttcaaaatttgatggtaggatttgactaaaaggctctatacattgagagagtaattttctttgccctagttagaaatttggtttaaaagtgttttatcattacaagagtttttttgacttcattaacataaaatttggcagttttagtagttaaaagta

SEQ ID NO: 27314 - DNA, 2604 bp, Cannabis sativa
acccgtaaattttaaaaaaatttcaaataatttataatacaaaaaataaaatttacatattttgttgtacacacaactggaatatttttttatacatatggtaagtaactatttaaatcttaaatagctacaacatatataatcataaataaaataaatatcaaaacaaatagaaagtatcttaaaataactttccaaattcactacataaatttctaatattatataattatataaatttaacaatataagatcatccacatgtatacaagacaatacaacatgtaaattttattattaattcatacactcaatattcctatatatatgatataatatagattaacaaacactctagttcattatgaacaacaatattctttttcacctagccagagaggaacaaactttatgtattacacaactatttatataactataagggattcaatatatttatgaattatgatctatatatttattttttaccaccatcatcaccaccatggttattgaaatcttgcctaggaatgtagtgatggttattgacactacttcctgggtacccaacttcaactttgtcatcaatacttttaacgacttctcccaattttcgaaaatcttccttcatcatctccgtccccagaccccaagttttcacattcatacccgagctcgacccaatcagcaccactagtactaacacaacaatcgtcgtccctttcatttttacagtctaactatagctgctttgcaaaccttaaaaatatataaataaattagaacttgaaattaaaaaaaaaaaaaaagtgaaattaattaaaagaaaagatggttactagtgataatgtttagtaaaacttacttgttatatgagacttattagttggtttataggaggaagaaatgttattgagtcatttatatagatgattattaagcaagttaatttagatacaataattagtgttatgtgggttgggtctcactttccaccaaatatgaaagtgctttctccatttcataatttttttattaattaattattaataatgcagcttataatctaaaaaatattaaataataagttattaatttttgtctcatttataacagtttcatttggacaaaagtcaataagcacaatgcaatgtctgtcccctcttgcatttgcattattatctttagtgtcaactcacacaaaaattaaaaaattacttttaattttaataaaatttgtaaatatatataattacatcaatattttggtgtgtaatcactaaaaggtatcaaaagattaaaagtatttattatttttaattaattttttttttttttttgactaaaataacaatttgtatctaaatatttttttagtcacgaataatttttttttttactaaaattatgattaaaaggtaatttttttaaagtaatagttgcaaactctacaaatttataagtcggctaaccttgaaaaatagttatctacttgtgataggctttgctagtttggttatgctatttcactggattgtactttaatgtgtaggaaataggaatagtttggaatagggtcggtcctaagttaaaatatgcctaagaaaataaaagttaagcccttatgataagaataaatgatagtttaaaaaattattaaaaaatatgtatattttttcaaaaaaaaaaatatatatttggacctctaaaatgagtgagccctaggcacagacctagttaggcttagcctagggccgaccctggtttgaaggatcatcctcatctatttttttagctgttatagcaccagtaagtaatgttgcagtaagtctgtagttgggttggtatcaacacccgaaaatcaaagctttttgaagtcttaaagtcgacccgaaatagcacagttacaagaggtaaagaaagagttttttttgagtgttatttcaaccacaatttattacatttgacaggctaaaaataatgtgctttggagtcaaaaattaccaatagctcatattacttttaattctataatttacaatgtttgtaatagattggactagtgttaagaaattgagtaggaaagataaagaatggttagaagctttgcatttataaaaaaaaaaaaatggataaataagaaaatttaaattttattaaagaagaattgtaatgtaaaatttaagaaaataaaaaacatacaacaaatttcgtaacaaaataaaaaaaaaaatatattagtagacgctttgtgggtggttaatgtttttctatattatttaataaattaaaatatataggatccgatattgatatgtcatctcttataatatttgacattttaagatgtctcgtaacatttttctttatataaatatcaatatatgtttgtttatgaccaagtggcttcatttttgaagagccacattaattgagaaatgtttttcttcttagtgttgaaactttaattatgatcacttattagctactctaccacttaataaatctatttgcagcccaatgtgacacttatcttatcattccaattccattatgttaattctaatgcccatattatatattttatgatttcatatgaaatta

SEQ ID NO: 27315 - DNA, 3838 bp, Cannabis sativa
ttttctggaagttgctcgcagcgaccataattcatgctcgttgccgcgagctatgccaaagtcagcttgaatttttcctcgttttctcgtgactttgtccattctaactttaatgaatattctatttaaacaccttaggaacttgaaacaaagataaaaaagagtaagtatcctaaaagtaaaaacaaagagtgaaaacaatactaaaatgtgacccaaaatttaggctaaaaatagtgtaaaaaatgcctcatggaaagttagatgtcatccggaaaggtttccggaagaagtcttcagggaagcttgtcatcctccagaaattagtttgggaaggctagatgttccctccaggaaggaagttccggatagtatgctccagttgttggaattttatatcctaaataaaacccaattcaatgtaattgtatttacgtttaataaagatcaaaaatcataccatgacctagtcgtatgctttgttcacgtgtttgatacatgattataggtttaatatataagttctattaaatcctaaacatatagttattcacaattacagtgatgttatcacaatgaaaagtaattgtgattatatgcttcaaattatttaagtctcatgatttatcagtgcatcgaatttagattgacgtgataatccgtgataaggtttatttacacttagctaagcggaatgtcttttccaagatattaataaagtatcagatgtattggctatacattggactggaccgatattaacagtcgaagagatatcataaacttaccattgtatcttttcaaagtcactatcacttagttgatcataaatcaattttatctcaatcctgagatggttaagctctagcttaattgtattgcataagttttttgacttgttcgttaccagcttacccaaaggactagcccatacttacatcttgggaactcggtagtacaattgagtaagagtgttaatcatatatatagacatctatagcttttatgtttattagaagtgaagcgatagtttccttagagtttggcttaacatgataaatgatataacgctcatttcggtaattgtattagttttccaaaatatcatttataagtagctatgtatttttatgataaaatacattgaaggataaaacgataattttgtctctactcgatgtatgattattgtgattgaaataatggataaattatagcttacacttacttagtgtatagagcattctatggaatcatgcgtgcaatttcgagtctatagtggagttaggaggaattaataagttaggaaatttactcggtaaatatcaagatctgtttattaggagtttgattacataggcccatgatccctacattgtaagagataatatcatcttgtagacttaactaattgattttataagttaattagaatttaaaaatagactgttttatttgataattttaccaagtttgaacaattttgagaagaaaagagaaataagagtttatttgttaattagtactctttatggatctaactaataaatatatttaaaaattaatatttaaataattagaagagataaatggtaaaattagaaaagacattttagatttattagtcgaagtatttaatatctagttgttatacccatattcaagcaacaatatggtgttgacacgtgtaaagaagctgaaaaaaaccagccaaagttataaatcaataattgcattcaaacaactcacctcaaaaaataccgttagtagaaatattcgaactcccccttttaaagataagggcgagttatgaataataactactgattgatgagaccaacgagataaacaacaaataaataaggtccatctcgggatacacagaatacacaacagaatgacaattcttagaaaggataaataatgaattattcaaagagttcgtagctcattgaccacatactcgtgagtatgttgaaagattaagggcaatatttccagcatgattcatctcgaaattatcatactgtgataagcgtctcgcatttgcttcattcaacatttatagaaggacgcgataagtgttacttgaagtatacttatgcgctgaaaactctctttagaataaagcatagtcaacataaccgtttatagatggagacaaagagcagctataaaacttatttattattatctcatgtgatgtaaatatgaaatgtggggatgatcttcgtttcacgaacagttacaagaataagatctcaagggaataattgtcaccctaaactcctataaatagggacaaaccccaagaaacaaagaacgaccaatttaagaaatatagagatattatatcaatatttccaagtactcttgtattttgtatacaatttattaatagttctaatattttagtataatggtaaagcttttaaaaattttaaaagctctaaggttcaatactttataattacacattaaatatttttttttttaaaaaaaaagatagagattggagattgattccttaacttattaggttaaagtaagacaacactacactaaataatatttattatgtattttttatttaatattttatctatatattaataatttttttataatttcgggtcctgagcggtcgggggccgaggcccacggccctgctaactccactcggccaccaacgacaaagtggaagcttatttgactacctacttagttgtgccagcaattctcgtaggatatgttgggtccattagtttatacatgggttcgttgttattcttcggcgtaaagaatggaaaaaccctaagattttaaagaaaaagaaaaatggcaggtgagatagtggaggagaatgtaattgagtttcctcattttattcctcctaaactagacatgtcaaaaatatttcatttttttcaataaaaaaaactatttttaatttttatttatatcttcatttttacaatgaccgttatacttagacatgggattagtaagacacttagcactaattaatatgactatgtgattatttatatgttttattctttatagactatattttcacgaaaatatgtgttatgattattatttcacaattccagagattttattgaattatatgtgtgatatgcatgctatctgtgaattttcatatttttatatttttatgcccggtaacagtggaatcgggtcgaatggcaattttagtcacatggacacaaatttgtatcaagtattttacggggcaatattattggatatcttagaatatcgggatttaacgaaataatagaattggaccattttacccctagggccacgagataactttgcagggaaataaaggcattttagtctttttcacccttagagcttagtcactctttttggaagggataggtggctgtggctcatccttttgaggatgaccggctgcttaggaagcaaacaaaaaaggaaaagcaaaataaaaggaacccaaaagaaaaagcaaggtcaaaagtaaaagaaaagtcaaaaaacaccaagtcaccttctccttctccctctacttcgtggcttctgaaccagggccaaaactcagagttttccaccattttcaagcctcttcctagctggaattcatcaaggagttcaacccttagctcctcctaacttctaaggtaaaacctaacctgaaatttattagttttctaggatttttgttagttttcagtggatgtttatagtataacatgttgaataagtttaggaaggttatgagatgataattaaggttatttaggactgtttagaagtggtttgaattgttttgggtggttgt

SEQ ID NO: 27316 - DNA, 3389 bp, Cannabis sativa
taataaatattaatttattatttttatacttattaccggcggacacacttataccagcggagtcccgccggtaataagttggtatatataaaaaataaaatctcatcttttccttcagacttttcttcttctcattttcactctcgtctcttctattcttctagatgtctctcgccccttctcttcttatctctctcaatctcttcatctttgattggcaatggcacacagtgacattttccaataggagatggtggctttttcagctagtgcaagatttagatgactatctctacccatgtgagttttcgtacatatatatttatttactatatatattcatatatatatatatatatatatattaagttttatgaattataatagtatttttttttgttagctgagacacctcgttaacacctttagatttcttttgttatatatacatatagatatacatttataatttattaattattttttaatatttttaaaaattaacctataacatctcatagtattttaaagtagtatttatatatataactaaaactatttctatatatgttattttttttaaaaaaaaaatatgtatctacatgtataaacttaaaaataattttgaactattctgtcaattttaatttttttgtaattttttttcataatttttttatagtttaaaatattgttgttatatactattaatttttagtctaatattttttattatcaggacataatgacacaagaaatgaggagacaacaatttcaaagcatgttattatcttcgtagcaatctctactatcttgctacatttcactgtcgacaccacaatgatgaagattcaagagtattgacttcaaagttgcagattttttaaatgaatattctcatttaaacattgataatgtatatttcctttcagcaacaagacaatttcttaaggtgtattattgtattaattgatgtacaatgtgttgaataaatattaattatttttaaaaattctgttatttttcatataaaatataatattatatattatttttattttcttctcaattaatattattaaatattttttttaataaaaaactaatattggaagataaatagcagcggggtccgcttgtattaatgtgtcagatagacaatctgacgagtttagtaccgagggggtccgcccctaataatccgctggtaataatatttaatagcggcgtgatgtcagtccgccactaaaaatggtaaatagtgaacctgtagtaccagcggagtattaccggcggatcccgctggtaataacttttaggggcgaaaaacacagttattctccgccggtaatgagctaatatgttgtagtgtcattaattaaataaaataaatatttaaatttaaaaagtggttaaaaatatttcaagttggtcgagatattgcctcaaagttagttgagagattccctcatctaaaatattagtaaccaaattcagttataaatatttatttaaataactaaatatgatttgattaatgaagaattaactactataaattgatgtacaatttgagaaatcagaagaaccttttcacactatattttcgaaattcaaatgagaaaataaatattatttttctctctcaaatagttctggctcatgtggtgagaatcaatcaagaataaattatacactaatttatcctaatacccaaactattctttgtgtttggtggatcaatttgaaagactacggtgtgagtttctaatcaatatccaaaatgtttaaacttgtgagaaattttgagaataccatgatagccatcaagaggtatatatttctttcatataatttatattttgatttaatatttatacatctagagatatatttggggctatggtataatgataatcaaatatacaactgcataccttattactataaaactaataattggtattaggagtagttccatgaatgtatacacattaaatgttgtgtgaattttatgcattcatatatatatatatgtgatatgtacgtgaatggatggttatattattcagatgtatgggaggtgatgaatcgttaattatttggtaaaatttggtgtaggttttgttattatataatctagaaaatattgtaagctaatattgggacataggaatttttatgtaattttatttaatgagattaattttatgtacaaaatgtataatgtaatgtacattgcatgtgagttcagtttttaatcttgaaacccgaccattcacgaaaaaatcacttgcatgtgagcttgggaatttttccctagccatgcacaaccacccgagtggcttcaggttcttcatgcatgcaagtgggacgtgagtcctttgagatacaagcaaaccagtcgggtccataaggacccgtacaactgatgctcactgtgcccggagaaggaactcgataggattcttggtcttctgtcccctcttgcagccacaatgggccatatacttgtccttctccttctccgccaggtttgaaaaagactcgactggatcattgtgggtccttcgtgacccgtaccatgcaattgtgtatgtggctactcctcctcgtggccaaacatggccaccgtggccatggtggatgtagccgccaaccacggtgggtcatggtggtcggtcctcttaaactctaaaccccaccctattatatatatgtatgtatttttaggtatatatatgtgtacatgttgtatatataatatatattattatatattgtatataatatatatagttcatatataatatatatacactttaaattataaataattacttaatgtaaataattaattattgttctggatatttgttttttaaaatttaattttgaattcaaaataaatattaaggttactaatttgaaattcaaatttaagttagtaactattttaattattatttcaaataagtttattttagttttgaaattcaaattctaaacctataattatgttaagatagaagctctcttaatcccaattaaaataataaatgttattattttaagactaaactaatatgataataaagttgtcttaaataaagggttttgtttacactaaaagtatccacgatgacatggatatcaatgtttgatatgtgagaagaaagatgacatctcagagttgagtagtcctgagtcatagcaagtcgactgggaggggtccctagccttgcgcccaagttgacttcaggaacttaagactggaagttcgggctttaataactttattccaactaactatctctcagtattttgtaccatgaacccattgagcaatcaaattcaggccatggaagctaaaattacacgaacctgca

SEQ ID NO: 27317 - DNA, 1168 bp, Cannabis sativa
aggggaggggaggggaagtaaatgtgtgactaagagcttagctgtttgggaattgctaggtctggttttgatttgttggaacattttacaaagttaatgagtatttgacaaaacgagagtgtcctagtgtgtgaaatagaatgagtcccacatgggatttgaatctttgtttataagggtaatgtgtaattttgacacttgtgatacccagttttgttgtgattttattttttacaaaaaaatatatttaataaaataattatatttttctttattatttaatttatttgagaaatgtgtttaatcgaaactgattacttagtcgtatcagtttataggacacgttcaacaactactccccacaattcagaaaacatttttcttcccattataatttttcatttcatttgtctatataatgcgattgaattaacaggagaaacacatatttttcatattaaaaaaacaaactcaattttcgctatcaaaaattccatctgcgatatctattttgagggtgtattcgacagttcgctacagtatagtagtgttccgatacggtatacgataactgggttgttttatcttagggacaatcagcaattttcgactgcttttacaattctgggtagtgccacgaatgtcttaaagagagtgacctagtctgtgactcaacccaaaaattttattcgataatatagtttctgttttattttcagtaagaatttcatcaacggactacaatattgtattctatttacctcaaagcttctcattttctaagagttttaagttacgttatcatttcatttggatagtgtacactcgacctgtattttagggtgctcatcttcgtgtttcattttgagtggcatataaaattttgtttgattacaaccacttaggtagaactcaatcccaaaaactagctaagagaggagggtgtccaaataattataaaccaccaaccagtctcaccatctcacacttagctgatgtggaatcctaacaatacaccccccttggaggggacgtccacggctgcccactctacggtggcctattatgggctttttccacaagtcgatgtgattccatttgagggtgtatgtctctgatatcatttgttataaccactaaagtagaactcactaccaaaagactagct

SEQ ID NO: 27318 - DNA, 2501 bp, Cannabis sativa
taacagatatgcataatttaatgataatgttagaaacaattattttggtaatagcctttaatatcatgttgtcttcaaaaaaaataaaaacaaaaagttacccaaaaataaaatgggtcctcccaaattacaataattttctcattgtcattgtcttttatagacttcaaagtttaaaccattgttttaccttaagtctaacttttagaaatgtcgtcttttatgttcaaagctcaacaaatcatcaaacaaaaagaggaactaaagagatgcaaattatatatatatatattgctatagctcatgtttagagtgcaaattcttcaaagttctgtttagttgtttttaaatcaactaatgatattacaaaatccctccgtgtttgacaaatttttgttacccacatctgagaatttttcagtaatggaggatgttcatagagattagagaaagatcaaaagagaatggcttcaaaacaacgatcaaacttttatcaatcgagttgagcacagatgttaacatggtcattaacattttacaacttactattatgtacaaggatcgttattcttattgactccatcagcagaaagccaatgctcaatgccgactcacattaacacccacgtcgttaaagggcctaagatgtggtactggtaactgtatataacatcatgaggtcatcactaaaagactaaacaaagtggcttgaccccaaaaagttaataccaaccaacagaagaaagggaattaaaaactacatattatcactgtgagtgatccaaaatggaccataattttaatggaaacctaaaattggaaacctggtcctgatcaagcattcaaccaaacatgtaatataccttcaaacatagataaaacatcagaatcaataccatttgaagaggaaaacaggcaagcagtcatatgaatctgattttcacgggggcacgttctcaacgagctcgtgcagttctcattggaaaggccataagataccgagcccagtgccggagaaactgaattattaactctacttggacccaaatccacgctagaattgggactgggactaggcgaaggagaaatctaaaatagacaaacacccgattcagaaaatagcaataattaatcaaagcataaccaaaattcattaaaaaaaatcacctgttgaggaggactatcgtgaattggtttattaacactagcaaggtttcgaattttggtgaaaggagaagcctcacacccattaccgaccattaaaagcagcaccaccaccacaaccgccgccaacacccgtacagttgacccgattgggattctttccataaccataattcactcttttttattcttcttcttctatcaaataatgaagtcttaattttagaattggtatcatattgaggagggtaatggaagagtagaaaagaacccccccaaaaaaaaaagcaggaacgggcttagaatcaacgtcttctccaatgagaaaagtaattgggatttgggaatagaatacgcattagaaaaatgttgtcgtttatcaaagtcaatgtcattcttcatcttcttcgcaagttccgctgactctatcttttctctcacaatcacaataaaaaaagtttcactattttaatttgggctctatgcgggtcgaattttgatggttttcaaatttggaaagtttaatccaaaataactaattcaacgaaattgcaaatgtggaaagtgttaagactctttataaacacctctaaaatatgttgtctttccaatgtggaagtctctcaacattaaggagactatttgcacactttacttcttttttgaatattcataataaaagttcaaagagaaattgtgtatcaaaccctttaaataaatttctaaatctcttaaaaaggacttcataatattcttgtaaaataggagaattatcatttttatggtttttttttttggcaaagttaacacaaattaaacttttttaaacaaaaaaaaaatatattttgtgggaaattaaaaaatcaaaaatatggaaaaaaaaaaacagagtttagggtaaccagtaggtaaccaattagcttatattattttcctatctattttttttttaacttttttctgaattttttccataatatatattttttataaagtcatagtttgcacaaattgttaaaacttataaattgtgtaattttcacggtaaaatatggctaataccaaattattaatcatacaggtagtgaacattgatgaaattgtaagacaaagtttttgggttttgggttctgacgggtttgatgtgaacgggttactacattaattgggccaatttttaggtttgggcctactgtgggccttattgacaggtcttcagaaatgttatgttttggttaataatttgggacaattacatgcaccatttttttgggtaaaaaaattatatttttacatttttacgatttttcatagaaacaacacgaaaacaacaaaaa

SEQ ID NO: 27319 - DNA, 4095 bp, Cannabis sativa
aaaaaaaaaaaaaaaagtggcaggaaggccgactagcttatcccgagttgggcctaatccgcaaagtttaagcgagctttcagcctggaccgggttgggactcacccgtcacattcccaaaaatatatatatatttcactagtccaccctttatccttttcttatgttactaaaaagagtatcttgattttccacccaaacaagacaaagtaggagaaaactttaaccgacctcaataaaaagactttttagcctttcaaaaaaattatattaaatattatggataatcttcttcttcctttttttttcctttgtattttaaaaatgttcaactaattaatttgtaatgagaattgagaagtgaaaacgaaagcaagaatacctttccgcaatgtagctaatatgattctctttttttttttaatatatacaaataaataaataaacaagagaaaaagcacaccttttcccacttacgaacacttttcctctcgtatttaaaaaactcgaaacagagagtgagagaaccacataagaagaagaagaaggtttgagctaaacgaaaccttttttaactcaactgggaactcgtgggaggagtcacgagactcgcgtctaaggactcacaagaaagcaaaagcaaaaaagggagagagacagagagagattgaataatcagaagaaggaatgatggagagtccaagatcgatgaagaaaagcggaggaggagaggttctagatggttcgaatataatggagttggttgggaacgaagaggtgttcagtcatttcgtggaccataagttccatgagttggacaaagatagagatggtaagctctctgtgaacgagctccaccctgctgttgctgatatcggcgctgctcttggcttgcctgcccagggttcctctcctgattctgatcatatttactctgaggtttctctttctttcttccctttttactttcatttttcaacaatttcaattaatgggtacattagatttctcattttctctattcggtttcccagttcctctactttcttatcgttttctcaattgaccttctttccttgtcttctctttctcaaaaaaaaaaaaaaattaaataataaataacacaatttcaagtaatgagcacattacaatagatttctcattttgtttattctctcttgtctcaatttttttaaagaattttgatcatcattttttttaccatctcggttgtttgtttgattttcttattatttttttccaacaaaatttcaagtaatgggtacattatctgtttgtgctattcttcttgtataatgtatatgcaattgtacccaaattatagaatttaagaaagtttgtcttgttttgtgagaagataagatgttacgtattagttggaatttgttgctgtaattacgtttgcttggaatagtgattttgggtcggtccattctcttatttatttattttattattatacaatatagagcaactattgtagtcaaattctttacatatttatgctctgattttttttttttattatttgattaaaagtaggtaaacgtttattttatggtgaattgtctatgtataaatattaaaatatttttttattattattttaaagaaatggagatggttatgcttactttcatggaatcatgggtccataagagaagtaaaattcaagatttccttatctagcaagctcgagaaacatatccaacctatgattttacttggtcggtcttgtcgtatgtgggtcatttgctttatcagcatttatttttttttctactattattattgttatcatcaaatttaaaaacacatatcacatatttatctcctttgtctttcttttttttcttttttttcattttatctttgtatttctttataccgtctttttacaaggaggaatctagtgacgacttgcgtagcagttttgtattctttttggattcatgattataacacttgattaaaattgagtggtctttgtttagcaaaaaataaaaaatataaaattgagtggtcttgaagtcataatttggtatagttttcttttatgatttgacttggttgccccattctgtattttcttgcaagccaatgccaaaaaattcataaagtttttgtcttcaaataaggactgctttaaaagaaattaatgtatttataaatttatataaatatagtacaaatgttacagcaaaatatatatgtatatatacacacacctaattgacttagctggtggctgaactaaccatgagataatatatacatatttttttatgagaaccatgagataatattagtaaaacaatctatcattctcactgtgaatcagcccctcgtgagtcgtgacacatgaaatactagtaagattttaatttggaagaaataggacagaaaattaaggaatcatgtatagaaattttctttatccattaaactactactcattatccatgccacacatgatattaggaggtattattctatcttaaagaacataacaacacccactcatccctttaatttggatataataatgataaaacaaaagaatttaacttgacaaaggttgattgttttcaaaaaggtgtctaacttgcaagcttcacttgttgggcaaaaggggtacatattaaacataagatccattaaacagtgtcactaaactagtttttctatgctatcaatgatgaagaattttaagggtaatgaagaaacgagtgcacatttttattgtgtgtactatcaaagtccaagtgagttattctggtgtgatttttttttttttttgtaggtgttaagtgagttcacccatggtaaacaagaaaaagtgaacaaaactgaattcaaagaggtcctttcagacattcttctaggcatggctgctggtttaaagagagaccctattgtgatcctccgcatagatggagaagaccttcaagaatttgtcaacagcccaagttttgagccagaaatgatatcaatattgacagagattgagtcagcctatgaagaagggttgccctttaaagattttatactcaaggctttggaaaaactcactgttgaacaaggcatgcccccaacttcagattcttgggtaatttctctcgtctagttacatcttactactactattatgtgaacaaggttatccaacttaaaacattgttacgaactttggttattactttttttacaaggttatgagcaacattgtagagcctgctcttcaactgtgcggggggcatgatttcaagaaaccagtgtctcaagaaacattcttaatggaatttaagaaagcggcagagagtgtggcacaacatcttaagaatcaacctgttatagttgctcatagtgaaaacacttttgatggaagtgttatcaggaggctattatccaacaagtttgaactggataaggtttatttagagacatttatactctttctatactgtgctttcatgttaatttgattttgactttattgtcttgtattggttatgcttgaacttcttaacttgcagacactaaatgcagccatagaagatttgccaaaagatcgaaatgggaaaatatctaaggagcatttgcgcgtggcactcgatgtgctggccccagcagccgggctaccaccacttggcgcagttgaagaggtacttctagtctccatttgaacatcacaacagcatagtattcaaagattgatattcacacattcaatatccaatgagtcaatgaaataactcacatcttatttaaaacaatcaaattgatatgaaagaatgtactattaccttctaagtttggcattgattctccactagccatcttactaacacaccacaatatccttagccttcctaagcctcccacccaaaaagagctccaaaatttagaaaattttcattttgtaaataatagttaccaaaaaaattacatttggaatcgaacattagaatttagaatgtgtttttccaatcatttccatacacatgaggtataaataggttttttatcggacctatatatcatattggtggacccctaggaaaatcatgagga

SEQ ID NO: 27320 - DNA, 2723 bp, Cannabis sativa
aactaagatttttaaattcttaagcccaattaagcagtgggtcagccaataacggagcttgttcatagctctgaatttggatactggtctaatttacaaataaagtaaagtcaaaccttaatggtcctagaagagcaacttttctagaagatgaaaagcccaacaaaggctatctggataccttcatggggtaattcggagagggacaactgaagagacatctggagtcattttgaaatcatcttacgtggtatccttttgacacagtatcccaccaaatcaagagtttgtcgcttatgtcagacatgaggagtgcgcgtacctctgacatttactatacacaataggcgacgcatgacacctatcaccatcaagtgctctgtacggacgaccgttacatcataatatgggccttacctaaccaacccaaaatgaatataagttgtattttaccctaccatttggcctagttgacacatttaaaccttaatggatccgagtttacccacaatccgacttagcctataaatagaacatgatccgttcatgcctagggttagaaatttatttcacaaatcaggagctaaaaattagggttcttgaactttagagagaacactcttgtataagaatactctatagcttttccagtttaataatattaatttgtggactaagattcattaatgcttgaatcacataaaaataattgttgcattacctttaatttaggattttgttgttaggtctcttctccttaattttataaatacatattgcatgtctcacaattgtattttaatgttttataaatttataaggaaggaagacttattaagttaatattgcactgccaaactctattttttctaattatcttttgttggatcaactttgtatctcttttattagttatatactctataaattgcatgaaatatatcagattttcccaactgtatatatatgctagtcaatattttgtttatccaattgtattatttttggttccagattaaactaaacaagatcatacatataaaattagattgatatatatattattcatttatttatttttaccgtatacttattaattaatactcagaaaaattactccataggattcaaaaacaaattattgttattatatataaaaatggaaggagtgaaaatagcttagataagaagaatattatggtccccagatcccctaagggtatggggtccaaaactgtgatgtgtgtttgaactttaaaacattgtggccggccattcttgaaatctcttcgtgaagttccaaaaaaatataaattaaaatgatatattgaagctatcgatcatttccaataagtaacatgtatatatttgtttatgtggcccgatatgaaccattgggcaagataatgggtataatataacaatgagaatttagtaacatgtcatgaagcaagatttgggagacatagacaaaatgtgctaccagaaatgaacaagttttgatagcattgcttcttccctttctttctccttaattttgtcttcctctatatatatagttttcccacttcatcgttttctcaagctataccaaaaaccaatataaccaaacctttattattatttattatcattattttgttgctattatttttttatgtttatataatattatatatcatgggggaccaaaaactcatacatgctacttgtctgtgcatgttattggtctttttgtcactgtagcaactaacacatgtcacagctagctacgatctttaatttcattattcatcctctcaaatataaaataaaaatttttattattatttagcaagttgatgagggtagtacgtacatattatttcagtgaaaaatctctcctcagaatattgatcaagacaatatatgatatgttttttcttttcttttttttttttttctcttgtggttgatagagattgtaacgcaagtatcacataataatgatatacttggacaaatgctgaccagaaaatgtaaacatatacttagtttttttgtgttaggtggatgggaattaagaattgaagattgttctaatcaatatttatagataaaaagaggacatatagaagagtaacaaaagaattaaattccctagagagtgataattaccatacaagttgtatattagaagggaatttggaaggacttggggacacattgaatggaacaggccacagagtatgtacctttgttatgtgctgttttgctgtgacttgtcggagccattttaccctataaatctatctatatgtatacacacattaatatataactaattgtataaattgatgtagaaagagtctaggcgatcgaggtgtttttttagttttgagaaagaaagtgtattccatatttgtgtatatcaatgtatgtttccattggctacaaccattgatgattgcattgatgttgcatgtctcgctaattaaatttgtgaatttagatatttaatgtgaaacatgttctccacccttgaaaaataatttagacatatatagatactttttgtcaagttttttaaggtatatatacgtgtattgatttactagtactgatcatcacaatagagaaacatggaagtacaacactctaaacgacattgaagaggaaagaaaaaaaagatatatattattttaacaacatttggatgacaaaaccatttagatcacttattt

SEQ ID NO: 27321 - DNA, 3111 bp, Cannabis sativa
aacaagatattaggaattcatatgtaattaccacctcatatccaaacacatcttacattttaaaatatagtgtaattactaaactgtgtaattactctagtaattactactctagtaattaccctacatagtcattacacatttacttccaattccaaacacaccctaaaataataataataaaaattatatatataaagtttttttttattatatatgataacagtttatggaagaaagaaagaatggtgaatgatgcaccaataacgagagagaatactaaatgtaaataattttggttattttttatcaatttaaattaatatgcatttcaaaaaaaaattaatatgggtatctgtataaataaaatgtactttacgtatttcaatgtaattttctctcttttttttttggtatttacataaatatagaaaaaataaaattagtttaattatataaatatggtaagaaatcttaataggaaaaaatatagcatttaaaataaaaacttgacatatataagatattacactttgaattaccataaaaaaaaattaaaattctctttatatattttttttttaaaaaataaaacaaatgaaactactgtgattgccggagtgttcactagggccgaaaaagtcaacggagtttgctgacggtgcaagaaaagttattggagtagctgtcggtgttgaaaaaattaccggagttattgtcaacgtcagaaaattcgttggagtttcttcatcaagaaatcagtttcttggtaatttttctggtaatttttccgacaacaatgccaattccgacaacttttttggcgtcggctgcaactccgacgacttttccgacaccgatagttactccgacaattttttcagtacccgtcacaaataaaattacttaaaaataaataaaaacattaaatatgggttttgaaaacctaatttacatatatatatatatatataacatatcaagtaccataaaaatacctaaaactaaaaaatatcatattaaattttgcatttgtgtgttggagtaaaatatattttttttttgaaaaatattggagtataatattaaaattatgtaaaacatataaattatttttctttcactaaatataacacaatttttatatctcacattaaaaatagttttactatgtgataattttttagtgtaatcaccttgatcataattaattgtgcactgaagtcaaagttttaatttgttgaaatgcagtagcacatgcgggactaaaatttacatttggaactccatttgtagttatttttttgatctataaatggcgaaggcgacatttatcaatgtatagttctattgaggaattccttcacactcaaaataatcttagtcctataagatactcatttagagatataaagaagatgacccaaaactttaaaaataaattaggtgaaggaggttatggctctgtgttcaaaggaaagcttcgtagtggtcattttgttgcggtgaagatattgagtaaatccaaaggaaatggacaagatttcatcaatgaaatttctacaattggaacaattcatcatgtcaatgtcgttcgtttgataggattttgtgtccattcctcgaatcacgctctcgtgtatgatttcatgtccaatggatctctagaaaaatatattttttctcacgaagaaattgcctctttaagttgcaagcaaatttttgaaatttcgcttggtgtggcacgtggaattgaatatttgcatcaaggatgtcacatgcaaattttacactttgatattaagcctcacaacattcttttggatgaaaattttaatccaaaagtttctgattttgggttagcaagattatgcccgttggataatcagaatttgtccttaactgcagcaagaggaacattaggatacatagctccagaactattttacaaaaatattggaagagtttctaataaggccgatgtgtatagttttggaatgttattgatggagatggtaggtaaaaggaaaaatataaaagcggatgctgaaaatactagccaaatttactttccttcttgggtgcatgatcaactaagtgaaggaaaaaatatagacatagaaacaacacttacagatgaggaaaattcaaaagttatgaagaagatgattatagtagcattatggtgtatacaactgaagccaagtgatcgccctacaatgaacaaagttatagaattacttgaaggagaagttgattgtctacaaatacctcctaagccttctctatatcagctagacaagcctagagatcttgtccaagaggcatcatgttcaatgaattcaacaataccatcattaacactaccaagataagttcaaacctacatcttggcagattttagttggtgatatatgacaataaataatggactcgatataaatccaaacctaattattgtgagttacttttttcttgtgtggttttgtttcagtttttgtgatttaattttgagagatcatcaatggaattaatttttcttcatgattatatatgattatttttattcatcactcgttcattttaatcgacattctccataaataaatatattttctttatttttcttaaatttttttttaaaaaaaaaatctctaaaaaactaataattttgtattgggaaacaagtcaaatcgcttaccatgcagacaggcggaggctcggaagaacaaacagtgatttcaaaatcaaacaatccatttgaatagtaatgttgttgttacacatcttacttttacttaagatatttatttaatttgtgtttttgtcttttctttcattccctcattttcgaaaggattcaaaataaaagattaggagggagtgttgatacctccatgcatctatcatctccctcctattttcttttctttcttatcaaacaatagaatttcgttgtcctccctcccctcttcctaccctctccatccttatttcctttttgaaaaagaaaaacatactaagtggaagttggcaatgtatagtaaattattggtgttgaaatatatgatggatatccttattaataatgacaaaaatgtagatgataga

SEQ ID NO: 27322 - DNA, 2583 bp, Cannabis sativa
gtgtctgggaaatttcttgctcaaattcgcagaaggtgattcatgatggtatcaaaactctcgtacatccgctggtgaaaatggggcttgggtttgaagtttttcggtcttaagttctgagaagtaaaactttagttcgaatttgaaagtgaagggattcaaaaagcttgaaaagggtaaaaaaagaaaatgataggggttttgtgcctatttataatggagaaatcagtccatgtgattcaaaatcaaaggcctagatcaaatcagctaaaaaacacaaagctatctaatggttagggagttgagaagactatatttaatgctctttggcaaaatcaaggcatttaatcatcatcattatttgccttgggccccctacgcattaaagagtcatcacatcataactctgccaccatttgacttttcctggaataaatgtgcttcctgcatgcatgtactattcacagatccgaaggatgtatgacaagtgtgcactaccagttgtttaccataaaagtttttgatctctcaactactaagtgcaggatgaaagagatgctcctacattctcaagatttgcccacgtatcccaagtgtaccctggtaatcttgaaggagactgcaagcttccaccactcaagagtccgaaaagcttggggataaatattatccacgtttcaggatgaaggacacatgacaaaaggtagaaggcaatggcctaagtaactaccaattaagtccccttaattggagaaagtcgcggaaagactaaacaaattttggagaggtctaaatcctagaaaggcccaaaaatttaccacaagggaaattaccgtctgggacctggaagccccgtcatccattcaggacccgaagtagaccaaatcaactaagctaatagggagacacatgggattcataagaagggtataaggaggatgtcaattgcacaaggaaaatcagaagcttatcatgaagcgatagtcgtatgactcttgtgatggttatacttttatgacacatatgatcagatcttgtcccctgtgtcagaccatggtagttcgcgtaccacctatgaatacgccttttagtctgacgactcctcagagggttttgtctactaggtgcaacctccgcccgacacacgtcctgcaccaacagtggtcccagctatacggacccttcacctcacaagaagagccttcttagggcccaataatgcgtattcttatgtatcttaccccaatagagtgtgagatttttgcaaaaaaccctaagtgagttatgggtatgcctatacccgtactttagtctatataaactcctttatttattcaaaaaaggggatcaaaaattacatagtcgaagctctgctaaaatactctctaagctttcattttcttcaagaggaactaagagaaccagagtaagggtttcattgtaaacaccacttgtaatatatttttacacctacaaggccaatatactgactcgtggactagggataattacgcccaaaccaagtaaaatccttcgtctcatttatttaaccgttatttaattgctaaagctttcatttgattagttttttaaaatctcagtaaacatttatagtgttgagaacacgatcaaatatttaaattataatgaaaaaacaattccaaaatatttcttttgaatatcaaataaagttaaaataaatttaaattttaaaataatgtgaaatttcgtttaactcccaaaaatatcaacttatgtgtgtaaatagagttacgtgtcttctattttttttttgttgataatagtgtctttgaaaattttaaaaattataatatttataaatgtgtttttgaataattaatatttttacaccctgaactttcagcactacctaattttgtcccctaaaatatacggcttgttaaaaattctctctaaaatataacagttacataattatgccctttctattaggttccggttctttacaattaaaaattagcatttttaccccttgatctttgaccaatacaaaatttttctcccttttataaaaaaaaaaaataattttaaaaattataatattctatcttttttaaatcaattataatattctattaattcaaaataataataataaaaattattaaaaaaattggataaaaaatattaattttacttaaaaatatttttaaactttattttatttatcaacacgtatcttaaaaagtcaaaccaaaattattgataatcaaataaataatttaaatgaactaagattttttgaagaaaactcaaacttatttatatttataaaatcataccttagcaaataaaaaaaaaataattaaaaattcaataaaaatatgaaattattttgaaaagaaagttatagattaaactaaaaaatgttatgtttacttaatcaatctaattttttgataaaagtaaaatatattcaagtttcttcctctaagatttagtatttattatatttttacaaatacaatttttaatatctaaatgaattttctaataaaaaataaataattttttatattgcgtaattagttttaaaatttt

SEQ ID NO: 27323 - DNA, 6560 bp, Cannabis sativa
cattcttttcctgatggtcatttcggtctgttcctggctgatagtcatggtttcttggatgcaatccttagtccgattttgatatgtaggaatagagtttatggttagaatagtatcctctttatttgtaatagattgttgataattattaatgtcagaagtatggatggggttacctttcaattgatctgcttgttgaattgatctctctccctctttggaatgttgttctatcacctgggatggtggtattttgtctactccctggccatttgtttgatttatcagttgggtctcttttttactagttgattccattctccccgtcgtatcgattttgagccacgcaccatacgctggagccacatctccattttccttcatcacagtagctcgaatttctgagcattggcgtaattcatgcccaatctttccacaattgaagcacatatagggcaatctgtcatactggaattgaagccatctacgccgtccatcatgggggaacaaatagccagggaatattttggattcaatggagttctttactatgaatttaaagaacccattgattgtgattcggttgatgtccggttcttgtatgtccaccacttctccagccataccagccaatcaaagcatattagtccttgtgattgctttgattggtaagttaagcactctcccagatatggtgaacgaagtcaaagtcttctcccaattcgtgggtattcctttcatcctttcaagtatcaggaaccctgaattcaaaacccaaggggttcttcccaatatcctttcgagcgtaatgttttgtttgaaagaaaggattaagaacagagctttatctgttactttctttattttcaggtcccaatcaagttcccccaaattccataacctgcatagtatgttctttagtaaagaacgggtgaaatgtttcatggtgcaaagtcgcccgatgagacacaatttccctatatcctcagtcccttcctcgttgatttcccatccgtcctcgtcagtgaccgttaatttacttatttgggaaagcaactcttccatttgcgccatgcttttagagcacctctgttgaataggctcttccgaagagagcataggggaatcgccaatcgccatgtccaaagagagaaaacgagagcgtaacttttttgtctttttgtttgattaagtattaaactcattgtcattgttaagtccttccacgtactcttcagaaccacctagtacttatgcgagtaccttttattaaattaatataagaatttttttttatttttacactttacaataattttttttttacatttttacgaaattctacgtagaaatttctattgcaactagcgcatagaaattcctattgcaatgctataaccactatagaaactcaaatttaaaacaaaaataaaaaaaaaaaaaaatattggagataattccctattaatatatataattcaatattaaatttatgtaattggtaacgttaaagtggcacttagcatttcccactcttgagagccaaccgtctctttggcttccctgtatacccatttcccactcttccacttctcaatacaagtttacgcatcatcatattcatacctattctattctgcatgcactacatatactcttcttgcatttactcattactattagctagactagaaagaaacacacaatggaaattggagaatgcttaaaccaactgttaacaaattccacccgcaaagtacattcatggactccacttttcaaaccttactctttcataaatatttcttctggaaaagaacaaatggatgatcttcaacacacctggaaaaacatgcttgaggtcgctgtagtcatcagacttgtccacaatctctatagaggtattcaatttattttacgtcttatgttggaaagtttgattttggtgaggaaaaaaaatatggtgaataaaaaaaatcaatttttcatattttatattaattttttttaatccaaacataactctcatacataaatttctttgagctgtatctctatgtattactatctgtgatttttgtgtgtattttgacatgtctattcagaatggaagggattaaggcaacagcttaatgttactataacatcaccttatgaagctcaattatttgaaataaaagaaaaaataggacaaaattacaacaagtataatgggttttcagttaaggtgattggagttgaagagttgcagggttataaagaagaagatatcttagtcttatccatggttacatcaaattctgatggttcaaatcacttgttttctgatcttgacagagttaaattagtatttgcaagtgcaaggtaaaacaaattgtgcttatcattgccttatttgattctttaatatgtaacttcatgatgtacttttatgtgatattgcagaaacagtctttggattttaggaaatgaaacaacattgctgagaagagattctgtttggaaatctattctatgtgatgccaaggatcgaaagtgttttttcgatgcagaggaagataaagatctttgtcaattcattatagaagttaagaaagagctgaatcaattggatgagttgtttgatgctgatagttttcttttcaagaatgctaagtggaaggtactatagtgattaagtttttaataggttggttttgatgttattgaaatcaattaatacttaatttctttttatttgtctaatcaggtgcttttcagtgataatttcaagaaatcatttgaaaagattaagtcatctcaaatgagaaagttagttgttaacatgttactgagacttgcaaatggatggagaccgaaaaggaggaatactaccaacataacatgtgataaatcaaagcaaaacttgaagcaatttaaggttaagagtatgtacattatttgctctattgacatagtgaaggaacataggtacattcaagtgttaaaggtttgggatctattgccactagtggaagttcaagaattggtaaatcgtcttgatactatctttcttacatacactgacgattttattaggcgttgcaaggttaaacataatgaggggtaaggccattatctactacacttgaaatgtataattttgtttcttttcaataaaaaaaatgatatatatgtatataagtattttggttgtttgtagggatttggaaattcctatgagttgggaaacctcttgtggtattgttcgcgataagaaatctataccaggagaagcagaagtagaggtttcacaagtgagtgttggtttgttgcagatgaaattctatgccttgtcctcaggaatggtggatcaattgctctctagctgtgatggtacagagctagtattgccctttgaattgactagccaagaaatggagattataaactttgacaaaacctcttttgttcttgggagatctggaactggcaaatctactgttatagtaagaaagttagtccaaagagagcagttacatcatatagctttggaaggttttcatgaatccaatgtgtgttcattaagggaacatggaatagtagatgatgaaaaggttagcaatgccgacgagaattttcttcgccagatttttgtaacacttaatccaaggctgtgttatgctgttaaacagcaagtttcgcgtttgaaaaggtgcgtaaaagttgtactagtatttagaaaaaaatgcttaaggctacatataattatcattgaaatttcatgctattgatcttaattgctacagcaacttattgataacaacaactgagttggtatgttaatgtttatacttgtatagagaatctaattgaatttattttaaatttatagatatgcttattatggtgggaattctattgaagatagcagctttgttcctttagagtatatcgattttattccagattcctttcttgatcttcctcgaaaggaataccctcttgtcataacattacacaagttcctcatgatgctggatggaacaataggcaattcatttttcaacagattcccagaaactagaggccaatattttcgaaataaaagaagtagaagaaaattaatggccttggaaagttttatcagattgaatgaagttaatttcaacaaatttattatatcttattggcctcacttcaatatggacttaaccaatggatttgaaccatctcaagtgttcatagaaataatgtcacatttgaaaggagggttgaaatctgggaatctttctgatggtaatctcagtcagaaagattacattttgaaaagtaacagcagagtttcaaatttcagcaacgatgaaagaaagaaaatatatgacatttttctacaatatgaaaagttgaagactgttaatggtgaatatgatttggctgatctggtttgcgatcttcattatcgattcaatggcgaaacatatgagggtgacaaattggattttgtgtatattgatgaagtgcaggatctaactatgggacagattgcactttttaagtacatatgcaaaaatgtggatgatggttatgttttttgtggtgatacagcacagaccattgcaaagggagttgactttagattcgaggatatacggtgtcttttctatagggaatttttatatgggaaaggagaaaaaggccttatcacagacatatttcaattgagtcagaactttagaagtcatgctggtgtattgaacttggctcagagtgtcactaatcttctatatcatttcttcccactctcgattgatgtaatgcgccccgagacaagtctgattaatggggaaactccactgttggttgaagtgcacggcgaaaatgagtttgcttctatgttcaatgatggagaaggtgggaagcttgttggttttggagctgagcaagccatcttagttagagatgacaacacaaagaatgaggttttaaagtatgttggaaaacatgctcttgttctaacaatatcagaatgtaaaggccttgagtttcaggtgtttgttaagtctatttaactttgagtaatttgattttattcctctaaactgaaacatagttttgctataacaaaatttaccaacttagctttttgtttttgtaggatgtgttgctttataactttctttcttcatcaccaatcaaaaatcaatggagagtcatatatgagtttatgaaggagcacaatataatttcccatgaagttccaacatctttacatagtgtcaatgaggccaagcacagtcttctgtgttctgagttaaagcaaatatatgttgctgttacgcgaactaggcaaaggttgtggattttcgagaatgagctctcacatcccatgtgtgactattggaaggaacagaacattgttaaagttagagggcttgatcattgtctcatgaaggagatccaagttgcaagcagcttcgaagaatggaggtcccgaggcatgaaggttgttagaacatcatcatcaattatgctctactttcaactgttatttactttctttactattgcttttaggcttgaaattctacctttaatgttatttgtgttctcaatgcagttttttcatggacaaaattatgggtcagccagaatgtgctttggtagagcaggagatgaattatgggaaaaaagggctgaagcagccgagcttcgcacggttgctttgtgtatgagtggttcaaatagtaaactggttgatacatatctcagaagggctgctgaaatatttgaatccattagtctatatgaacaagctgcccaatcttattatgatgcaaaagaatacataaaagcaggtattttttatttactaaaatacacaaaaagatattgctaatctatttccttttaaatttcatttgggtactttctttgtgccttttgttgtggactagtagaaccaacatataggatatcattttataaattgttgtgaagttgtgatgataattggaatcaccctttcgttttgatggaaagctttccgatcgttttgccttgtgggctacacaagaaagctcttcaactgagattctatattagttttgaatgaattttattagcaatctttaaagtggtgttcttatttgttatacaaagatatccttcattactacttctgtgactgttttgtgtcttgtgacatttcatctctaattacaagtttagatccttaaaggctttatcatagaaatgtattctctaccttaaaatgttgacttaatcatatcatatgcaggtgaaatttatttaagaaaatgtgttaagtacgaagaagctggagaaagcttttttcgagcaggatggtataagcacgctgcttcagtatatgcaaaaggaaacttatttggtaactgtttggattgctgcattgaaggaaagatatttgagattggattgagctacatcatatcttggaaagaagatgcaactgtgaataattatgcaatagaagaaacttctcaggagtttttggagcatgctgcttgttattacatcaaactcaatgaccgaacctc

SEQ ID NO: 27324 - DNA, 2369 bp, Cannabis sativa
  modified_base (57)..(68): a, c, t, g, unknown or other
caacataaaatgttatttcagatctttattagtaagtaaatctaattatattgaaannnnnnnnnnnnagggcacaaaacccaacaccttgtcagcctttcatgctatcctattatgcaactcgatgggctaaggttatgtgaagcccgcggagatgtgtaagaagggatttggacgtgtcttttcttttttcaaagaattttggtcaaatgttcttctgatctctggagttcattcttgagtttagcctttgagggaagaattcaagcgcatttctctcggggagacttcagttgaaaacgcttcccgtttttggttacatgtatactcttgggttgattgactttggcaaatgaacataagatgttatagttgttagtagtcagacatatcataacctctaaatacgctgggaattttggactcaaattctctgtcattttcttggagactaacttgtgtttaatttccaaagaggagagttaagagtagttctgccctactttgggaagcaaactgcccttcgaggagagtttctcaaaagtgtgcatccactttcaggcttccttgagaagaaaccataggctcccgaacgaatacccagtttcatgattggtcctaaacaatcccttcatgacataacccttgtaggcgaacgtataggcctcttgcggcaccggaggcttttagtttcccggagggaaagtgggacttgtatccgtgcatgggcagttccctttatactgaggttttgcttgcaaacaccgaagggcaagacgttgttgggtgtacgaaagtcatgttgaatttttgcgacacaagcttcgaatttcgagaaggaaggctaaagttctataaaaattcaagcttagacttcacttgaaaacatcatgtggaaaacatcacatggagtagcacagacttcaagcaatccttccattctgggaaggagggttgaagacgtatcgtaagccttaagatctttcttgcacgaaaaataacgtgcatgtaagagtcaatttgaatttttatgcgtaagctttagattccgggaaggaaggctaaagttgtataaaaattcaagcttagacttcacttgaaaagatcaactggaaagcattacggggagtaggacagactttaagcaattcttccattctgagaagaagagttgaagacgtatcgtacccctagtgatctttcttgcaggaaaaataacgtgcatgcgagattcatgttgaattttaatgacataagcttcaacttctaggaaggaatgctgaagttgtataaaaattcaatcttggaattcgctttaaaagattaacaggaaagcatcatgagaagtaggacagactaaaagcaatccttccattccgggaaggagggttgaagatgtatcgtacccccagtgatctttcttgcacaagaaacaaccttcattcgagcgtcgtgttgaatttttatgaaacaatgttcgactttcgggaaggaaggctgaagctttataaaaattcaagcttagactttgcttgaaaagatcaacgggaaagcatcacgaggagcaggatagacttcaagcagtcctttcattccgataaggataattgaagacgtatcgtacccttagtgttctttcttgtacgaaaaacaatgtgcatgcgatagccatgttaaatttttatgacataagcttcaacttttaggaaggaaggctgaagacatattgtacccccagtgatctttctttcatgaaaaacaacgtgcatgcgagagtcatgttgaatttttatgaaaaaagcttttgcttctgagaaggaaggctgaagtcgtataaaaattcaagcttagacttcgcttgaaaaaatcaacgagaaagcatcacagggagtaggacagattttaagcaatctttccatttcgagaaggagggttgaaaaagtattgtacctccagtgatctttcttgcacaagaaacaacgtgcatgcgagagtcatgttgaattttttatgaaacaagctttagcttctgggaaggaaggctgaagttgtataaaaattaaagcttagactttgcttgaaaatatcaatgggaaagcatcacggagagtaggacatatgtcaagcaatccttctgttctagtaaggagagatgaagacgtatcgtaccccagtgttttttttttttttttgcatgaacaataatgtgcatgtgagagtcatgttgaatttttatgaaacaagcttcggcttccaggaaagaaggttaaagttggataaaagtccaagcttagactttgcttgaaaaagatcagagggaaatcatcactaggagtaggacagaattcaagcaatccttccattctggg

SEQ ID NO: 27325 - DNA, 1811 bp, Cannabis sativa
  modified_base (1766)..(1776): a, c, t, g, unknown or other
gggggcaaaaatgctaattagcctaaaatttatggcacaaaaaacctaattaacttaatagaattattgagactaactttcattcttttgtaattttgttttataagagctcaaagctaaattaaagtcaacaatgttaaacattgatacattaatggagttggtctaaaaatcacaatactttattgtgtgtttttgaataagagaattggtaaggctattcttatccactacttttgattgattcactcactagaatccaatcactacttgtttctttcacaaatatggaatgttctccttttgttagtggccaccacttggctttataatttgtcctactaactaatcttccacaaccaaattggcaaattaactatttttttcgttattaaatttttttagtatattacatgtcgattatttaagctatcaaactattatgagtacatactattatcaactatcgaaaaaacaaaaagatcaattattttcttattgtttatagttaatttatatttgttgcgaagttgattactcgttatttcttattgagatgataccttaaattgcactggaaaaatatgctaatgcaataaggtatattttttttcttctattatttggagagcgatacatgcacggggtgcatcaacccaaaggaaaggacaccatttgacctcaatgtttcaggcaattattttatatttttaatatttatattatcaattacctattttgtacaataaatattaaaatttaaatagttttatttaattttagaagattgttcaccaatgtggtagtctcattctagtttctcaatagttttatttagatagttttccttgtaattttagtgagtattgcaatatttccatcaaagatttagggcaatcgattcggtttcttctcgtactcgttgaacaaaatgctcggatgcgcaaaaatatttcggttattattggaattttttgttactacattatttcttgccaaatcctaaactttatcaaatgtgtttagaatttgttcataatataacattgagactataatttttttgtgaagattgatacattgatgtgtgttgtcccctgaaaatcacaatactttgttgtgtgtgtttgaataagagaattggctatggctattcttatccaatagccactaccactactttggattcatttgtttctttcacaattttgaaatattatttttaacacaaaattatgatagaatttattgtagttatagtaagaaacttatttttgaaaaatttagttttttttttttgtttatattagtaaaatgactattttgaacttatatttagacacgataaattatttataggggttcattgatgcaccccttatctgttttgacatttaggataattttttattattatagtaaaataaaagagtcgcgtgtaaaagactgtttgacccatgtgttcgtcgtgttaaaattttttgaatttctcaaaattttgtaggatgtctaatataactacaacgtaaataatcataaaaaaattagactaaaatattctctcaaataccgaaacatataggaagtgcatcagtaaatcctttttagagggtgcattataaaatttttctatgtatatatatagtgtttcttaatattaatttttcattactcttgttgtttgaaaatgaagggactatttacctttttgtaagattgaaagtgagatatcaagtgataacatgtgagagagagagagagagagnnnnnnnnnnngagagagagagagagagaatatactctataactta

SEQ ID NO: 27326 - DNA, 2794 bp, Cannabis sativa
tagggcataaaacccaacatgcctttcacacttcagtctatttaataaatagactctccatacccttgctgaaccagaaatcaccttatgaaatcctctatgctcgcaaacccgattatgcgtttctcaaaacctttggtgtagcgtgttttccgtgtcttcgtcattaccagtctcacaagtttcaattccattctatcaaatgcgtcaatctcggatatagtgactcctacaaaggctacaaatgtcttagtcccactggccgcatatacatatctcaagatgttgtcttcaatgaaatggcgtttcccttcaaaaccgattttctgaacaactataacacaccacaacctatcattattcactccacttcatggtccatacttcttattcattgcccttctccctcaccaagctctgtcacctcttcctcgactgatacatcgcctaaggcatctcctgcaacatcctctagcagcccccgtgctcagtctcccattgttcactatgactcacctagttctgtttcaagtcatgacagggacagtgatcaatatgcacatgacctgcaacatgaacacaacctgcaacaaatttcaaaccgtgttgagcctactggtgctgaaattgttcaagatatacctactgaacataatgctcctttaccttcacatcctatgatcacaagaggtaaagttggtatattcaagcctcgaacttttgtaagtcaaatgcaatccgaatccaccattactgaaccggttagtgttgttgaagctatcaaacatccaggctggtttaaagctatgaatttggagttctatgctctcaagtctaaaggaacacggattcttgtacctccttcagatgcatacaacttagttggaaataaatgggtttatagaattaagtttaatgctgatggtacagtaaatcgactcaaagctagactcgtggcaaagggattccaccaaaggcctggaatcaattatggtgagactttcagccccattatcaaggcagcaaccgtgcgaattatactaactatagttgtctctagaggatgggaaataaggtaactccacatcaacaacgcctttctaaacggtgaattggaagaagaagtttacatggctcaacctcaaggttttgaggagaaagggaaggaaaattttgtctgcaaattgcaaaaatcaatttatggtttaaaacaagctccaagagcttggtttgataaactaaaagagactttgacagcttgaaagtttcacagttcaaaggcatatacatcattgttcttctacaaagatgaaaaggtaattatacttgccttaatctatgtagatgacattattattacggaagagcaagctgcgcagtttcattactgaactaaataagaagttcaccttgaaagatattggacctttacaatactttcttggcattgaggcttaccgtgatgcttcaggtctttacttgacacaaacaagatacattgaagatattctaaaaaaaagtcaacatgaccaagatcaagacctgcccaaaactaatgactgtaggcaaaccgttgtcactcactgatgggaaacaaatggagaatcctactctttacaggagcaccgttggagcactccaatatttgtgtcatacacggcctgacattgcttacgtcgtgaacaaattaagtcaattcttgcaagctccaactaatactcattggaggggagtgaaacgtgtgttatgatatttgcagggtaccaaaacaaaaggtcttcacatcagctgcagtgccagacttagcattattggtttttcggatgccgactgggcttgctgtcctgatgacagaagatctgtggcaggttattgtgtttatttaggagacactcttgtgtcttggtcgtccaagaagcaagtcgttgtttcaagatcaagcactgaatcagaatatcgtgctttagctcatgtagctgctgaaatatcatggattgagtcgctattgaaagaacttaactttcctttcctgagtccatctgtgacatggtatgacaaccttagtgccagtgctcttgctgcaaatcccgtctttcatgctcgaacaaaacatatcgaaattgatgctcactatgttcgtgataaagtgttgcaaaaacagcttgagattcgatacattccctcacatgatcaaatagccgattgcttaaccaaaggcctatctccttctcgttttgccttccttgttgacaaactcggtgtgagaaactcaccctttcgtttgagaggggatgtcaaggaatagcatttcagccatgtattactacaccagcaatatacactgcaatcctcaccattatgttatgcctagtcattgtgtaatcattaggggaatatttaggctgaatattccagatctttattcttataattactgccaggtgtcatgcctaatgactgaattgtattctgaactttgctgtaaatgaattgctctggctcatacacaaaatgagctgagatttccatttgccttctcctttaaaatccaaacttgcccaattgcttttccaataaaatttgccacttgaaagtacaccatcgactacgaaaattgtgtgccgctaggtgccaccgaaagaaaagaacaatgaagtaaagtttgtttaagaagatcaaatctagtaggggtgcacacgggtcgggttttcggattttcggggtttcgggttcgggttttcgggcttcgggtcttggaaatgcacaaccgaacccggttttcgggtgtgcgggt

SEQ ID NO: 27327 - DNA, 936 bp, Cannabis sativa
ggacagttcaacaagctgctgaatctgttgcagctcccactatagcttcatcattagactcgaggtttcttagtggtctgaaagaggaaagagttgaagctgctaaagttttcaaatcaagtggtgttggtgacattcttactgagcaagaagtggacaagaaaaaattgattgatgatgtgaggcaagcactttatgcctccaaaatatgtagctatgctcagggaatgaacttgatacgcgtaaagagtgttgaaaaaggttgggacttgaaacttggtgagcttgcaagaatttggaagggtggttgcattatccgggctatttttcttgatcgtattaagaaagcctacgatagaatccctgaacttgcaaacttacttgtggatccagagttttccaaggaaataattgagcgacagcatgggtggcgaagagtagtttgcctcgccatcaaatcaggcattagcgttctaggcatgtcttctagtcttgcttactttgacacatacaggagggataggttgcctgctaatttggtccaagctcaacgagactactttggagctcatacatacgagaggaccgacataccaggatccttccataccgaatggtttaagattgctaagcagtcaaagatttaatttaagcctcctaccctatgagtaagaggtcataaggtgtttttgtgtttttcatatgcttatgaatttatatgtcgaagatgtctattgaactaggtgagttgtttgactaatttcttattatgcttcttgtaattgtacaaagtttgagtgctgtttttcttggtttctttagaagctaaacaatggcaccatcttgcagttaatgaaaaattgctctcagcatttgtcgtttgtgttgtgcatctctctctctctctcatcaaagtatgctatgtttgaaaactag

SEQ ID NO: 27328 - DNA, 2095 bp, Cannabis sativa
aaaaaatttaatagttttttttattaatttttttatgcattttaaattttattccattccattcctattctaattcccattcttatttctatatttttattcctcccaactcccaaccaaacaccacctagtactcacttttaacaaagttaacattttagagttgtattagagatgatctaataatataacccaataacttattttgataatatacatttttttagtaaggtataagttttaaaatagaaagggccaaggaaaaaaaaattatggcttttgaggacttaaaaaattactttgttgttaagaaagaaatgccaagataaacaaacaaggcttttgcttgtattgtttagataatttgcattttggcttttgcttcataaataccaaatcgctctacatatttatatttatatttatatttataaagttagttaaatattttgtgcctaattatgtttatgcttcctgaaattatgttggtatcaaaaaatttaacttgtatttaattacaacactaattacaaatgacagttggtagagagaaaattttaaccaagtttattgtcttttatttttctacctttactaaaaaattaaaataaaatattagtaaattctcaagtaatgaaacataatttagagttctagtgttttttatacggctgtgtacaaaaatattttgaatttatttaaaacaaaaacaatttatttagcattattttaaaataatgggagaaagtaattttagtatgtagcaacttttagaaatattaatactctacaatatcaacatcaaccatacaaagcaacaaacaaattatattacaaaattattaatggcaaacaaatcaaatataattgcagattttttttaataagttattagcaattgtgtcatcctaacaaataaatatttgttaccaagtattgtgtggctagtggtaagaatatttgtattgatatttttttacaatttaagaactcttgagatacatactaataatttaattaaaggaaaataaagtataaaattcttataattagcacatgtaaagaaaaataaggtataaattcttttaattagcacatagttcctaaaattgtttgaactactaaaaaatagaaaataatacgtacatgatcttattttttttttttaaaaaaaaaaacatttgttttggatatgaaaaattgcaaagtataattacaagagcgaatctagcttggacaaaagcaaagccactttccaaaatcaaccaattatgatagatatttaaggactaagatcatgatgatgatgatgattttaattgatattaacatttaaatttcctttatttgttatacagctagacatatcatattaattagtggaaactagatttttaattttacttgtttcttttcaaaatatatcacacaaattaacatatctcttctccactactcatgaatgattatcagatttgactaataacaaattatatcaaaatttaccatgaaattatttttgattctatctagatgcccaaattgtcctctattttgcatctacttgtgttagggcttatttggtccatttactatagtttttagttttattgtgtgacttttatttagctaatttattttcttaataatggttggttttccactactacaaaatcatcttttttcatcggtttacaactgacataatcgaatatagtgtcgattcttataatcaatgcatattcgatcaccataaatttgggagcaaatgcattggttacgaactaacggaagtgagcacacacattagtgtgtaacataatttcctagactgaagttaggccatatgtgtcatacaaatggtctttatactgtcaattacaatctaacacataaattttgataggaggaaaatttacattttcttagtgtccggttagttgacagaattattctttgcaactaggacccacaaatgcaaaggtccacttaatacacaatattttaattttaaaagacacatcactttgaaattgacaaaattgatatgaatcggtggacaaccgacacaatttaatagcattagttgtactcc

SEQ ID NO: 27329 - DNA, 2661 bp, Cannabis sativa
catgtatacaaagtatatacagtgacaatctcaattaatattaatatttaataataaaatttaattgggtcataaatttacaaaaacatgtaaaatgaaaagatattaccataaataaataaaaattaaaacataaataaattttactgccaatcaccctttcactttttacaaaaataaccttcgccaaatgaataaattactaagttgttactagtgctgcatggacagttccacgtacctaaaattagtgaaagggcattttggagaatgaaaatatgtgtaagaataagctagtttatcagttataatcgtggccacttaaaataaataaattattaattaaaataaagaacataagaagaccaatggtcatgactcatgagtcaccaatttttttagtgtattgaacaaatctccattaatttctgtcttagcctttaatttagaaaactttaaaactttgggttttgctttttgcaagtcattcatcaatctcaattattagtggtttttattggcttatttaaacctaattataattagaaatttaattgctttttcatacaattctatattagaaaattaaatttttaaaggattgcattgcagcccattaatagttgtccctggcttcacgggcctgcctggaggctgaaattttttgaataggacaataatgtccctataaaagtaataattaaaaattgtgcccaaatggattattttaaccattctaaattttataacaatgattagtagaagttaagctatcacgttcaattaaataaaaactagtttgattagtagatgacctttaattaaatattaaatatttaatataacttttttgaggtcttagtctctctctacctaagtaaactatgtcaagtttgaacatgtatggctacatttttctaacatggtattaatccatgtacctaaatttaggaataccttccaactgtcacaaaaaatacatgcaattgggtaacatgaaaagtctctcataattgagataatgcatgagggtaatttggtaattatgtgctttcttactataattatccacaaaaataaaaaagagataaattggaataaacgaattcattgacaagatgcaaaaagttattgaaattcaagtagtgggaatggttagcgtaagtttgaggcactaaaaagtggtttgtacacctgagaatccacgtggcatgaccgcgttgcttgtaaatgatccaacggcggaaaagtttgcttactaatcaacagctgtgacctacatatttatatttatttatttattctagtgaaagccaaattatattatgttttattttctaatttaaggtcatgtaattacattatatggaagatttagatatgttgttgggacttgggatttggtttgtttatgaacaatgataatcacttttttcttagctgttaagaagtgatgaagaatatataagtggtttttcttttctcacaagcaacttttattccctttaattttttttcttgtggtactgtttttcttcattgaatttgaatattccttttttgtgagtgttagttatttgttttacaactttttgcataatattagataaaaagccaaaactttactattctcttatttatgagcataggaaaaaaaaagaaagcaaaaacatataaagtgttgagaactttgtatgaaaattatggcatgattcaagcatgtaaagtgtaatgtttgttgggttgagacaaaataatgtatgtcatgagcaccataaaaaaaggctacacatctttgtaagatgttgcaccaatttaaggggcaaaaagattaataaaattatgatatattactattagggtaatcatataattatttgtgtaaatagataggtacagcaatttaatttcaaagaattgtacaataaaatattgttaccataatggtaagtaatggagggtagtttattatagccgtatagctttcatgggattcgaaattatctaaaactgaaaagatatatatggaaagaattaataccacgtaatatttatttttgctattaaaaaagaaatactaataagggaaaaaacattaacataattcacataatataaaggtaaaattatgtccaatgtcattaatgtttctcttgaggaagcatcaattgccattaaatcatatgacttggatttttctgaggattattttcctttaaaacacacatacatgtgtagtactgtgtttaattatatatttatatatttttgtgtatattattcccatgttatgttagtttacaagtcctattatatatatagatacatttgattttctcggttatcttacctccaattatagataaattattaagaaagtccaactcaacggttgtgatttaatcaattaatctccaaacaccagaacatgttaaggtccggccttaaggaaaattaagtcaaaacagagcattttaattattatatatagactgtactggatcgatattaattaataatacttcgataatatatataaggtaaaagaaagagtgctatatgaacaaatggaggatgttaagacgtcaatttcgaataaacgatgtgataataattttatagaatttatagcaaatcaaagggttttgggtggaatttcat

SEQ ID NO: 27330 - DNA, 1832 bp, Cannabis sativa
atatgtatatgtatatgtatatacgtaccatatgtacaccacatactcgatataaaataattattatactctggctttggcaactccagccattgattttttttttacaaaatagccacttgttatatcaatttttgttttatccttattaacaaaatattagcaatttatcttagtaaatcaccatccatttatatattttttttcttttataaatgaggacaaaacgtcaaaatgaaatattatatttgtggctctagatcttggtgtaaaagttaataaatagatatttttccttttataatatgtaatatatatattttactaacaactgtaaactctgatcagctaatattaattatgtagttagacgtgttattaggattttcgtgattggcttattttaattgattatgagtgatgataataataaataataataatttcatgttcacatagcacaaaggtaaatcatttatttaaataaggctttcttttttttaagaagtttttgcagctaaatttttttaattattattttatctacatttaattttttatgtttaaatttttaacggataaaaattttaaattactgaactgctagtaaatttaaaatgttattcggttaacggctaccataaattctgtgtatacactcttaacgcgtttatattgctacgtctaatattttattcaaaatttattttaaaattaaataaaattataaaaataaacaaaaaaaatatttaaaaataataaaaaaaaaattattctaaaatttggaaataatttttttttataatttttaaatataatattaggtgtgtactaatataaacgtgtcacttatataagagtatacacataaacattctatatatgttaaatttgaaaaaaaaaaaaaaatctactatctccaaattggtatttactctcttgtctcaccaattattttagtacacaatatttatatttatttaacatataataatttcgttaacaaactctaagctaaattaatacaggtaaaataagtatagataatgtgtcctaaaataattagtggggacagagaagacacaccaatttaagaataatagattttttttttttttggtgaaatttaagcttagaaggttgtgcaaatagaatgataattgggaggatttagtagcaaaaagtctatttaaattattagttttattttcttcttttctatttgtcgtttacgagctaatgatattttgttgttttgctgattaatttgcttttctttcattttttcaacgtatattacacacaacaaatcttattagtttgaacaaacaatacataatttaaagtgattatattaatgtattccaaatattcaatttaattaattaataacatggtttttgtttgtaggatcactatacctcaaaacttggcatttttgggcctatcttacagttctccaattgtagtttgtgctatgggccttacctttccatctttgtccttcttactttctatactcctcaggtaattattttcttaattatatataactcaaattaaataattaaagtttgaattttaattgttgtaattaattacagaacaacaaaagtaaattggagaagtaggagcttccaaacaaaagtatgtggtacaatagtatcattggttggagcaacaatggtggaattgtatatgggcccacttataaaacactcttcttcatctctacatgtaccaatgcttttggcagccaagaaatttttaatattttcttcaaataatacacagtattgggttcttggtggccttttattagcagctgctaa

SEQ ID NO: 27331 - DNA, 2670 bp, Cannabis sativa
tacacaatttattttttatatataatttaaaattttatatatccgccgcgaagcgcggaatatttactagtatatatatatatatataaaaaaggggattacataaaatgtgacatgaacaggacattttgccacctataaatttaaccacattaattagttgaaataaaaaaataaaaaaaaaaacgaaacatgtaaattaacagttaggggtaaaacaaaaatcaattaatcttatttttttctttcttcgaattaatcgaaattttactttctttctgatttctgacctcaaacccctaaagtttcgatcgctttcttctcatccaaacacccgaatcgagcttaattttgtggaaagtgagataaaaatgttggaagaggtgtgaagaagaagaagaagaagagaagcatatagttgttggagttgagttgagtgatggcggaggaggggagttcggagaggagcgagatcaatggtggattgccgtccatggattccacggagtcgcgatgggttttccaggatgaggacgattcggagttcgatgtggatgaggattacgacaatgcacgccaccgggcggtgttggattcggaggacgaagaggacgatgataatgcggaacagaggttgattcgtactggtcctcgtgtcgattcctttgatgttgaagctctcgaggtccctggtgctcagcgaaacgagtatgaggtatgtgcacaccaacaccaacacgaatatatatataaatatattttcgtgtgtatattattcaatgagcttgtgcaatgcattgtggtattgatattagtggatgtgcccctttcggaattcgtttctttacttagtttagtagtttttttgttctgttgtcgaaaatgggtaaatctatgggtttgaaactctgaattttgatttacttcacctggatagtttcgtagatggaaagatggcgagagtgtgtgtgtgcgtgattgattaataattttgttttcagtgagcttgaaattctccttggtatctatctaaattgagggaaaacattttgttgaaactgttaattttggaacttctgttgtgggaatgatcaggtgtattttatttcgagtgattggagttgaccaattttttgtaggagagatcaagcatttattatgcctttgactatacaagatctagaaattgtagatattggaatatattctaggaaacgattatgagaagaatctctgagtctatgtcccatcattctatgaactagtgtggaaaagcctaaatcaataagccaataaccagtgcaaaacttaagtttaggtcttttcctaatttgaaatcttagaaaagattaggaaaggatatttatttgataattactgtttgagttgatcaaatatttttttattgaaattcttgaatgtttaatataaattttttgaggattcccttatagaaagttgaatatgttacaacattggtgctgaaattctctttccctttatgttttgtgatggaatatactgaaaaaaaaaatgggtgtagaaggacatctctttttgatatagtatattcacttgcaggacttcagtatgggaaagaaaataatacttgcctttcaaacccttggtgttgtctttggtgatgttggaacaagtccattgtatacgttcagtgtgatgtttagtaaggcacctattgatgggaatgaggatattcttggagcattatcactagttctatacaccttaatcttgatccccttaatcaaatatgtcttagttgttcttttggccaatgatgacggtgaaggtatgatgaattttcagatcatcccagttattttaatctatacaaatgcagaaatgaacctatataccttttgtggttttaatttgaacgtacgaatataatattatatatgaaagctatttgacggtataatgtgttccaggtggtacttttgcattgtactcattgatctgtcggcatgcaaaggtcagtcttcttccaaaccaacttccatcagatgctcgtatatctagcttcaggctcaaggttccctcacctgagcttgaaagatctttaaagattaaagaaaggcttgaggcttcactgactttgaaaaagcttctcttgacgctggttcttgctggtacttctatggtgattgctgatggcgttgttacaccagcgatgtcaggtgtttgtatacctatctttatatttgctattgatttttcaatgagttatcaaaataaatgaattctgttttaggtctataatagatattgttagtgatcatttcgcataaaaatgttgattgggtaatcattctcacagtttgttgtggaccgtgttattgttgtttctttatgcagtggtgtcagctgttggtggtctaaaggttggagtggatgccataaatcacggtatttcatcctctttattgaccaagcacttcttttataaagaattattatattttcctgttggatttcaagttgttatcaactgcaaagtagatttttcttttaacaattacctatttggagtttgacctgttttagttatctattttctaattttttaaaacatagagacaaaacttgttttaatatgacataagaaaaaagaaaatagaaaaagaaacattcaaacacttaaggatt

SEQ ID NO: 27332 - DNA, 1575 bp, Cannabis sativa
aattggcattgcatggttgagttacttcattttggtgcaacatctttcttaataaaaaatagttctgaaattacaaacatttcgaagacttatcaaagagaatttactgatgcagttatggaacgggagcaattatggcagtaccagcacatgacactcgtgactatgagtttgcttcaaaatatgacatccccattcgttgggttgtgacaccagatgatgaaaaaattggtgattctggaaaagcttttccaggtgaaggggtggttataaattctatgagttcgaaatttggacttgatatcaatgggctgtccagcaaagaagctgcttccaaagtaattgagtgggctgagaaaaatggaaaaggaaagaaacaggtggtttgttaataaacagaagtttatttcattcaactctggctccaatagataatatatggtttatttgcctcaaatctttaggtgaactataagctgagggattggctctttgctcggcaacgctattggggagaacctattcctgttatcttcttggatataagtggtgaaagtgttcccctttctgaaactgaattgccccttatactacctgagttggatgattttactccgaccggaacaggggaacctccactctcaaaagcaaagtcttgggtatgcctattccatatgcatttcttttagtttctgtttgatgtcctactgaagaaagagatttgcattttataactttatatgttgtaatacatgcaaattttttgaattagctgctcaataacaagacattttatttttttctgagtgccttcagaattgaaattcatagacttctatcacttattttcaggttaaaaccacagatcctttatctggaaaacctgctcaacgagaaacaagtacaatgccacagtgggctggttcttgctggtagtgtttccttttccaactattagtagctagccctttcttttacttaaatgtaacacattaagcctcaatccttatgtgtctctatgaagggttcattgcatctaattgcttcttgaagttcataatccgtcttaggcaccgattagattgtcaaaatagactttgtctctctatatgactacaactagcttcaagaatctatacctttacttgcatttgtcattttgttgaatttcactccttgtgctggagatgactagaattgaaggggtgtttcttcaaagagttaatcctttttaggtactcatggattggttgtggcttgaaatacttggaactcgagtaatacgtgaatttgctctttcatattcatttgtaggtactatttgagattcatggacccaagtaattcaaaagaattggttgcgaagtcaaaggaaaagtgagtatttatttttcttcttttgacataatagttctttaaaagacatcaatttataggatctttttttaaattttccctcttcatttttaatcttttttatttttgcaggtactggggtccagttgatgtgtatgttggtggtgctgaacatgctgttctccatttgctttatgctagattttggcacaaggttca

SEQ ID NO: 27333 - DNA, 1481 bp, Cannabis sativa
tcagaagagatttgatacatgagctctactcacgtaaatgtgtgtactgtctttattgttgtgattgggcctttgtggatgccatggggatcgacctattccaggccaatttcctacatttctcgcaacatgttgtggaattttttggcttccaagtcgtgtttgcctggcatctatattcatatgagaagactctggtacttcaggttgtacattctcttggtttgtaaatccatggaaaattcttggatcgtcatgtcgaattttctgatttcttgtatttccaagatttgtgggtttcctccatccattgggatatctctcacattcccaggttgtttttcctaagtttctaagggattcccttagttgtttccttgtctcctagttttggagcctcggggcctcctccgtggtcgtcttgcagatgtgacagattgattttgaggggcctctccttgtgtagcccttgttgttgctgcctcacgctctaatttggcgttccttcgatttgattcgaccaggcattgccaaagtttcttattttccaattccactagtagaatatatctggttggataataagcatcctcgcttcgtctttctaggatatgttccacagcttgatcaaagtctccatcgttgcttccagaacgaggagtctcaacagttttcgtccttcgtgaagcttaaagctcctttcctggacgatgggttgtctcttctggatgattctcatcgttacgtggagtatcgtctgccatgagtgtgattcaaggttgtatttttaaggaaggtatcttttttgagtgttattacaaacgctctcaatgaaagcaccaaactgttaacaaagatttttgttaactaaataattagcatttttgtaataaataaaatgcagaattaattattataattaattatctaaaaagaaataaatgataagaagttttttacgtagttttgaagttaaatcttcatagtccacgaatccatctttttaaagattgatgtgtttgtatacaaaatataataatactgatttttcaagaataaataatggcaatattatctattttgccccaagaatgatcgtcctctgttcccagggttctgtccctgtttatagatctatagggtaacagttattcccttgggatctaatcattcgtaactgctcatgaaacgtggacatctcccatgtttcatctatgtgtacatgggataataatgaataatcgcctaaccgctctttgtctttaactatagacggttatgctaactgtgcgcaattgtttttgttgtttgaatgatatctttcttaaatatcgttacacaaaaatgctaaagtgttgagctatgatgcatctctcagccatccttaaccgttgaaagaggtattagcgaggtggttacttcaatgcgttaagagcgaggtgagtgaatgttgaagttcttatcattcattgaacatactc

SEQ ID NO: 27334 - DNA, 2774 bp, Cannabis sativa
ttatagtgtgttagcccaagataggtgtccaagagagggtgaatttaaaacttaaattaatttcaaaaaatttaaaatcccaaaggcaatttatttactataatgctattaattattataattcattaacttttacacaactttatcttttttaattaccatataactattattattattattattattattattattattagttgaatatgcatttatgaaaaacaaaaaaaaaaaaataaccaaacatagtcttgtcgtttgacatggtgagaaatcttctctaattctttctgttcttagtgtttttctattgaatatggcatcaagtatttattctgtcaaggatttagagaacccctgtgctaataaagaaattgaaggggaggatgatgttgtctctatgtttgacgttggggatcctgaggtccaagttgctgatgtccaactgtgtattgttgggcattttctcattgccaatgcgattgattatgatgtaatgcgccgtatgatggcctctttatggcatccgggtagaggtatgtatgtaaagcaattagagccaaaccgtttcttattctaattttatcatgaacttaatctggaacatgtcatagaagggagtctatggactttcaaccatatacagttcatctttgcacgtctaaagccaagagattatccacggtcagtgactattaagattcttgatatatgggttcaagtttatggccttcaatatggcttcaaatcggaattagttattcaaagggctggtaactacataggtgcgtttgtcgagtctgatcctaagaacttccgaggtatatggagagattatttacgtgtacgtgttgccttggatgttactactccattgaagcgtagaatgaagctacgatgcaccacaggagatgagggtttatgggccatgtttaaatatgagtaccttcccacattttattttatattcgagattcttagtcactctgagaagttatgtccacagcggttcaatactcccacggatcaaattgtccaaccttatggcatctggataagggcccaacctcgtcgtcgacaccatctcatcggaagccagtggctgagaaatggtgaagaagatgattcattgccttttggttggtcaactggcagtgtgaaaaggaaaaagtctaccaatcaacgtcctatgattgagcaattgagtgcgagaaattggggtgcttcaattcagtatcaagctaataatagtaagtcaaagggagttatgggggctgaggaaattgtgggaaatataggtggggagtttttcaactctgaagaagctatccacgtggatatattagaggaggaactagaggactatttgattcttgatcctaaacgacgccatactaagtttgggattgtgattgggcctattgattcagttcaatctgaattacgaccatctaattatcgtgggcctacatttaaagtgatggaagaagatggtactgtttctattaggcatgacaccagctctgtgttaggctcaaaaaacaatttattggtaggttctggtactcaagcccaccgcttaccatgagtatattaagctagaattgtcgtgggtttgagaacccatgggttttttcaattccttgtggatcttgtgatccaaaagaaacccaatgtcttatttctttgtgaaactctaagtcatggtgatgtgctagaaaggcttcgtgtgaagttgggctttgagggcttgtattctatggatgtcaggggtcatagtaggggtattgccatgttttggaggaacagtgcaaaggcctaactactacaattttcttttaatttcattgtcatccaagttactaagcctagctctatcccgtggagactaacgggcctttatggtgagcccaacagaggtcaacgccaacaaacttggaatctcattcgaaatctgaaacagtcttcggctctccccttgtgtatcataggggacttgaacaatgtgactagttaagcagatatgtgaggaggtaacaactatccttaggcgttaaatgatggctttaatcaaacacttatcgattgtaaccttgttgatctttttcttcttggctatccgtttacatgggagcgaggacggggtacatcaaattggattgaagtacgtctcgatcgtgccttggtgagtcattgctggtctgattatttcacatctgctcagcttcttaaccttgaaatttctgcctcgaaccactgcccattacatcttcaccctactgtccaaaatttctttgtccttgtttgccacttcaagtttgagaacgcatggttcgtgagcctttatgcttccaggtggttaaggatatttgggagcttcatgccgactaaaatatcatggaaagacttcgtatttgtggcaaaaagatgactgtctggggtcgtgattacacgggtaactacaaggaacgaattacaaattgtaaaaaagaaataagaaggtggaagaaaggtcttgatgaagtttcaatacaaaagttttgtgatgttgagaagctgttaagtgaaaatatgaatcaacgtgaagtcttttagcgctaaaggtctaaacaactttggcttcgccagggtgaccaaaatagaaagttcctccatgccaaagcgacagcacggagtaaacataataacatacaaagtcttcaagataactcaggtacttgggtaaattgggatttgtgtcttgctgttgtaattgtgaattattttcagac

SEQ ID NO: 27335 - DNA, 1983 bp, Cannabis sativa
ttttatgttcattagatttagagaaatcaattacataaaatgttaggttgtattaaatggtttaataacctgataatccacaccaagtgaattatttaaaagttagtcacataattaaccaatatttttcaaaatatgatattttcgaaagtcacaaattaatatggtattaattaaattattttcaagtctatgttatagtaatttaattaatgtattacaacttggttaaagattaaaattaatttttcaaaagagattttaataaagacaaatacattttaaaatagtgagtgtgagagggttgtcatttgttatgaaacccacgatcttcattattagtccaacaccaagtgtatgggggagggtaccttctgacgattttattttcgtccccctaaggaaggtgttgtgccatacattgtcaaggtttgcttcctttatggatggggaaaagtgatgtattttagtgccatacagacccttaaggtggcgctactaaattaagtcatggaacccaaaataatggattatacttacaaagtcatgtttctgcctttgacactaggggacataacatgaccaaataaacactactttattttgtaaggaaattaagagttattttagttacaattaataaagacaagaataagttttgtagattattcgatattaatttatccgatcctaaggcagaattgtgaaatttctaaattgttttatgtatttttctaagtcatgcatcatatttagattctaaacttgatatttatttttcattgatggtgcttatattgtattaatatcaagatctggcaggccataccctgggaaagggtatgctcaacgtcggcgagtcccagacttagcatctggctttggtcggctagccctgggcaaggcaactggccattgccggcttgccctaccctggatagttgctcatcaccggctagctctatgttgggcaatgtctggtcgcccattctctcttgattggttggtgcagcctttgtgttgacagggcgtaggtcacaccaattgctggagtttggtggatctaactgcctgaagtgattgtattcacttatcgagttattgttttcttgggtgtttccacttgtgcctgggcctagttgcttaaagattggcatttggatgacttgcccccgaatgtttcggggagaaagttcaccctgttggccgactagaggtgcaccactaaagggttggccggccaaagtttggccaagtgggggtgttgttgagctagagatccctagtcagccccccaagccactggtttacaaagtttggttaatccagccactagatctgtgtggcaagacttgtccaccttcgggtagggggatgtccatcctggttcctacaaaacctagttggactgtttgtcactagaccttgcccgatttatgaactagtctctcttagagaggatctctaatcagatcatgacctctctcgacagttctattgaactgccttatcaggtcactgtcttctctgttgtggcaatctaactttgcctgatgagatcagaggatgtactcgtggtcatccatccatcttaaaaattagcatctttattgtgcaaatgcatcgcaactaacagcgcatagttctttagtttggccaacatggtagacagcctctttaattctagccaaaccaaaattttctcctaaatctacgtgaggcttgccaattcctggccccatttccccaacataatatcataaaccagagtcagttgaggtgccagggggttgctccacattggccaaaccctcagtacaaggagccaatggtggatctaccttgggcgacataggctagtcattggaaccaaccaagttagtagtgtcgacttgaccagttgtattggtcaagtttgttatgcctgtcgagcaggcagggttgggcacatttgtcagatttgtggagattctagttgtggct

SEQ ID NO: 27336 - DNA, 1540 bp, Cannabis sativa
  modified_base (1252)..(1252): a, c, t, g, unknown or other
gggtccgccgctaatcccccgccgctaatagctctatataaaccccatcagaccatactttcctattttttccttcttctcttcaaatcccaaaccctaataccccactttccccatattcaaccaccatccagacggcgccggacgtcccaaccgcgactaaagtgcgattttggtgaccacaatcctcacggcactgtctctctacaccgattttggtgaccaacacaggtacggaacctaaactttcccatttttctatccgatttatggtttttatttgtgttttaatttttttttggtcttgtttgtgatttattttcctctcaaacatgtataatgtttgtggatgagattgccgaaaaaattgtgggaaaaatttctagattatatatgtatatatattttttattgtggtttgtatatttttgatttataatatctgtgtatatatttatatctagatccaatttttttttttttttttgttttatatctgtatatatattgttcatttgggtatatatattaatatgtgtatatatatattttatttaggtatatatatattaatttgtgtatatatatatttgatttgggtatgtatataatataatctgtgtatatatatttgatttgggtgtgtatataatataatctgtgtatatctatatattttatttagttatatttttaaaatataatgtattatttgtgtattatatatataatatatgttgtttttgtttatatatgtgtatatttaatatatatagttttggtgattgtatatactaaataaatatattttgtaaagtttacaaacatattttattgttgtattattttttacttttttaatttattttgtgtcattgaaagtatttctttttgttattttcagattaagtaaaaggatcaagaaagtggacacacaatttcttttgtgaactgtatgtatttattaatgtctattttttgttgttatattataagttttatttgatttaattaattttactgggtatgttaactatgtaatattatcataataaagtgagaatagtgagaaaattatcaagtataattttaggtagtaagttttgtaatttgttattttttaaataaaaaaaaaagtgagaataatgaaaaattaaaaaagtataatataatgtaataatttaaatattgaaaattagaaagttaaataaaagagattttttaattttaatataaattgtaattaaatgantaaacttttatgtaagtttttaagaaaaaacatgttaatgaaattttctgttgttataattttattattgtaaaaaattgagaataaaaatagaattaaaaaattataatttaatataaatttattttataaagataaatttttaattttataaaataaataaaaaaattagtttcaatttgaataaattatataaatttttaaataatatattttgtttaaaataaataattcataaagaagaatttatttattttttttaatttaaatataattggtaattaaatg

SEQ ID NO: 27337 - DNA, 1928 bp, Cannabis sativa
  modified_base (1815)..(1817): a, c, t, g, unknown or other
ataagatagatcaagacatgcttgagctaaaggtgtcaaaccaatttcagttatatgtccatgttttctctcaactccaccattttgttcattagtatgaggacaaggttgtttgaacactatgccttggtcagctaattttttttcaaaaggcctatactctcctccccatcagcttgaacagctttaattggtaagttaaattgtttttctacaagacttttaaacttgataaaagtttcaaaagcttgagacttcatagtgagaggaaaaatctaagaaaatgtactataatcatctacaaacacaatgtagtatttgtaattttctttggatgaaatatgggaaggaccccataaatcagtgtgcaccagtgcaagaggttgattagctctggattgagacaatggatatggtagtctatgactttttcctaactgacatgctttgtaaaattttagattcttaaggaaacaaggtatattggctttatttaaaatcttactgagagtgtgagaagctggatggccaagtttattatgctaattatttatgtcattatcagtttgtgaaagcataacagtaggatttaagacatcagaatagacaatagatggccctctattattctgttcagtacaagaaaaggttgaagtatcaacctgagtacaacaatgattacaagacttagaatgactcaacttagacttggattgaatgtctgaagttgtaagatgcacctgcagagctttattggaaagactcgagctatcatctcctaggtgatagagaccatctttgattttccttttaagcaagactgcaccctttttcttgtccttaacacactttatgaaattctaagaaaacatcattgtcattactaagtttggatacactaatcaagctttttagttatggaaggaatttacaaaactgaattcaaatgtaaagaatgagaatttgaggaaagagtagctgtaccaatgttagaaatgacaaatttcttaccattagcaacaacaactgtttcttgaccagtgtagggagtgacatactcaagattgtccatggagtgtgcaatatgattggttgcacctgaatccacataccacccaacatcatcacaaaaatctagcacaatttgagcaacaaaggcttgaggatcgtagtcaagagactgctctgtgagattggcttgtggctgagtagtagaagtttttggagtatcccaatttcgatcaaacctgtagtggcaagtgacaacatcatgcgcaaatctcctcatgcacacttgacaaagaggaggtctgttattgttggtaggtcgagatccatttcctcaatttaggaatcttggcacattttcagaaccttgacctcttctagagccattaaaaggtctgtatgtaccacttcttgatcccagggtaagattggatgccttttttgttgaaagatccaagacagtggagtgtctttccaatcttgactcgcgagacatcaagagagcttgaacttcttcaagtgaaagagtttcacttcgagaggtaatattggacacaacagagtcaaactcgggaccaagtccattaattaggtgtaaaatgagatcaaaatcatttacatgatgtccagcgataaccaaagaatcacacacggatttgatcttgtcaacataatcagaagtagacaaattacctttctgcagatttgttaactggcttttgagttgaaggagtcttgccttggactgacttacaaatttctgttccaaagcctttcaaacggaattcgatgtggggtagcaagcannngtggccaagattccttcagtcattgaagatcagagccaggacaacaatagttgatctttgcgatgccattgcaagaacaggggattgtcatcgctattgatgagttttgaa

SEQ ID NO: 27338 - DNA, 3057 bp, Cannabis sativa
  modified_base (32)..(59): a, c, t, g, unknown or other
  modified_base (107)..(135): a, c, t, g, unknown or other
  modified_base (2768)..(2783): a, c, t, g, unknown or other
atatgttctggacttaaataaaattcatacannnnnnnnnnnnnnnnnnnnnnnnnnnngtgaaccatgcaacataaaattatatttctaatctttattaataagtnnnnnnnnnnnnnnnnnnnnnnnnnnnnnttagggcacaaaatccaacaaagtggactaccacctcagcaccccgaacgtccttctcaatccgagagggaaggtgtatacacatacctaaatagaggatgtgtatctaacctatttcgaaggagaaggccgatacaagacgaggcaagctttagctcaggacactcaaggtatcgaggacacagtcgatcaggaaggcaaacgcaagaaggaagcagatctcaacgttatgctgagcaagaaagcatgagcaatatgagaagttatcaatttgagagttactcagatacgagatctgtgagcaattatgaacgaagacaacctgatctttgtgagcatttgaatcgaagacattccgatcttcgagagcgactaaattagaatgcaccttacttaagccatcaacttaatgctaaccaacaacaaatggaccccattcaactgcgaatcattgagttggaggctaaatttagaaaatactaggagagggagcatgagaaattacctggctatgactgggatggggaaaccgagccatttcatcctgatattatgaattctgaattccctcatgaaatgaaaaatccacatgtctcggagtatgacaggactacggacccagtcgctcatctaaataacttcaataccataatgcgagccaacaatgtctcgaataatctgcaatgcattttattcctaacatcattattgactggggcaacaagtagctggtttgataaattcactcaccattcaataacttcttttgaacagctgtctaaggacttaggaaacaattttaagttgcgagggataggcgactagaagcatcatccctaactaacataaagcaacaactaggcgagtcgcttaaggcttacctgagttgcttcagcactgccgctgcaaaggttaggaacttgaatgacagtattcagcttactgctttttaagcagggatcacaaccgacctttcaacagttaggggtgagttgtgggatgacatacagggtcgcccagtaagaaacattaatgaattcaacgaaagtgcgcaagtgtttatgcgcaaagaggaagcaaggaatgagatgaagttgatgaagactggctcgggaaacaaacccagcacaagtactgccacaacaagtaccgtctcgatgaaggttgataatccaagtggttcaaacaccaaaagaaaagatgactcgagagaatcatctaaaaataagaagcagaaaaagcacaacaaatatgtgccaatttatgaaactcatgaaaacatctttctcacaaatgagcacagggttgcattccgcaaacctgagccaatgagacatgcgagacataaacgagatctaacaagatttcgtcgatttcataaagacatagggcatactaccgaagagtgtcgccaactaaaggacgagatagagagtctgatctcgcatggatatttcaaacaatatgtgaaacatcaagggaaccagccaaaccagcccaataagcccaacaacacaaataaccaaagattgaaacctcccttgttgagggcgaggatatattggttatctcgggagggtcgcatctcgctggagagagtaataatgccctgaaaagaaatgtcaatgaaatcaaaaacgagcaatcggtgtttgctccagaacaactgaaaaaagccaaaacagaagaacctccaatcatattctcgaaggaagatacaaaacacgtgaggtatccacatgtcgatcctctcgtcattttgaaatgttaagattttattttatttttattattaatgtaattatttatttaatttttaaaaaataaattgtcgttttaattgttacttacttaaaaaggaagagagagaaaaaaatgttaaaagtatgaaattgtaacaataaatttcataaaaaaagaaatgtagtaatacaaaaagataaatcaagttgtcaaagctaagtaaaaaataaatttcgtaatacaaaaacacgttgaagaagtgttattgtttttcatattccaattaggtcaatcttttgttattttttttgttgttttgtagttgtttttttttttttttttttgaagttatttgttaagttgttctataattttttttagttgtcttagttgttttaaagttattttttattttattagtatttttgtaattttgaaactgtaatacagtatttttaaaaacttgatagaataaaaataaaaaaataataaattgtaagatccctaataacatgtggtgctaaacttgtccgggctagacccaattaatttgataataagaagtaaattagtccacccgatacaaaccacaattttcggcttcaataaggcccaaacattcaaaagccaaaaatgggccatactacctttcgagcccattaaatcttcagtgaaaagggttatttacacataacaatgcatgtggtagtaaagtcatttgggctagaaccaattaattagataataagatgtaagatgattttaaatttaaaaactaagttagtaaatgttttattttttaaaaattaaaaaaatatttaaatataaaaaattagttaataaaaattataaaaatatatttattacatattatttttttaaaaaaatannnnnnnnnnnnnnnntaaattatataatttttttagtattgtatattattatattgtaataaaaacaaataaatatattagattattaaatatgtataacagtatttgatatatcgtatcattgaaaattaatataccgtaataaactataaggtattttgtgtgatagcaatatattagtccaaagattgacctattgtttgacacagttttgttgtcaatatttgattgctacaccaagagtaccgcttacagttaatattactgttcaaagacttgatattaatgt

SEQ ID NO: 27339 - DNA, 2543 bp, Cannabis sativa
actttatatgtgcttatttacattattttagagattcatatttaggatgttaaataacatacataaaagtaaatctagatcctggtaaaacataatcaaacagaggatgccagtggtctgtcatctctccagggtgttggctggccagatctgagcttttagggatgagagttaatacggggagtgtttcaagaccatgtgcgttcatttactgtaccttcttcaggtggtcgagggtgtaggccttcagtcttgagaatacctttgaccaagaccctcctgacctctggccagatcttggggggcaatcaggcgaccttcctttttctttcctcgcacgggcccttctttgttataggcttgtgccgatgaccaccgtgcatggttctttctttcttcagctctcaatgaaagtcccaaaatgtttactgattttttcggcaaccgggtatttttagagcttaagaaagaaaaaatggaataaataaccaaataacaaataagagattattacgttgtttgggcgttaactattcttaatccacaagtctatttcattaggcacatcggccggtaacagtttttacaagtagagatacaatggattgaaactccttttttccccgtgtttcccttgaagaagaggaagcttagtagaaatattctgaagtttttgaggtgtaatactatctggtttgatacaaatgtgtttgcctagaatggtgaagaatgagtcttgtccaaaaaaaaaagtgtctcttttcttctcttgtgctttgtaggggtatttataggccaacttctcttcatgtgttggcttggattgatcatctttgggcgaaatccgaccgttggattggtaggtgacatttttcccatatgccagcgtgtcagatcgtacaggctgggcctcatactcgtgtcatcccagggcttttcctttttaaatttttcttatccctagtcgttggatcatttggtcaggtacataaaaacacacatgctctgtacgatagcatgtcgtgggagacaacctctgacgtcgtacctgaaaaagtctggtcactaagtctgtagtctaacacgtacaggcagagtctccacgagctaagagtgtagcccggttcagctcatctcaaaatgccttggtccttttggaaaaacccatactcttctctagagttgatggctttggttcctgggagtgaggaagactttggctcacggatacccttcgcgttgccagcagtcaggaaactccccatcacggaagccctttccgtgagtttggggcctctatcatcccggagtatcaattgatcgactaaggacctcttaacctctattgattgcaatccacgtgttgcgattacaaagatacgaataacaataagtgttgctattagtaattattatttagtttaaaatataattttttttatcaacattttatatatatttaacagagcaatatttttatatttaagtgtgtttaattataaaaataaataatttagcaatacttttttttattaaatattgttaaataagtgtcattaaataatatttttatagtagtaggatgcaaagtattactagtagtctattatagtttagttaagaggttttttttttcaaaatacacacatttataatttttaagacatttgatttttttagatatataatatatatatatgaaatatttttcaatgggtattactagttggtgattactaaataaatttaattataaatattaattttaaaaatattaactcattaatttaatctaatcaccaataataaaagaaaattttgaaattttatgtttaatttagttacttaataaaaaaaatataaaaaaatacatattcttttacactatatcaaaaatatgtttatatacaaatatttaagttaaactcaattttttttatctttactttgcttttgctgaaaaactttttttcttgatttttttttagccaaagaaataacctctacccatataatataagaacgagaaatttttctaattagatattaaatataaaatcacaaattttcctaatactctccatgcctgggtaatactcgttaaaaacacctaatacatatatacactatacttaaaaggttgtttagttttataagttgaccatttattatttgcaatcattgttaatattaataaattgtgatattgtcttttttgtgattctgaaaatgcaagggcgagaattgcagaaacaactacaatgtttcccctaccatgttacaattctattccgttatttacaaaccaacaggctcctatgccatcggttacagaccggtggaataggattgactggaactgaaaccctattcaatcggttccaatccgatgcatgcagctccctaatttgtcggataataataaccgacccggaagaaaggccccacataagcgtcggttttaagggtcgacgggaaaaacaacgcaatcggtctaaaatccactgaaaaagtactttttaatttttagtagtgaatatctt

SEQ ID NO: 27340 - DNA, 2344 bp, Cannabis sativa
gttaaaccaagaaatgccgttagatacttagatagacacttttttaatatataaagatatgtggccaaatttatggaaaatccaaaaattgggttgctgaaataatatcttgattaattgggaatagcccaacacagcaaagcattcattctgtttttttatttttattttttaaaaaaagaaaaaattatgagagaaaaaaaaatataaattaatacaaagattattacaaattttaattttgttccaaaatggtgatgatcaacgcaatcttttttttttttttaaatttagatctctcaatcattataaataattttcactggcattcttgatgaataaccaattcacatgtatacttttatgtgtttggttaatcaccacaaatatgatatatttattgctttaacttttcttcacaaaataaggtcaccctaaaaattataataattttacatttttatttaatttttgtttattttgttttataatacaattgtgtatctcttattagtttcttctattgtattttttctaaaacatctttccaataattataattttactgtaactttgtaattcaaaatcatgtttgtaaaatttttatgtgttagtcatataattttgtaatataaagaataaatttcgtatagttaaaaatattcttaatacttaaaaataagaataaaaaaacttttactcaagttatgacatttgtggagtaattttgtccctcttgaattacattttttcttatttttgcaactttagatgcgacttatatagagagaagaggtcattgaaacatatttaaatatttacatatggatttataaaaaatttctctcaaactatataaataattgcaaattactctatcagttacatttcattcattttaaaaataatttcttaatgtaagactaatttaggactaatctactgtaattcaaaaatccatacaaaaaataattacataaatagtactcatttaacaataaaatttagattgcgtatccgtattttaagagttagtatttgaatgttagcgtcattatagttttagctattttaaattagttaaatatgttgaattttcttgaacaaactaagaaatattttgctaaaaaagataaagttgaaatgacaacacttttttaattttttaatgaccatggagtataagggttaagaaaaatataaaggaggacattatgaaaatgtatcatattgtctcaagactaaggacactttagattgagttttttgatgatgtacttgtgctcatatatttgttaacacttcctccacagtttaacaaatttaaaattagttacaactgtcaaaaggagaaatagactctcaatgagcttacttctcattgtgcgcaagagtttgaaatgtggaaaaagaacaaaactaaaagagctcacttggccactgtccctaagaataagggcaagaaaataagggcaagaaaaagaaatttgagaatgaagctgctaagggtccagttcaaaagaaacaacaacatagtccatcactgaatgatccctctctatccacttgggatcgatgcaatagtgatgtcatggattcttcaatctgtgtctcgtgaaattggtgctaacatcatgttcaaaactactgcccgtgaaatgtggaccaaccttcacgatcgtttcaattagagtaacgaccctcgtattctccaacttaagatctctattaacaatgttaaacaaggtgataactcagtcactacttatttcacccagttataagccgtctaggatgaactcaacgagtatcaaccaaatactccttgcacttatggtgatatgcaaaaagttcaagattactacaccagagaccagattcttcagttcttgattggtctcaatggatcttactggggaattcaggctcaaaccattctctttgatcctcttcctccattgtctaagattttctctatggtcgttcaaaaagagaaccaatgttgtctttgcaacaccagtattgttgttgctgccactgttaaatcaaaactcaattagccttttcagagcaagaagcctcgaccaacttattccaattgtcttaaaccaggtcacctggttgagaagtgctattgcatccatagtagttttccaccaagatgataatatggtgacaaaaagaagaatccatctactcctcgggtgaatcaagtttctgctagtctagagacttgcattgttgtctcttttcaactacaactcagccagcagctaatttcgcttctcagtcagcaaatccaaggcgcttcttccaccagtgaaagttttcttgtggtttttaa

SEQ ID NO: 27341 - DNA, 5202 bp, Cannabis sativa
agtaatgaaattaaatctgtttctttattgatatttgaatagagataattacattgaaatagagtcttatttagggtacaaagcccaacatatttttcacccattaagggaataacagacaagttacaatgactttccctcacccattagctttccctccttaacggaccccctctttatctccattagataaaattttattaatatcaccaagaattagccatggttcagaggtagtggatgatgctaatgttttaagtgaattccatgtatgaattcttaaatgagcttctagttcaccatagaaagcagtaaattggaaacagggactgttatcatacgaggtaagagcatcaaaatggttcgttgaataggtgtttaaagttacattaacatccctaacaacaataaacatctttcatacctaatctagggacttcaagaccatgactaaacttaagggaagaacgaatacgtgtgacagagttacattgtaatttagattccatgataaaaagtagatatggacgccgttgattaaccacgagttgagatgtttgaatgcagaagggttgcccaaacccctcgcattccaactaatgatcttcatggctgggtgcggggctacttgaaagcaacctccactgaaaaagatgaaatctcctcagtagaatctttttgtgcaccagaaacatgctgagggttgaaatcatcggtggacacgctacattggttgatatttctacatctctttaggacacttaaaaattttttgggattgatttgcctcataaaagtcatagcagaagtctcaaaatgttggctgttatcatcactaagaatagcctttcctttgtccttagtagatgtaatgattgaatcacttgtaataacttgagtaccaaagctagagtgagttatattttggacagtaggtctagtattagcattactggtggccacaaacatggttatagttggagtatggatacttggagaagcatggagatgtccagtataatatcagctaaattagttatcatagcagataacaaactttggaaataggagagaaaaggggaaggtaagtcaagtataatatctttctgtttgtcaatagagatgttttgtgaacaattttcagcagtggtaagtggcaaagggtggagtggaaggatattaatatttgggattgatgagacaatggttttttcgagccattctagtaagaaaaggacaaacatttgctttagaaaaattacttctatatcgatcgtaactcgaactggggagtttatcaccaatcataaacgaaccgaaagggagatcaggttcaacacccttatccaataattccaaaaagctaatacatttctcaaaggggtgtcccagccggccgcaatgaaaataaaaaataggaagattctcgtaccgaaactccaactaatgttcatctcttactttaggaaggctaaccatcttgcctctcataagcagttgagagacctcaatccaaactctgatttagataaatggcccccatccttcatgaagggagtcttcatgcacatctatatactctccaactcattctccagctttcatagcaagtgctctagatttgcttagaaaggccaggcggtgtatctgcacccagaattgaactttgtaaagatcctccttagtaatattttgtagcaatgttcgggagtgaagcaaaatacgatggttgaaatagtgccaaggttcacccgttaagatccttaatttgtctcttgcacaaacaattgttagtaagaaaatatcataatgcaattcaaaaactacaatttcaaaccgacacttattgctccagaactcgcccatatttttgatgaagctttttgcgttaacagcattggaaagtcaccgagcaaccaagaagaattttggggtttgttgtggttcaataatatcagattcagagcgagtgtggacctctctgtctttttcagaaagaacaaggtttgaattcatgtcttgaaggagagaatccatacagaaaattaaaacagaatgtgggaaaatgaagtgaaggaataaagtgtctaggttcagatagaaaccataatagacccctaagagaagtaaaactgcctaagttgtaatacatcgtggtgcacaatgagaattggtggagttagagggaaggagaagaagaacatgggttcaggcatggtggagatgaaggaggggaaaactagaaaaaaataattacaacagagaaaaaatcccactcgagaactatttttttaacgttttatataaagttacgttagtactatcagttttaatttttttttttataaaaatgatatgaatgtagatatataataataattattattatatataattacataattattaagtaagttatattattggattaattatcatatatatataataaagtatagattattaataataattgatattaatatttatatttttaccaaatatttaaatatccacttttaacttctacatctataatatggtaagcaccaccttctaatttttatttatttattaataattttgtctataaattcttcacatatattaatattagtatttatatttctgtcaaatatatacatattatttatttttcactatattttaaatttaatctatatttacgcacgtatatagtaggcaccgcttcctaatttttctttttattttaatttttgtgatacttggtgtatgattcattgggaacgaaattctaaaaatcatgtagtcaaaagaaacttatcgtgggttgaaattaaaagtaaaaattcttacatcatggaactaaatcaaccaaatgtggaagaaaaaaattcccattgatcatttttctcctatttctgctaatcctccatcatgcattactttttctgaaacaaatgctacacattttgagctgaaaccttccataattcaacttttgccatctttttatgggttggatagagatgatccatacatgcatgtgaaatattttttagaaatttgttctacttttagatttcaacctaatatgccatatcctcaacaacaaagaaaactatcttttgaggatacactacaacagtttatgcaaaccacccaacaagatttacacagaacgtcttaattcatgttaaggcttgagacataaattggtcagcttgctactgttgtagctgaaagggagaaagaaaaacttcctagtcaacctattgccctggtatttttccaatatacctagcaatcccactatgagacacgtggcaagtcagactctcagactcagagataattaaggaagagtcattacataggccaatcccctcgagatagctcaataactactccaggagccaggccccgatctggagaggtcctgtctgacttcatctttgggagctggatggcgtctagctcctccaaatgtggggtactagagatgaactgtcagctagcatttagtgcagcatggagaaagcttctatgaacgcatatgataagacatctcatacgccataaactcgtccttcagcaattacgcgataatcaaggctataagtgacgactccattatcaacaatcacatcaatcaaggaaggatgagggcttatctcacctaaaccctaagcaacctactacataggttgcgcatgccctactttgtagatttgggaacttgtatatggccaaggcaggaacttaggacatttgagacctttcttcttcttgtcaactgctataaataccccttaacaaaatcaacgagaaggtattaaaaaaaaaaggcagaacattctctgtaagaaacacccacttattaatatcaaagactcgtagactaaggctcattaatgctccaaccacgtaaaaatattttcctttactcttcttaagccatctttattattttaatgatttagttgcctaaaatctcggtcaatattttggtgcttttattaagagttgtagaaagctttactcacaaaatgacacgagaagacccagagtaaactggtggagactaaaaaccacacgagtcaaccttgtcccccccaagatccccagagtataggggacgaagagctggcattgcgagtaaacgtagatatagaagaacaaggcaaaacaaatgatgaggagagcaaaaaaaaaaaaaaaactaagaagaatatgatgcctatgatgatggcagttacactaaactgctggccctaaggcaaaaggtggttgatcatgaggccgagctggcagcatataaagaaaaaaataggaaaagggaagagataatggtcgccatgcaaaaagccatggagacagcaggaatacacgtacatccaatggctatacctcccggaccaggtgaaacactggaagagtcatcgccaagtacctaaagacgtaaaaatagggaaccaatccctatcagatatccttcacatggatgcctaaagaaaaatcctacatctttccctaaaaagaataataaggctcaagatctgcaaaaagtatgctccgatttcccaaaaggaaatggtctgcagaggggcaggctccccagagagagcactggcactcaagactgggaggatcaaaaagtgtatctatgcgccaagagcctggggaaagaggtaggaaacatcacaagaatccctgtgctgacttaaggcaaaagatcaataatagacgtggtgacctcaggaatcatttggagaaaaagaaacaagaggtaccgatgtcggagggtgtcttgagtgaagggatcctaactgaaccaacaatcctatgaaaagacattaccaaggtctcacgtaggcaaaaaggggatgatttgaagtctgattgtgaagaccaggagccctaggttaaaaaaacagtctggaggcggagctccctaaaaattttacaatgcccgaaatgatgatatacgccggagatttggaccctagtgatcacttgtctcgattcaattgagtaatgacagacatgagggtcagtaatgatgcaaaatgtttatgttttccactaacattaggtggatccgctgaagaatggtacaaaaagttagaaccaggtgggggtgttcataaaaaccgataaactgaaatcgaccatcaaaccgaccagaccgtaactgaatttttggttccacatcatcac

SEQ ID NO: 27342 - DNA, 4022 bp, Cannabis sativa
atcatcaattttgtgtaacatctcttttattacaccaaaatgtgatcaaccaaaaaaaattacaaaagcaattaatcttataactcctcaccatgttacaaggtgtaagttatacatttattgatcatatactaaatatatattattcatataataaaatatttatcacattttgatctatacttattatattatcaaataatataacaatcccccactaggttaaaatgtgtgacacacttgtaacatacttataatatttatttaatcgaacgaacatcatatcaaaatataatattctctcactttgattgaataaatatacacttttaggaagtcttgcttaattacattagttaaaatatcttttgacttgaattttaccttactgtaattaccataaagtttgataaaattttagttgttgtagcattgaactactactcctttagtttaaatcgattgataacacacacacccttactaatgctcacttgagaccgcatgtctcgctcttgcacctttaatggtaatgtgaaaaattctaattcatagactctctagagaatactcttaattctcataagagacaacatcacctctagtctatataggtatagttttagcgtctcaccgctatttagacacttctgaagcttaagtgagttttcttaagctaaagctctattaaaaaaaaacctttcagttttaactctcaattttcaccacatgtactcatccgtaaatgggacaattgagtactatattcactctattaatttattattacctattgaacacaagactagatttttattagtattgtaacaccctactagattaggcgtgttattgtgatttcttaatgttgtgcactcctttgctaatcaaagggtttatagaaaaacgtgcataatttaaaattttcttaatttaactttaaatttaattaattaaaaactttacataatttgggatcccgtctttaaaatgtacaactatttcacaaatatttagttataaaagttttcgccaattgactaccaaaataaagcctactatctcgaagatcgaacactccaagtctaactgccctgatatgtacaaccttcactaactcgagctcactgttgttcaactttagccttgctcttacctacacatgcaaacaatatatgtgagtcaacaaacccactaaacaaagcgtaatcttaacataacataaaccggattatagctaagcgtccatacacccaattataatccgatcctgtgtcccacgcataatgagtttagaatgtttgtacaacagtactattgaccataatattagcctatacttagtactctagtcatactgatgtgatagcgtcaattattactttgccaaacatatatctgtcggtatccagtacaactctatgtacactaatacttcctttactgatatgttatctaacaggtcataaacatgcacgctaaacatgtaatcatctatgcatattattatatgaatcttaccttgattctgaattcaagtgtcccgatcaatttgagtggaaactgcaagtttcaaaagggcatttaatgatcaaatcttgtttgctaaaaaaattgcctagtttttgggatttcttcataaattccaggtgaaatttcttctaagagcacattttttcaagggcttttaagactagttggcaaatttctctaattatagcatttgttaggtgttttcccaatccagagagtagcctgaaattttctttagaggaaaggaagaattgctttagatttggataatcaatgccacctgtttggtagaatcattgagtcattctcttataatgctttcccaagtctcttttctctattgaacaacacttgatctttaagaactcgtctctaagtctttcagttacttatgcatcttggccacataactcgacttagagatagcttaaggcatttgtgatagattggagattcaagaaattcatctatctatattcgcctaagcttgtccaccaatcttgaaaatttcttgtgaatcttgagataaattcaagaggatcgtccccgtctatgcctgtggtttttgtgtttctaggctaagccaagcttggaattcttggaatctttctcaccacttagatgggagaatgccatttagagtaaaagtttgaaacttagaatatttactcttttgatgatgattgaaatctggttttattgtagttgcttcttcttcttaacttttgtcttcacttttgacaataggctcggtttgggaatgtgattcttttgtagattgagccataaaatgtggtggtacgtcatcttcacttgtatctgaatcttgagactcatcactagtatctgaatcttaggaccaagttaagtctcttccttgtcagaggaagaggactgatttccttcattgtaaagttcttcatttgtttaatggatcgtggcagaaataggattattcacagttcattcggccatggctctttctccaatagaaaagatgcttgtggaggaaatttatctaggatttctattttctttgcctttttggttttttttttttttttgttgttaatatttgttaagcattcaactaagtcgaagtagtgagtcttcttgtgaagagaccaagaaaggtgatctcggagaagtctttggtattgttgagaactctcatggtactgattttgtatttgctccaaaaagcattgaatttcctcctaaaagcattgattgagatcctgtagaatatgattctctttgaaaattttgcttttttagatattcatattgggtttttagaggtttcattttagcttcttttgccaagaataatgacatcggaatagaatttgattttatgatgaccataagttcgacatgcatctattgaatcttgtttgtcaacttttcgatgatcgtgtcttgtgatggttgtttgaccattatctctgtgcaggtgatttgtttttctacccgttttaagacatcattttgggcaatcataatttgtaagaaggcaagactatttgtggttgtgaagctattgaagaattatctgaatcccattcagtgggttctagtgtaggctgattatagctctatggtgcaaagtatttgactatatagtcaaattttctggatggttggcctaatagatcgatgtttttatcacctttttctagcttttgcttgagtcgctttcttgaagtgaggcgtggtgagggctcatcatcttttagaaaacttttgtagttacaaacatcccaatatttatgtctgtttaaggattcaaaagcataaattggctttccttgggaattgaagtacatgatctctacatctattggttggatgggtgtgatgacatattgggtgcaaaaataactaggtggttttgtttggcttctgtaaaaaaaaaaattcaacaaatccatcttcttttgtgtggtaggaaggctcagttgtggtttcaatcacatgttgtggcttgtgaatatttttatagttggtgacccacaatttgggtaaaagctttgtgagttcttcaatggtcatttgctttgggatatgtggataggtcggtacttgtttggaatccacggagatgagtaaagcgtcttgtgtttgagggatgttaagatcaagagcatgatcttggagccgatatgccatctgataatggagtttggtgccaagagaagttgggtcctggtccatttctactatctacacttctactttaaaagcatcagtcacttgattgtctttaagagacatgttgaaattggaaaacagagtgacgaccactgttcttacaattaaagtagtttcaatagtagttgtacttgcatgttgatgtttcctcattcgagtatcaagaggaccaatacgagcgctaactggaagtcccttccttccattattatttagagcaaggaaaatagcaccaaggtggttgtgggtataacgctgttgggttttatgcccta

SEQ ID NO: 27343 - DNA, 1198 bp, Cannabis sativa
ggagaaataaaataagcaagttctcgctgcatccattgctagtttggtgtattcgttgtggagagctcgcaacattaaaatctgggaaggaactcatgtggagattgatcgactggttcaacaaaccaagatggttgttaagcaaaggatcactctttgctggccgaagaaagttaaagacatagacaaagtgtggtttcaacatttgtaaatagaaagtatagattaaagctgaattttaacatgtaattactcaacatgagttgattgtatagccggtaatgggcctttgttaggtgcctttagtttgtaaatttgattgtgagcaatacaaacttcctgattcataaaaaaatatgtatacatgtggtgatcttgggcatatggtatagtgataatcagaaacaactcttccgttgcgtacctaatttagtactatagaaccaacaaagtatttcctgagaatcactgataaaattactcagagacaaatttggaaatggttttggagtgcgttgtggcattgacccatggatccttggacatagtttaatttcatccaatctcttactatgggttgccaacagtacctgttgctcacttcattaaagatacaagggaatggaatttatttttgttaaatgtaaatttcgcactagttgatttggacgagattgtttctattcccttgagttttttccaaactcaagaccacccttatttggcatcacaacttgtctggtataaactcactaaaatctggcttgcatttagcatcatctttagcagaagtagatgaagattctactgcaaataattacaaagattggtggatttttttttggaaattaaatctaccaccaaaggtcaattttttttttcttggaaagtcatttagaatgcattaccaatagttgctgcacttcaaaaaagaaaggtcattgattcaatgtgtaagcatttgggaatcaataggacatgctttgtttacttgtaaatttgccaaagcaatttggaagcatacaattttcttcattgattatcatcatgctcaactagagttgtaaaatacttgctgggatttttgacacgacatgaaatcagcacaagctccggaggcatgagcacaactcgacacaaaaaaatatgggcttaggcacgacatgatacaatgatgcaaattggcatgacacgatac

SEQ ID NO: 27344 - DNA, 3418 bp, Cannabis sativa
ttttagtacaacacactttttgtcacagagagtacaagagggagagcttctttaaaacgcaacacaatcatcttggagatgagcttctagatgacattgcatagactaattggctgaaaatctgccatgacagtgggtgaattagtttttgggacaagggtgatgattatcttattaattaaatccatgtcatgaccatgattaagcactcctaaaaccacttcagtaacagaaggtccgacaatgtaccagtagttttgatagaacattgtggacatgcctttgctacctggacttttatccgagctcattgtttctaaagtagcagttacctctgctccagtaaaaggagttgtgagggagtcatttattttaggtgtaatcgaggtgggaattgtagccgtgacttgctctattgcagattggtctactgtagtagcagtaaaaagatcatcaaaaaacccaatgatgatgttggacattccatccttgaaagttatttttgtgccatggctgtccaagagagaggtaattcgatttgcagctttttgagaggaagcatgtgcatgaaagaattttgtgttttggtcaacactacgtagccaatcgacacgcgaccgttgtcgccaatattgctcttcttatttcaataactcatccaaaacgctttataacttttttagatcatcaatcaaagaaggtgttcttgcttgttgattattcaatcttgacacgtgttgttgtgctttggagatttttttcatcatgttgccaaaagtagagacatgccattgttgaagagaatatgcacaagctgcaatattatgcagaattttatccattgcagaacccgaagagggagacaatcattgttgttcaataatgtttgaagcctcgtcatgttgaagcaaaatttgcttgaatcggaacctggtgcgtccgtgatgatgctgttggtccaagttgtttaggctaacagttactgctatagctcaatggttagagttatagtagtctaaatgttgagtcacaattgggttaaatttggtcgtccaacaatcattcacaaaacaccaatccaacctttctttaactgtatccacagaatgtctaccttttatccatgtatatgggtcaccatcaaaaggaacttcatttaaatggcaacaatcaagtacattttgaaggagcaaacattggctgttgaagacccctttacctcttgagagtatcacgcatagaacctctgtcatgttgtctcttgaaacttcagtttggagagaaattttctttcccaaaaattgcagctttggttgatacaattactgatggaaaggctaagttatttgaaaaaggagcattcagattattgttgtttaggcatatgatagtgagagggtggggttgataagttttaactatatttggacaattggaaggacctgttggtgggatataaatgtcagacaagtcatcatatgaaccaggttttgagatagtaggagtgctgtgagcaccagtttgtggttggacaataggtgtggcctgtgaatttgttaccaaatttgttggtgaaaggtgtggtgaaaaggttgctggtgcaaacttaataggggtcgtgactgaaactcctacagtggtaggagcagttggtaaaacaaaagaattatgcatagtctgtgactcatcattcacttgctgagatgactctccatggaacaatagagttggttgtggttgtgaccgtctattaagagaaggaacagcagcagtaagtgaagtcctagccaatcaagtaagcaaaggccaagcgttccccttcccaaaatcggttctatacctagcatagccagatgtaggcagtggagaacctttaatgttaggcctatattcatgtttaggttatgcacttattataaggatgaacaatgctcccacattccatacaatattcaagcaacctttcataacaaaattcaacccagaatttgtcttgaacttggaaaaaagcgatcatacgtcccctcaataatggttttgttacattaatcttgactcgaatgcgtaggaaagggcattaaccttcaaaaagagagacttcaaatactttaatgaattaaccaattaagtttttaagtgctacaaccaacccctttgttttgctcataaagagtagcctatagacttgaacccaaaagggtgtgtagataagctttgaagacaagacattctcaccaatatttggtgaaaataagatgatatggtggttttgaaagtgaaacgactctctatccaaaactctttgcttatcccctttgcaaacaaatgttagcataaacatatcattatcctcaaaaatctttacagggaatcgtccatcccaatgctctgccatctgcctttgtaaagtagataaccaaactttctttgttgtcatgattcgggcataaagcacattgtgaccgactgaactagaagaaaaaggttcactgaaatcaaactcaaatacagtctgctcctcctccgtgaggttgattttttggtttcattttatctttgaaagggtccatagttcagagaaatgaagaatcgaagcccaaaataatcaaaagttgttgaaggttcacagataccaggtaaagatgatgtaaaatatttgaaaactttgaataaaattggaaataattgctagaaactgctattaactaataagaacttgcaagaaactgatatgaaattgcaagaaatagttaaaaaccatataggacattgcaattgccacagagcacaatacaagcagatgctcgacataacgtcatacaaacctcatttaaattaaaatatattaactcattaaaaaaaataagtacaaagcttgagaaatatatgaaaaaatagaggagaaagacaacaaaaatatataactatttaacatgtaaatataattggtacaaataaaaccaaacacatacttgaagacatataaattattaagatataatcttatcagattgagaaaaatataaaaagatcaagagctacaggaaaaaaaatacaaattactaaaatctaatcttattcagttagagaaaaatataaaaagagcaaggactatagaaaaaaaaatacaaattactaagataatctcattcaatttgagaaaatataaaaagagcatggactataggaaataaaagagcaagaagtttgatacatacaagtttttaaatttaacaatctaaatagtttgtaaggaatttttaacgacctgaaaagtttaggggtataatttggtacatgtcaaagatcaagggaaaaaaattctaatcagcctttattttatgaggaaattacactcactatggaattttaaaagttgtttacttaaatatgacaattttaagtttgaccaatttat

SEQ ID NO: 27345 - DNA, 1373 bp, Cannabis sativa
ttaaattgacaaaattactcttacaatttttaaaaaaattatataaagagagattattagaattattttaatttacaatagtgtgtttaagaatgttatgattagaattgaatctaaagtttctagccacatagtgagctatactagtttaagattctttattataattttattacatcacttaaaacaaacattatttggttctttttttaaaaaaaatgaaaatgagaatggatagtgtattaacaaaaatattattttgataatggatgatatagggtataaaataaattttattttaaaataaatgttgtaaattgtaatggtgattatataagtgtaaagttataatctttattcatgttaatggtgattacattgtggaattataatgatgatttcattatgattatgccaaagccaaacatgtctcatgtattattattattattatattctgtattttatgctcttctatttttatttttgttctcctttacttttctatgattcatttctctttcaaaattgttaaactagctagtgaagaagggattggtacactttctttttcagaaaacaataatgttatgtgagatgaaaatgtcttattgtatgttgtaaataaatgaatagagttcttagtaacactatataacataagttgttttttctcttatgttactcctcttgatttcaactttcatttttgtttaattagaatatgttacctatatattacctatatgttactatatgtatcaggtagataatgaattagtttggatgaataatttttcatattttctctttgatgtattaaattttgattatttttcatttttcataaagagaagaaatgattgtcacaacccacaatctctaattccataaatttgagctaaagaacacaaagcttgaatcttgacctcaagagaagaactatgtcatcagattactcttttgaaatctcaagttgaaaagcaaagaaagacaacttttttttttgaactaataaacatgatttcttacacccttcatatctttgaaagtattgtcacaacatctttcatgttggggcgattttcggggttcgagttggtgcaaaacaaggctaatttcaacaactcttctagtgtttccttttcctttttggagatgttcaaaaccagctctgaatctaagatttgaagcaccttatctcttccattttcgagcgctctctcgaccagttggcgcagactgattggtagcccgctctcttcgataaatcctgttggtctttgctttgttaaaaactccattactattataccaaagctgaacacatccacctttgttgtgactttgctcatatatgcaaattctgaata

SEQ ID NO: 27346 - DNA, 1996 bp, Cannabis sativa
gtaaactttacgatgatctaaggatttaaaaatcttttttagcagtcgcatatcctcatagtaataggcaaatagaagcagtcaacaaaatcatcaagcataccataaaaggtaaacttgaagagaaaaaaggcgtgtggctagaaaagcttccgcaagttctatggtcatacaacacaactcctcgctcaacgactagtgaaaccctcttctcactcttatatggatgtgaagccatggtaccagtcgaggttggagctgggtcattcaggagagatgttttcaacgtcgagactaatacaaaaaaattagttgatccaactcaattttctagaagaaaggcacgatcatgcccaattaaaaaaatgtggcctatcaacagcgcatagctcgctatttcaactcaaaagttaaagaaaggagcatgcgagtaggagatctggtattgtaaaaattcatgcccaatacatgcaattctatgcatggcatattcagtgacaattgggaaggtcttacctcatcgctgaaaaaattggcaacgcaacttactagttatccgatctcaacgactcagttctcaatagagcttggaatgggaaacatcaaaaatattattatcaatagtactcgcatgtatatacttagtcatttattttattaatattctatgtatagggggtgtaaccatatattgtactattggttatctaatgaattctcagtttttaaagttttcaaaatttttgaaatattttcgcatgtttatacttagaaaattttcatcacaccaagctatgaaaattaatcgcatgagaaaaatttgataacgagttatgcaagaataaagtcttttgaggcattaaattgcaattaagagcacacatcaaatttagcgataaaaagtactaaacaaaaggagtatccccgaagggatacactattcaaaaacatggcaaaacaagttgtcttaaatacaaaatgcgagtacccatgtatcgcttaagagaagtttgacaaaagaaataaaaaggttaagcggcaggagcgttggaatcacctacgaccatatttgtaccatctacgacttcagcagcagttgcatctccaacatcgtcgggaaaaagatttccacctagcccttaagtctcggtaggcaacatggtatgaaaagcagtggccatctcaacttcctctagtccaaagaccgcgaagtcaaaatctggcaaattggtcagtgtagtgtagatgtagttagagaccacctggtcataagccttcttcgcattctctttctcagcctcaagatcgcgggttagaccagcattctcctcctccagcttcttgactcgctcattcagagtcttgatttgctcttctgcctggcctttggccatgctgagatcctcgacttccttgtctttggctgccgcatctaactttgcctttttaaggcccttttgaagagttgagttctgtttcttcaaaagatcgaggtctttaaaacaaacatcataggcccgcgaatagacggtcatcaattgggagatgagatcagtcaatcgaggcaagaggtcctcgacaagagttccctcaactctagtgacaaactcatcagtcacgaacttatcgtgtagaaccatgatatcgcaaaccttgacaacaggatcgatcacaactttcttccccttgtcctgagcaaccttctgctgctttttcgataagtcagccgcctgggtaggaacgaagtcacttttcctcttttgaggagtcgcaaatgatggcgtcgtagtgccagtcttagacttgcaattgaaaactggagcttgtttcaagaaagtcatgtctgcgagaagaatgacaaataaggacttgaaagggtaagacaatattgtcagcaacatactaaattatattacctaatgttggtctcgaagttttcttggatagacgcttgtctattctttccttttgcttcttagaaggctctttgtacact

SEQ ID NO: 27347 - DNA, 3265 bp, Cannabis sativa
aaaatttaattaaaatttattttaaatttttatataaaaaaggcctcattttaaatttcgccctaagtctttcatcaccttaagacgggcctgctcaaaccacaactcaccgtgcaaaacgtcagaagaagacacaacaacaacaaacaacctcttttttcagttgcaaacgccttatggcttgataatcactttcaattaattccatcttttaaagaaatcactgaaacaatctacaagacaaaagtggaaaacgtcgacccttatattggaggtataatttcatatttttttttctatatctgtaattgttttctttgttaattccttttttttttttaattttgatatgtaggctgataaagttaggaatgatgtaaaccaatgggtggaaaatgagacaagaggactcatcaaagaaattttgccgaagagtgtaaaattgacaccctctctttgtcttgtacttccaattggttttgagatggaagcccatgattctcaacgtattatatttcaagggattatggaaagttcctttcatggcctcgaatactgcagatgaaaagtttcacattcttaacggagaaacaatcaaagtacctttcttgaagagtttttatgtttatcactcctatgcatcccttgatgatttcaaggttctcaaactccgatatgaaagagtagttggtgatgatggaaagcccttacaattctctatgtacttgcttcttcctcatgatacatatacggattacaagatatggtggaaaagttcaatttggatccgaaactgttggcgcccaagagtcttaataatcatctaaggaaggtgaaactttctcgtgtgtcaattcccaaaatgaaattctcatacgatgttgatgctatggagttacttgaagaaaaaggattaactttgcccttcactgagggtaaagcagatttctcaaaaatggtttactctcatcttgagtctaataatgtttttatagggactatgcttcacaaatcttgtattgaagtgaatgaagaaggtacaaaggctacttctgccacctcacttcgttttgaaatcgaagctgaatgtgattcagattcatctcctcccccacttcctacctttgatgctgaccatccattcatgtttatgattgttgaacagttttcaaaccttgttgtttttacaggagctgttcttgatccacgaaagtaaaaacctttttgtgttatgcaatcattaagtagtagtatctacacttcgttttcagttattttcttctaccttataataaagttttttgaaatggtagtaaaaatattaatatatgttatgttttacagtaaataagtaaggctgaaattactggtaacaaatcaaatatataagtggagcaattttgtagcataaaaaaaattgccatttgaatatttgagaaagttttattaccaagatagttgatccacatcaaagctcatcatgagagctttgtttgggagagttgtgttgattctccaaaaggtatgttactgccaatgatgcatgtaatgctgctccatatggaagaacatcttcattcactgtaaaattatgtgattgtgcaagttcatccacactctttttctcatctttcattccaacgaaaaataagtatcctggaatcacctcttggtaccaagaaaaatcttctgatcctaatagtagtggcatttcatgtatgttcctttctcccaccacttgagttgcaacctttagaaaatgtttatggagattttgatcgtttacagttactggattgaaagcctccttttctgaatcgaaaagaacagttgcattgcatctgtttacactggcttgtgttgttataacctgtagtcaaagttcatggaaaaacctttgtttgataataatctgtacagaaaataaacgcacaacttgattaggatgaaatgacatatacctcttctattcgatgcttaagttgaaggaagctttcttttgaaaatgccctgaaagagccaccaatcgttacagaatctggaataacattaaaggcagaacccccttggaattttgatacagtgactacctgcaagattcttctattcattaagttaaaataggcttaaaagcttattagttgtagttggaaaataaaatacaattatgatagtttctcatgttctcattctgattcttttcattagaaataaacaaataaaaatgtgtcctgcaaaaacaaaattttaatgagagagagagagagagtgagtgagagaggacctcagactctaagggattagcttcacgtgaaacaagatgttgcaaactaacaattacatttgatgcagctaaaataggatctattgtgtattgaggaatggcagcatgaccccctttcccacttattttcgcctcaaaaaaaccgacagcagccaaaataggaccggacttacaagctactgagccaattgggagactaggagagacatgaatcccaaagatggctccaacattgtctagtattcctgtgtctagtattttctttgcaccgccacctccttcctcagcttgttggaagacaagtaggactgttccctgtaagaattacatcagagaaaatttagaaatactagtcagaagatgacatgaaattaaaccagttagcagctacaataacatgaacaatgactcttgtgagtttgattatcacagtacaaatccagcactagttttgtaacacttctaaaaatttgaccatttgagatgataacaagggagctaatattcaaaaattgagttaattggtactttaattgactaataatcactaaaggtatgttagttttggcaatgttcgtatcagacaaatccaaaagttcaagccaatcatgattaagaaaagataaaactagtacatgaaattacagagtgagatgatccaaattctttgtcaacaaagttgaccattcttttctcaagcacaatgataaaactagtacaattcattggagattaccgagaagaaataataaaaagttcgaaacatgtaacctttagttcatggcgatgcttttgaagtaactttgcagctccaagaagcatggcaacatgggcatcatgcctacttttgtgctcccactccacactctcctacattaacagcaaaaaaaaaaaaaagaaaaaagaaaaaaagaacagaaaaaaagaaaagaaaaaagagccaatgatgttcaaagataacagagaacacattttgaatta

SEQ ID NO: 27348 - DNA, 5105 bp, Cannabis sativa
aaaaaaaaaattaaaaaaacaaataaaaaagtaaaagacatgcaatcgaccaaatcaaactaaatttcatttaaaaaaaaaaatgtacaaatacaatttgtcccatttttttaagaatcacaaagccatgcgaccaaataatctaatttcaaataaacaaataaataaatacctaacaatcaagtcatttacttatcggccatgtttaaatgatatcaaaacatttaccaaaataaaatagagggtatttccctctccagaccaaaaacgtttactatattaagtattaactagtatcaaaattaaacaaagtaatttttagtttttacattatacataatagctagacaatatttagacttatcattatattactcgagcgaaattatattcactaacacatcatgaaagaaaactgctaacaaattttttgattctccatggagcaaacagatgcaagattgaataggcagtagtcaaagatgtggctcttaccacaataaacacaagaaatctccgagagctgatccacatgtgaggaaactatttgttgacccatgctcatagcctagagcatatttaacattgaagctacttgaacagctaaagaaataatgacatcaacttcaagaacactagtaactttctttcccggagatgctctagtagtaggccactgataattgttgttggcgattctataataatgtcatagatctcattgtaggacttagcaagtaaagtcccattcaatgaagcatcaatactcattatagtgtgataggattggtaaatggataaatattatgttttgtgtaaaaaaaagagtgtaaaaattgataaaatcaattgaattgatgtagatacatgattccagatgtgcccatgtaacttcaactataatcagccataaaatatacaggaatttgaacgcttccattagggttttggcttgcttacccaaactgtgctatagttgttaagtgagtgctgatctatgtataatgtcataaagagagagcagaatttcagcacctatcaaggcaataatgagccactccaacagatctgatttcctattttgaagaatttcctgaagaaaccgaatattatgctgcacagataaaataaaattttattagttacataggatgcaacagcaaactgccatatctaggaaaacaagaaaaatccacagagcatatttatttacctctacaaacttcaacttgaaatcaagacttgcgaatctctgggttacctcaaattcttctctgagatattcccatatctgagcatatttagcatctttccaggcaatatctgatctgtaaagctaaccagatatcaaattagcaaaataaatcacatgagactaatcttaaacggccaatttagcatctttgagctgctgcagtgaaaagactaatcaacctaattgttttctctactttctttttcatttttcatttttccctttttacttttttcctatatacaatacttaacaacaaattatgatatgataaaactccgcattttcgctaaacaaaatctccattgccatttcttagaacagataccagtggaaatgattacattcactagagacagaaatatatcctggcattgttgcaagttcctgtgaaattcttcacctataataacaaatctagactagatcatatcctttcaaaaccctaattgataataaactttaatgggtacattatcagcaataactgatttactaaagttttttaaattatatcgtactgctcatttaatatcccctctccccagtaaagcaaatcttgaaacattatagtgtcactaattttcccttgttttaaaagttcacaaatgcacccatcccataatttttcagaagcagcactcacttacagagaaatagttgataaattagacaacttcaaacttgaaattcaaatattccatgtagtagacagttaaaaaatcacctctcaaacagtccaagcttaagaatcacatcagcaagattagaatttgcctttccaactaattgaaataatttttttttcttcatcttaaaatttccagttgtttccatttcacggttaatgtctgtgaattctgcaaccattccatcaacctaaaagaagtaaaatttcagattacttacaaagaactatctcaataaaaattgaaactcccaaaattatatacaccatacctggcgaacatagtaatcaagagcaatactttgaccaagaacactaccaatggtacgaatcccatcagtattcacatactgtaacattatataatccaatcctccttccatccacgtgtctaatgttggcttctctcttacttcgtactctaattttacacaagaataaaggaagcaacatgaataacattcaaaacctactgttccacaaatttcatttaaaatttatgagaagtttaaaatccaagaaagaaggaacctgttatgaacatataaaacatcacaccaagtcaaacaaaagaagactttgattgatacacagtagaatcctgctttctcttttaatgctagacttgttccataaatatgttaatttattagctttagctatacaaatatgttctgagaacagaaaatgtgacagtaacatgaatgcaacatctatatgatgatttactatttcaaaacggaagcacatacttaaatccaagtgaagctttagagatcttaccatcctttctcatttcaggtagtaagcctgatgcatgtttctctacaatttttagatactgatcaatctcatgttcgcggacgttaaacaagacaattgaaccgtattgaaagacaaccatgtagcagcaatcactgccacttaaagaagcacgcaaaccctgaaacaaaattcacactatcatcttaagttgtgtcagcaagggccgacagtagacaatgagtatagatagggtagatagtcctatggcctccatcatacaaaggtctctagttagaaaatataatttatataaacaccaaaaaaagttatttgtattaagagccccacaattaaatttatcttggacctcaaatttttcaaagccaaccccattcttacaataccactttccttttaaaaggccaaacccaaaccaacaaaaacctatatcaagccaatatgaaagcatttgctttataaacaggtattccatcgggggattagacaatgagacaaatcaattaaaatttaaaactaaagatagatcaacaattacatcatgttatgacccaacaaaataataataattacagcatgtaaaagcacacttcttaaggcttcgtttggatctcgggattatgaagggaaagtgaaaaaaatggatgaaaacgctttccacaaatttgatgactatttttaatattttctttttcttttacatattaatcgttctaaatttcataaaattatattatacttttaatctaaaatgagaaaatgaaatcctttggaattcatcttcttttctcttaaaattcaagatccaaacaaggcctacaggaaacaattttaaactagaatcgacatcttaaaagccgtatcatcatacaaatcaagaacatgcagcaacaggaaaccaaacattgcaggagccattcctcaatccatacattctcacctagacaaataaactaattttagtataaatatatagatatgtgtatatattctttcatgtgcacccaataaactaattcccaattgaatcaacacgacatctagtaatcctgctttctacaagtactgttaactgaacaaaaccgtggcctgacaagtgaccagaccacccaacctaatcctcatgatgttgcttctatgatgatagaattatacaaaacaaagcataattgaaaacagtagtagtaattagtaaacaatggcaaggcttacattggtttgagaaagctcgccgaatttaagaagaacgtaattagtcattcttgatgttggtgggataaaatttgccctgttctgttccactaattttctcaaatccacactacacattcaaaatcatgaataaataagtaaatacacaaattaagatatacataattcacgaaacattttgaaaaagccactacacagaacagagctactccgcaacaataagccaattccagaaaccaaacctagttgagaaaaaataagctctaacgggaatatgaggcctggtatcttcatccactgtgcccatgtcaccatctccgacctccgagcaggagaccggctcgttccagtcaaatgtcggcgcaggtgacaccgaagatatgcaacggacgacacggaatccaattccggagctaaggctctggctacggagaccagagggggaggaaggcgtaaaggtaacaataggggagattagggatttgggaagagaagaagaccgagatggattgggcaaaggggagggaaggtgtacctggttcttgattgtacggacaaggataagtggagaagaagaagagaggagagaagggatgagacgcatggtcctgaaatgggcgtctagtgtgcgagagcgccacattgcgaattgtgacagcttcagatatttggcagaggatgcgaagacgagatggggtttttagttttttattttttttgaagtcttctttattattattattactaggaaacggctgcacttcgcgtacggtataagaatgttggatttaactctacgtaggagtgacaaaattattatcgtgttcctgttatattttagttaatatgtttttatattttgtgtcagacgtgttaatctgtttttaaattaggtctaattttctcaatcctaacgcaaaacataaaaaatcgtattatattcgtgttaacttaccttgacctattttgatattactggagttaagaaaaatatagatttatccattgaaaaacttatatataatatgtatatatagtttttacatataataaaagattaaattttttaaaatattttcagtgagacaccaagatttttacgcggaaaaaccacatgaccatagtccactaaaatcatccactatcactaaatttcaataatgggat

SEQ ID NO: 27349 - DNA, 1465 bp, Cannabis sativa
  modified_base (962)..(962): a, c, t, g, unknown or other
aatccctttttttttattattattattgcttaagatacaacgatgctttcttttataaattgcctcgttaccctttttgatgcaatgcaaattcttgccattgtgcttcacttttgactagcacacgtccatggattctaatatgaaaatgattactcttattatattacaggagactttctgatgtgttggctttattgtctacacaacaaccaagctgtccacaattatatatttatagctctgcagatagagttatcccatcagggtctgtggaatcattcattgagaagcaaaggagggccgggcgtgaggtgagggcctgcaattttgtgtcgacgcctcatgttgatcatttcagaaacgacccgaaactttatacttctcagctaactcaatttttggaagactgtgtgcttgctaattgcaaaaagtcccattagttaaaactcaaaataaattctttttctcagtgaactggtacagaaaagagggggaaaaaaatcattatttcattggtatagatttggtgggaatgcagcataaggatattcctattgtctgctctgttcacatgctgtaaacatatattcaaaagagggtgttataattatacagctcgtgcaatcttgagctttgatatacatatatatattttggcatacaaataaattaacctttggctaattttgtgtgataattctgtattttacttgtgtaataattctcattttcatgaattggtaaagcgtgaaggtatatatgacatgatggttgcaatcatccaaataccatgtgcactgcacatatgaagtgaatgtgtcattccatttcaatttcatatgtaagcatgaaacaggcatctctgtgaaaacacccaaatggtgacacataatgatgatctttgattcaccgtgaataaccattgatagttattaaaaatttaactataaatattaatnttaaaaatattaaattattagattttaataaataataaaagagaaatttgaatttttacactaaatttagctccttaattaaaaaaaaaatcaaaaaatatcacattttttcttaattttttttttgcagccaataaagatttttttttaattagatagaaaaactaagcataaaaactcaaattttcataatattacgtaatacccattaataatgcacccttacataaatattttatttcctaaaatttattttaagataaaatatcaaaatatcaatatctattttagaaaatagatatcttatatttatctaatctttaaaaaatttaaataaaatatccctttactttttaaatataaactttaattaacaatatctattttttaaaaatatctattaagatttaatgatgaaatgttatattttttagagaaaaaaatagatattcatcattttttaaatcttaaaattttaaatacgatattaaaatttatagtta

SEQ ID NO: 27350 - DNA, 7417 bp, Cannabis sativa
gaataccttaattcatattaattatctatgcataaataaaggcttaaaatgtacaaatttgagccttgatcaacagacaatgggatataagtcttttaaagagtcattttggtcagatcgatgtgtataggattcttgctatttctcttagttattatcctagagaggataaactattttggtaccattatgactcaggggtttacaatgtcaaatccggttatcacttagccgaaagcttggaaaggaaagatacttcttcatcttcaaattctcctcgcaaatggtgggatagattttggtctcttaatttacctaaaaaagatcaaaatctttgagtggagagtcatcaatgatgccattccaactgctgtaaatcttatgcacaggaaaatctcctattttacaacatgcaccttgtgtgatggggtttgggaatcggtaggacatgccttatttcggtgtactagagcaagagaaatttggaatcaaactcaatttcaggtattttctcctaaaatcaacaacctcaatggccatgatatatactctactttagcagcagcttataaagattcagacttggagaaaatcctttgcctaatgtggtgcatatggacggaaagaaacaaggaattacatggcactaaacccaaactacctcgtattatttgttcctttccagatgtttacctcgagcaattttatactgctaaagtactacctacggttgcttcagcggatacacacttgtgctccaaatcagtttctccaaactcggttgatatcaacactacacctcaggtcaaatagcttcctcctgcatatgattttcacaaattgaatgtagatgctacgtatgatgcgaaaggatcagttattgacgtaggagcagtaattcgagattattttggagatgttattgtggctttttcgaaaccattacgtggctgctattctacaaaagagatggaagctaattctattatttacaattttaaatgggctctttcaaaccggttggctatccactccattgaaacggactccctcatagtggctaatactattaacaaactttcttctactagttgtgtatctcatttccgtgatttgatagatgatatttctcttttattatcctattttcctagagtaattgtttctcatgttaagcgagaaactaataaagctgctcatggcttaactaaattttctcttcgattggataatgattgttcctggttgggggaaatcctttctccaatctattctgttattgttctcgattctattcattaataataatagactttttcaaaaataaaaagaaatacttaacatgtgtttattgtaatgcaatttaaattcttaaattttatagcataaatttaaaaatagaatgaaactcacacatacacatatacttaaatatatgcgctaatgaaaaatgtcacaaatgcgaccttaattgaggtatttaaatataaatattttagattctttacaatgatattaattgtaattatagcacatttctactatatattttagaaattctagataatttagtgttgaaaattaggattcaatacaattatttttccacccttctaaaaaaaaaatgtgtgcaacaaattatttgaaccataacttgaacacggtaagttattgagaaagtttataaaaatatttaaaaaatttattatgactaccacaaacatcattatagaataagttaataaaattaataaaagatataactccataaaatctaaataatatataatatctctgaaaaataaatatatataaatatttgaacagttgctcgaaatgcgatattgttacctagtttattctataaactaaccctataactttacacacaaatgtgacgttatagaaaattaacactttttaagtctattttatacaaaaatgattagacctcatgttggcactcacgggatgatgaacagcgaagttgatattgaattactcgatcaaggcatgttattatctaccattatagctataaactaaggtctaacatgattcttgttaaatttgaagaactgatgcagcatccgatggacgtcaccataattatctgatgaaaccagacgaccctttatccattcagggagcttgctagttgggtgtgaaaagcttcttttcgaggaatcggatgtgtatgcataccgcgtatcaaccagcaaaatggctgcataatcatttatatgtcgaattgctctacctgaaacaaacaataaaaaatgcccacatgattaaatgtgattttttacctataaaaaacataggcagatgcaggcaatgtatggccatacatccataaagtaacttcttgattctctcaccgcaaactagtctactctagcattagaacagtccaacaacaggtcacaagtttggtttgtaagaaaggacattcgtgactcacagggcacaccaaaactcgagaataaaacatgatcattgcatgcataatcacatatggtcttaggcatcaggtcgggttacaagtataaaatttgaaagagaggggaacaggcagagaaagacaactgcttagtactagccaaatataagatttttcaggttccaatatcttcagttttgtcatagtttctggcattaaaatttagcataaaataattaatgaagcacgtaccaattgactgatttacagctttcatgcaaagattctcgtagtaatcttttcctctgcgcctgcaacttctgagtatgtcaaacccagcctttacatctccactaatgttgttttcatcactgaccaaaatatctgaagctttcacggaatttgtattacccagtccttcaataaacttcaccctctccatcaactcaaaatctgatggactagggtagggaagtccaaccatgactacacatcgacccatgccatcacttaagttgattccttctgatatcttaccaccaacaacagcaaaaagtattgcaccagtttgagttggattatctttcagactcccagttgataatgtatcaattgtttccttgtattccatgagaacagattccacctctgtattttttctaggttctctaaatacccgctttttcttcaaaatccgctcaaggatgcccgaagccttccaggcaccgtaaaccagtccttcgtaatcaaatgaggagaagaacacaacaattccttcaggaaccaccgacgtcaaattgcaaagcaaaagcccaagctcctgtatctttaaattcaaaccccaacagcgtattagtcatgtcattccgttagctttatggcaatatttgctaatactaatctatcaagtgaacttgaacccagtaacattattatatatataaaaatatatagatacacacgcacatgggacgtatttcaccaaataaattaagagaatgattgattgtataagacaaatatgtgttttaatagtataacaaaagatatggtgtcatgtactcaccattttagaggagcttctggagttgtagctaaaatcaaaagactgaccagaagggccacgagaaacagcaactggcaaaatgctctctggagggacaatgtgactacatgagaaaaactgaaatttctcaggcgacaatgatgggaaaagtcgctcccttgtttcttctataggttgcagagttcccccagccagaatcacagcgtgtgcttgatccaaaatctacataaaattcagagttaacgttacaattgggagcagaatttaatttactaaatccaggaattatgtaacaaacctcagagaaaatcttttccccagtaagcataacatattttaaataccctccttgttgggagcatgctggcctttcccttgatacgataatccttccatcaccatccttgtttgtcagggatagcagcatatcagctaatgccctgaaactggacagagtgcttccatcatcacaatatccaacagtccctttaggtgccaaactattttgcaggctagatactcgatctccatatgcactgacctagaaaactgagcacatgacaatctaaaagaatgcaggagcagaaatgtagaatgagatagtagcacaaatagtaataaaagaatgatcacaagaaggattcaccttgtgcataatattgctttcctttaagtactgatgcaacttgatcaagttaatattatctatgttaacagaaaataaaaaatcattaatggccatcgatgaataagaagaaagatttgcttcagatgccttaggaatattttgtgatgaatctgtataacttgcatcatccacattgtgcagagtttggagaaaaacccggcaaatgactattagagtttgaatatatcttcgattcccaggtcccaaaagattgtgaaatctttcaaagtacttctttaagtggtgttgcacattctccaactgtaatgaaaccagaagaatcaaaaagtcaaagtacattaatttatcggtgaaacgttttcaatcctagaagtcagataagtcaaagaccatatattttctagtatatttaggttgtccattcattgggttgataaattattgcgaaccagcctccaagtttagttggatcacattaataatttgtttacctgtggcaaagtgacttttgagtcatacatgctgatgagggaatcagctaaattatgagcctcatccacgataacaatgttattcttcaaattcaggccaagagattcacgagatgattttgataaaagagattgataaggtagtacaataagatctgctgcagggactaggcttcgagaaccataatatggacaagtcttcatgcttctaccaaggtgaacaagatcttcaatatccattgcaccttgttgagttatctcattcctaaattgcttttgtagtttatatttccttagcattgggcatccagaagacgccttagttcttcttattctcccccctgctcctaagttctacaaatcaacactgcctaagtgaggaagacatacattgtccatgaaaaaaaaagagtagatatcgttgctactccaaacaaaatgtgtgaattatgcttgtaggaaaagataatagtaaatggcagtatattggctaagaacctcatactaaaaaagaaaagggacaataccaagatataggacaacatttagaaacctataaaaatattaaataactgttcatatcaaattgtgttctcgttatgcactgcagtataaagaccaatatcacttttgaaaactttaagattatatcaaatataaagtttgtggttgtgatacaaataatgtccaaaagtttcagtgatgaacaagtgagtggatatattttgaaagcttagcagactcaaaaccttagatcaaattaggatcatgaatcctaataatgaaaactagaaaagacaacacttattaccttcattttggagactttatcatttttcttcttttgaagttccaagcacctttcattaatccgagtagagtttccaagcttcaaaacctctgaaacataacatgttaccctaaacaatataactacgtggaaacttcaatttacagaagccatgattcattcccataccttcattaatgcagaagttctttctagagcccaaacaagccacattcatctcatcagtgaacactgtcttccttaactcttttataaattgtgagagttgtgaatgagtccgactacaaaaataaaccttcagcttatcttcttgctcataatcctccccatcggaaccatcttcaccctcttcctcactagatgaactaagagaaacacccaaagttttcctctttggctttccgtcaccaagatcttcttcctcgctttcataatcctccagcaaaaattcctcatcactcaactccattgcactgtttgaaacattatttccctctttcttgttagaacaatctttctccacatccccactcaacaaatctctacaacttgcttggtggttccttccgaaattgcttttccctattctcaaccgagttttactcttcttctttatcttcttgtcttcgccctgattgtctttgtttactacaaaatttctcatccaatcaggctcatcatccgagcctaattcaccattcttcccacaatgctgatcagattcaacacttttctcagaattcttctgttgttgcctcttatcaatcgcccattgcagtgcactacaaatcaagcttaaagttttccccgttcaatttttgaaaaaaaaaaaaaaatactcaaataaatgtaggaaaagaaaaagaatgaaattcaactccaaacttatatcacttccgcaagaataacatacaaatccaatctaacctagtaaacaagacaagcaattgagagtgcatttaccagtggggctttcgagcatggaaaccccgccattgttgagggagtgataaagggcgttcatgaaatcaatctggattgagtatggtttgtacggaaatccttcaaatttcggaggagcttcacatgttttgtcctccatttctgaaaactctttccttcctcttctccagtttgctctactgcgcgcgctttcaaaaatatttcactaaaaaccgaaagggagccaaaatatttcaaatgaagggtaattggtcgcaacttgctgaatcgagaacttctgtccaaaaattgtatcccatgtttaactaatataattatgacaaatcatttaaatctattttagtaaaatttgcttctcaaaactaacggaaccactttagaggatctgttaaccttcaatatgttttgttaattaaatttcctttgttgctaaaccatttttttctacataataatatttaagataaatcaaattaaattagggaattaatctacataataatatttctacataattataatttcattttttttaccaaatgagtgtaatataaaataaaatatgatactgagttgtgaaaagtatgagaatcatactttgtaatgataaatataatcataaattaaattaaataaaaatattacagtaatttgatgtgttagaaagtaaatgatgagtgttcaaaaaaaaaaaagagtaaatgatgaaaaattgtttggtctttgttttgacaatttagttgtcacaatatttttttaattaatgtatatttttattgagcatttaaattatttttattacattaaatttgtgcatttaattatttttttttcttaggaaagattccttctgaggtggttttttttgtttaggagacttcttataagagaataaattcttttatggaaagttgtctaactttgggaaacttgactttccctttttctaatatttcggttttgtctttattagaacaaatcaaataaactttat

SEQ ID NO: 27351 - DNA, 1841 bp, Cannabis sativa
tttttttatttcccggaaatgggccccgggcctagcctgcctatacctaaagccggccctgtatcttagtataacttttataagagacattagaagtcacttttatacaaaaaattgtcagctaaataaaaataattataactttataatttaagtgtatcaatattgaaaagaaaattatttttgaaaattgcaatcatctaaaggttttacttaataattatacattcgcatagcaattctatcttaaagtttcaaaatatttgtaatcttgatttattaagtctaccttgtcaaaaagaagttagaagaagttactttttaattattaattaattaataattattttcaaatatatataaattattatagatatttttttcttataaaaaatagatataaaaaatagatattaatcatttgttttttttttttttttttgtctcttttaactaagttttaattaaattttattaatgcttatgttagttattattaaatttaaaattatatgatttttaaaaatctttcttcattaattaattatcatcgagaaagaaaaagaaaaaaaataataatgtagtttataacatagataatatactctataaaaattaatgatatagatagatagtatactccttaaatattaattttgtaattactgttctttttaaagcatcattacaatgaattatgctacaacaccaaaaataattaacaaaaatctattttatctagtaaaagataaaatcgcctaaaactaatagttaattttaataaattaaaaataaaaaataaagaaataatttataacatagataatatattccataaaaattaataatttagatagatataatatactccataaaaattaattttgtaatcattgttttttttttaaagcatcattataatgaaccgaaattatgctacaacatcaaaattaattaacaaaaatctattttatctagtaaaaaataaaatcgccaaaaactaatagttatttttaataaattttttaatatttaaattaataataaataaaaatttataataaccaactaattaaacaatgatcctaataaaaacgtgtaaccaaataaaacacagagaaaataatatatagataatgtttaatatagaatattaacgtgtaacctaatttctttttaccttttaatttttcatcttcaccataatcaataacctgaataaaaaacacacctataaattctattgattggaatgtttactattttttttttaattttagtctctttattgaagctgtagtcaaaaataaaattttatagtcatttaaaaataatctatactcaatctaaaccctgttgttgcaacaatcttttaattttgtacacaaagtctttacacaataggttctaaaatatataaattatatgatacactagtataacataattgacaaataaaaaaaacagaaaaaataataattgaaaaaaattatatgacacacaagtataaaattattgacgaaaaattagatggggaacaatttacacaattttctcatcaataaaatcatatctagaattactaattctacaaacttgattaaaaagaatactcatgatcaaaaatgaagtagtagagagaaatatgaaattaatggaaaaaattaaaggagagaattataaaaattaataggtataatttggatttatacactaaaattatctaaataaataaataaattagttacacgtgaaattataaatgatacctttttctttaaaaaatgtgtttgaagcttcttcatgaaattctttagtctcttcactactattttttttat

SEQ ID NO: 27352 - DNA, 5924 bp, Cannabis sativa
  modified_base (3777)..(3785): a, c, t, g, unknown or other
ataataaaattcataaataattataacagtaacagaaattagtgctaattgcctttactaatctaaattactaaagcggtcattacactaactccttccatgttggtaatagatagcaccctgttctgagctcttctagcccgaaggtaagaatgaaaaaaaccagagttgatgtcaccctctttcagccaatttaaattacttttttgctgcaagaaagaataatacttatcaagtgccagtgtataagttatctcgtggaaggttttcttgttgctgcaattcacagttcagggggtcattcgtcagtctatcttggcaaatatcgagttcttcctttgctgtcatagcagtagcaggtacatcgttaaaataattcctgttcagagcacacaacacctgctttaaacttctaagctcagccacaacttgatacatttttgatcctcttacttgctttgcccaactttcagccaccgaatccttataattaggatgtttagaccacatcctaaaataatgaaaaggcctcttgttcccacttggcatattgtagatagtaagtatagcaggagaatgataaaaaatgccttcattttgaaaaaatacctcagcaggaggaaaggaatccagccaagattgatttgctaaaactctatcgatcttggagtagattctatcttttccatgttgcttgttactccatgtaaaataattccctgtatacttgacatctaccaatttgcacacttccacacattcatgaaactcacttgcttctttgtaccttgctcgaacaccaatcctctcttccttgtgaaggatatcattgaaatccccaagcaccaaccaagcatcctttctagccaaatccttaaggtcttgccaaaggattcttctcccttcatcagaattgaatccatagataaaagtgacaaagaatcttgcctttctatctatggattccacaaagagatgaatcatttggcttgtacattttaggatattgactataaagctacccggcttccaacacacaattattctacctcccttgtgccacacacaattcgatgtaaagtacaatccttcaaacatacgtacatataaggctcccaaattctgagccttaactcttgtctcgaggagtccaaccagtcctatcttttgttgttcaatcaattgcttgacttacatttgcttttgctggttatttattcctcggacattccatgccaatattttatccatctccaagagaggaatctccccccctcccttgttaacaatctcataccctctatcattcatctcacccatttgatcattttcctttcccttatcaagctgctgcagcacctggaaagagttactagtgcctgtagcaactaatccctccccttatccttagccttccagcccttagcaactggccgaaacccatctgcatcaggtttcatctcaactttgtcatgcttctgcacattcttaacaatccactcttgctttcattaattttaaaaattatattatataaaactagttttgttttaaattttatatatatagggaaatttataattttgtatacattatataattttattacactatatagtacaatatagcttatttacatttaattatacattctatatagatacaaaaatataattttaattttctatacaatctatataaggtaattaatttttcttaagtcatatataaataaacaataaacatatatattttgccttacaacaaaataagtaaaataaataaacatacattttttatttataaaagtatatattaaatatattagattaataatttataaatattatcaatataaaatataaacataatgtttatacataatttcacatttggttatagttttgtttcttaaaacaaaataaagataaatgttttatttttaaacttatttatgaattttgaataaacaaattatattaattctattgaaacattatataatagacatattagatcaataattgcattataaatattaataataatcaaatatttaataaacatgtatatacattatttataaaatataaacaaaatttttaaatatgtttttatatataattttgtattaaattttaataaacatattattttagtaatatattaaaatataaatattgacttatgtatttttatatttagctctaggcgttttttttttcaaaaaattaattaaaaataatcaacatgttaaaatcgtaaacatttatgtttatttctattatataatatgactatgatgattatttgtaaatatttataaaattatatagaattgtataattatgtttttttacacatttttttgtaatatatttaatttacttgtatagaattaaaaattttcctattatatatgtatacattttttaattttttatataactcccaacaaatttattactactccaaagtccaaagaaattttaatgaataaaaatattaccaaagtagaatataaaattaatttatcctagatgagtacaatatatatacttttttttgttgtgcacatatatttttgaattaatgtacaagtgatttgtagttgcatttaagtttatttctttgtttgtttgttttttgaggttgttatttagttgtatttgagttgtttgttgctatttcataccagaaatatattatattacataaatcttaagctctagccaattagaattagtaagagataaatacaaaatcaaaaataaaaataaaataatataacaaccatgacaacgaacataattagtcaagctaaaaaaactaaaactattttctagattcttaaataataaaaattgaataaaaaataaaactagcatcatcaaaaacataatgtaaaaaaatacaatgctaaaaattataattgaaaaataatatcaactttaaaaatcagttcatcgatattaaaagaaactaaatattttattataagaagaaaaaaaaactagtttcatcaataacacaatgaaaataaaaacaatgcaaaaaaatataatctaaaaaccatactaagtttaaaaactagtttcatcaacatcaaaagaaactaattattttattaaaattagcataaaaaaaactagtttcattaataacataatgaaaaagtacaatgtaaaaaattataatctaaaagcgtcaccaactttaaaaatcggtttcatcaacattaaaataaactaattatttaattaaaaataaaaaaaatcagtttcatcaacaacataatgaaaaaatacaatgtaaaaaattataataaaaaaacgatacaaactttaaaaacaagtttggaatgtataaattctatatgaatacctaataaccaaacttcttacttcattctttattttagcattcaatctttaatttgctttctcaaaaaccagaaatgatttaagcatataaaatagggtaaagataacaaaggaaatcagaaactaaaaccaattttttcaacaacataatgaaaagaaaaatacaatacaaaaaatataatctaaaaacggcaccaactataaaaatcaatctctaacatataaatttatatgaatacataatacaccaatttctaacttcatattttattttggcatttaatctcttatttgcttgctcaaaatttaaagttgatttaatcattcaatatagggtaaatatgtccaatggaatcgcaaactaaaataaatttaatataataataataataannnnnnnnntaataataataataataattgacgcggtttttcgtcaactgatataagaagatcgtaaaaaaaagaggaccacggtgaattaatctgactaacaaaactgcaaaaaattaaatggacaccaagaatttatagtagttcaccctcatgtcgcgatggtaatggggctatgtctacttgtagttttattgattagattcgacacaccagagttatgttctcaagagtgtgtggataaaagtataacaaaagatttttagatgaaatcttaatcaagatttatgaatgtaagactcatgggagacttgatatttataaatctgatgtaaattaaaggttgtaaagttcttgggaacaataaaccaataatttatgtaaaaaatgtgtattaaatggtgttttgaggtctggtgtcgcctgagtatggtggactcaatgaataaggtgatggaaataatatagtgttcatggaagttgtcaagtgaacttcaaggggaaggtcacgatgaggaagatctagaaaagaggaaaatgtctcaaaaggaagaagccaaaaagaagtcagatccctttctcagcctcctacttgatgtatatataggctagagggtttgttagtgatccctcatacattgggatatttcactaacaaatcccgtatacaacttctttttatgaataaaatattacacataaataaaaatcaataacaatctccttatatctagacaaatatcccacaaatattggacaattggttattttcaattaaggatccaccaatttgaaaaagagtgctgaacacatgcattttagactatcaatgctcacgcacagcgggtgctccaccaaccctcgcttagccgcatttcccaattctcgagtaaaatgcaccagcttttattgcaagctaattttagactcgataacttcagaattgagtcatgtctgtgagacacactttgatccgtctcaaaattatctttccaacacaaattgaatcaggtcatttggataaaaattgagagagttatgcttgttttactgaaggcagtttatgttgtcttgtaccagttgcgggcactgccatggccagatggcagaggtcagaaatgcatgttatcgggcccctcggggtgtgttttgactttttttgtgatatcgagtcatatgttggaggtctcgtgacccaaaaacctcattttgacattcaaaaccctaaaagatgaccactaccaccagttggggctgaataatgacacaggtcacccatggcttgtgggaaaccataggtggtgtctctcacttgtatttgatacatggatgttgaaaatataatttggtcagacaattcctcttccttgtgtagtaacctacctgtgccactttaccatggcacaggtcaccaattttggagagcactgtcattctcttatggcacaggttacataaggcgactcctaggacgaaagtgacttttctcacttgtttcctactccttggtgtcgtgggaacccatctagaaaatttccctctcgttgcgaggagtgacctgtgccattctcttatggcacaagtcacctaaggcgactcataggctggaaatgaattttctcacttgtttcttgctctttgatgttaagggaacccgttcaaacaaatatcctttcatggtttgcgaggagtgacttgtgccattctcttatggcataggtctttaaaacaagagagcactgtcatttctcctatggcacaggtcacctaaggcgactcctaggctggaaatgacttttctcacttgtctcgtgctccttgatgtcgagggaacacatttccttccatggttcgcgaggagtgacctgtgtcattctcatatggcataggtccccaaaagtggagagcactaccatttccttgttgcagtggtcacttatcctttttctcttgtggttttagtgctactttgactttatacataaacttaagtcattttcatgcttaaacaagtcaagttcttattggtttccttgggggattgaggtctctaggatgaaaatgctcgcgtggacccatgaaccctcgtttgggtagacttgggtgtgtgagtcccgatgccatatggttggttgacgttttcgagcc

SEQ ID NO: 27353 - DNA, 2361 bp, Cannabis sativa
attatattgaaattggttttatttagggcacaaaacccaacagaacaggcatgtccttccgttgaggaaaaagaaactgctggagacgttgaagtccaggaaatggaggaccaaggtgaggtccgtcccgctattccttttgaggccaaaggcaatgagtaaaagggggtagctcgggtgctgccttattgtggctacaatgaaaatggagaacctgccttatcacatgttctcttactatggagggggtggagagaattagtccaagaagtgcagaaattctttcaagactcttagagattctcttacaaagggagatattaaaggggtaagattgagcaagggtggccctgccttatctcatgttctctttgttgatgacattattcttgttgggtgagccaatttggtggaggctaaaggtatatggaaatgtgtggataacttatattcctgatcaggttaacaagtcaacaaactcaaaacctccatctttttcagtagcaacaccttgaatgggatgaatacaggcattagagagctcatgggcattactgagccggatggtaatataaaatacttgggcatgtcccctgttcagatcgaggcttaaagagattgatttcaattttattatggataacttttcttctaaactccaaggttggaaggtgaaaactctctttaaggctgatcgagctactcttatcaagtccacgggtctttctatgccattgtattccatgcataccaccaagctttccagtcggataatggctaacatagatgacatggttagagatttcttaaggagttttgagaaagggaatcatgggctccacctcaaggcttagcacaagttgtgcctcccaaagtcttgtggtggactgtgctttcttaaactagtgagatgaatcagttaatcggagccaaatctctttgttccaagattttggaagcaaagtacttgcagggtaaaagtttccttaactgcagttacaaggattctgactcctggtttttgaaaaatgttgtaaaagctgaatcgataattcataaaggtgcttgtaagttggttgctgatgggaaggacaccaaaatttgggaggatccttgggtcactcacagtatcggtttttaccctaaatccattggtaatccttcacgcggctttgtctgggttgcagaccttctaactgagaacggggattgggatctctaaaaacttaactatttgtttgatcatgataccgttgtagccattttgaaaggaggaaaacctttagggaggggaagcgattcttgggttttgactaaagaaaggagtggtaacttttcgtgcaagtccgcttatttaatccaggcccttgattgggctcctcactgtgtagtctcgccctccctctagaataagctcttaaacagtaaaattctagagcatcctaagatattgtggtggagtatcctctcaaacgcgcttctagttcgttccattatgagcaatagatactggaagcgagaataaaactatggagcatcttttcctttagtgcaatctggcttatcacttatggcggtcctcctcgtggggtattttttatcttttagactttggtatccgtatgtgggactgggttaagttcatttggagtctaaaagataagggcattgatgtggatgaggagtttctgtatacctctattgtggtggacactatttagggggcgcaaaatgataaagtacataatgataatcagggtaacattaaacattatattgactttatttccttttgttacacagattatagagttgctatcattccaactcatgctccgacccgaatggatgtttggcatcctcccccacttgattggctcaaactaaattgtgatgttagagtggggatggagtatatgtacattgttgttgttgctagaaatcacaaggggatggtttgctgagcagttacgtcaagacttgattttattgatgctctttgcagtgatgcggttgcctgttgtttggctttggagaaaacagcagagaaggggtgcagttttgttttttttgaaacttgaaagtaactctcgagtgatgatcaactctcttaatggagtggagtccaaatgagataatgttttttgatcttgtaatattgtagcctataatgtggttatgtgaatttttacccacaatctgtatatttgtttagatgttagcgacataccttcaaacttactttgtaatgacctagaggtctaacttcattgtttaatattaacaccttttcctcaaaaaaaaaaaaaaaaacaaaaacaaaaaaattcatatcctctccatttctacgtcaaactataa

SEQ ID NO: 27354 - DNA, 1363 bp, Cannabis sativa
ggcgtggcaccgaatagggcggagtttctggggaggtgaaatcggacggtgagtgatgatgtccggagaatgaatcagagtcttgggatgggcgtaaatgaggtcctcagtcggctccgggaaaggagcaataagctgaggaaagtcgtcagagttgggtattagccggtcgccggccaaagcctccatagtaatagtgccttctgtgtttgtaaaatatttttgatttgtgtaaaataaattaaaaaaaaaaagtaaaaataaaattagggtgtgaggaagtgaagtgaacggtgatgttgttggtttgattgaggaaggtggtgtgggtgaaataatgattttagtaactaataatggggtaaaatgaatttacacacattttaatttgatttgcatttcttttgtttatgttatgggtatgggcctacaagcactgaggcccaattaccccggcctactcaaaattggatccttaatttagaattgtccagtgtccacaactcaagcctctcatacagaaaattgattttaatcgaggaaattacaattgtgtatcccctttactttatttgttttaatttttacttttacttttatatcctttaaaatatactttgtagatgatattcccattaaactctttaggttaatgtaaattatataacccactcataaaagtagatatattttaataaaatataatatgagagtatttttaaataattgatacaaaaaaaaggtatttttttaacttatctcattttaatcctactattacaaaggtgatgtttttcacacccccactaaattttaattgctaaaaggttaggtctgatgtaacaagttttaaaatatgcttctagctaagtgattcagcagtacatggaggaggtgtttaaataatgtggataggtatttttagactgattagttaaacattagtaggctagttctggagtgcacttgtatcaggcttgaatgtatcaagacttatatattttgcccctttttggggaaaatgtttattttatgttttatggtgttctttcactagccaaagggttccctttggctagttttttccttttattctttcttagctagcattgttgattgtatcgttttggggttgcgtctcttgtggtagtttgtctttgacttcgactcataattttcattgtggtgttttctggtttgttatgtcttcaggaagtatctctgttttacaagcgcagaccttggcacttttgtttgggcttaattgggctctttcttgcgaaatcgaaattaaagaggttttttccgattcgctgtctctagtcacagctataaacaaaggaaaggtttttttcaacgagct

SEQ ID NO: 27355 - DNA, 3268 bp, Cannabis sativa
ttatattactaggggaataacattgcaagactaaaccctccaaacaaacaaggtaatgtttcacattaccattcccttactaggattaacatattccaaagagccccttagagttcaagtccttttttgccttacctagtgccttttatataatccagggtgtattcaaaatgggtaaatcctcaaaataagaaaaataacttttctatcttatatttaaattacaaaaaaaaaattattaatatccctaaagaataggtaaatattagcttgaagaagatttcctatttcaatagttagttaaggttgtctcctaactaaatattagcttgcggaccccaccatttatatgtcctcttgctattagtataatttaatatcatctcatttattttatttaataaatattataaaaattattaattaattataaaataatattttatcgtgatactaagcaccataaatatttcataacaatactcattttcaataattataaagtaattaaccaaaaaaaattatggataatttgaactcgccagtcgcgtaatagacttcagagataagtttgtgtttcttaaacttttaaaaggaggaccacatcaaaaaattcttgacttaaaatttcaatatatatctttgaagtcatcggtcaataataatattagataatctttttataaagagtagtgttataattggttagttatgatttttttataatatttattaaaataaaatacttgggaatagtaatattccatttaacatttctcggcctgggttgttgttggacattctgtaatcaaaactttaagcccaccaaaaaagaaaaagaccaaacggtcaaccgctacttaatatttatttatcatataaataaaaaatccatgtatattagatcagtacgcagtaacgcagctagccgcctcgccctagctagtgtttgccataagagggcaaatctggttttggtatagaagaacaagaagagagctatgaataccctggtccggagcacaacgtctactctcagccgaagattcgacggatacgagccgttggatcatcaagatcaacggagcctgatcactagggacgatagaagccaggttatgaagaggataggcttgtctaagtctaaacgaagtgacaagaaaatattggagggaaatcgattgagtaaaaataataataatagtcgaagctacaggaacaagagagccaagcacaggcaaatatttctgaaaagttacacgttgacgccggtggagactcggaaagtggaggacttggctactaaggttaagaaagctctggtttcggctttgtcgcttattcgctttggctcttctccgttcggatcttgtaattgtcgttcaaccactgctacaaataattcctcagccaagcgcgtccttatttaaaatgaaactattcaatattattaatgcttctttttcttaactatatattggttcgctgttttaattttattatgtgaagctgaatacaaatagctagattagtggttgtatttttggaaagagtgaattggtcaataaatctcaagtctcaaattgtccttcattaatctatataatatgaattacatattttatatcctacaaagcaaaagggggaaaaaatgatatttgtttgcttatatttataataaaacttacacaactttgtatttggtaactaaaagtataagttcgaaattacatgtttttaatttaagtaaatctattcaaaccatctggatatcaaatttcactttaacaaatactcaaactcaccgtattaccaaattgaatgaaagaagtggcgttagattatctccaattcatttgatatttttccataaaattataagaactttgtctgactagtttttatacatcaaacatagtctaaatatagaattagacttctggataaataataatacattacattattacactacaattcataaaacaaatcttactatataccaaattgaaacccaaaagactcggcattgacaattcaaggacaaaatcctctgttcctctacatccatacacatgttacaaggcccttaatacctggaaaacaaatctaataaaataaacatatacataaccaactcattcaacctcttcatttccattttccctgccaacttattcgcctcaattcaaaaatctagacctaaaaacaaatcacaaaattcccaaaacaaaatcctctgtttcattttttttatcttacttcttactatgcccgcaaaagggcttgttaatccaaatccccatattgttatttccaacaacaatggcttccggttaccccaaaaactacagtatgttctctgaaaatgaaggtggccttaagccgccgccgtaccgccggaacatccctcggtatcagtcttacaacaacagcaagaaatctagctcaagctgttgttttcggtgcataggctgcttctattgctgcctatttctcctggtttttctctctgccatcctcactttctacctctacacaatgtacaggcctcaggtcccaaactacggcgtcaacaacttttccgtcaacaccttcaatgtcatgaaggacttcagcctcgaagccgagttcgtggtcgtcgtgaaagccgacaacccgaacgagcatatcggtttcatctacggcaaggaaagctacgttattgtaacgtattcgaattcggaactctgctcggggaagctgccggcgtttcaccagccggtgaagaacacgactttgatgagtgtggtgctgaaagggaagagcgagttcgggtcggggatgcaggaggtgctcatggataatcgacacaccgggaagattcctctgtttgtgaaggttaaggtgcctgtgagtgtggtgttggggagtcttccgttgagacaggttgtggtttttgtcaactgttctttggtggttgataacttgcaacccaacaagaaagcaaggattttgtccagtaaatacagttacaatgtcgagttttgaatattatttggtaatgatggtgatgatgaagattttgattaggggaaaggaaatatataaatttaggttagtttttctgattgatgcatgcaaatctattcttttgttatatattgcaattaaagaagggaaaaaaaaaaaagcaaatacatggagaattttttttgatgaaagttgtgtgagttctctaattctaaccaaattattattatttttttttttttgagataattctaaa

SEQ ID NO: 27356 - DNA, 2371 bp, Cannabis sativa
ttcccaatacacccttctcattctcaccacactacatattcacactcacacttttctttttacaatccactcttaagaacgttataaaatatatgatttcaccctaaaccgacattatatataacgtacgtttcaaaatatatgatttcattttattagtatataatatcaagatcactgtagaagggtatcaaatgtattttactgttctcattatagattgtacatatattgtatatatatttacgtattctcaccttacaacaatttcgtgtaactatatttattattgtacgtaaaaaatagtgtagtctaacattactctatatctatgtatagttatatatatatttatatatttatatatatatataagaacatttgctgaaatcaagttcaagaaatatttttgtaactaatatatattactacattacattgacatcatgtgttctatatatatctcaaataattgaatcatcagaagaaccattatgtgaggatataaacccttaaaacagggtgtttgtgtagagaaaatacaagaaaattaaatgcagccccggcatgaaagcaaattgtagtagtaatagtaggaccccaagtcacgtttcactgctacgtacggttccccctctttctcttaactactcttctttcttagctaggcacttcatttaatttacatgcattattgtatattatataaactcattcaattcatcacttactctatcgttttcttatttaatgaaaatacttttgacttttcttgttagtcctattcatcatcgactgaataccataaacgtagattaatgaataaaggctaaggtcagaaaaatatgcgatttagttaactaatatatacttatgaataatccttacattttttttttttttgagagtatgaattaacccttacattacatgcatataatataatatggtgatgtcgttataattatattataaattattacaaaaatatgtatatatagacatatatatatagcatgtgatatgcgtgcccaacaattttagtaccgactcacctcaattagctagatcatgagcagtagcatagcctcgactaatgaaagtgaattatatatctatgtatctatatctatatatatttatagatatatactgtacgtactactgcttaatttaaaattaacttattgttgatctatgatgagtagtttattaatcatgaactcataagttagttaggctctgttatacttgataaacgtcttatacctactcttttgaataatatcgttaattcagatataattaaagctatataaagagatatacacatgcatcggatatatagtttatacagtcctaaattatctgtcaatatacgaccccctttattattaaccctaatttatattatgaaattaagctgatatatatccaagaaatggctatatgctaaaaaaaaaaaaaaagagatggctatatgtatatgtcgtttctatattgattaatttcttggatttttctttttaaaatgtcagaaaggaatctttgaaatatataataagtgacataaaacccatattacattaatgaataatattgtaccacgaaataaatgaactaacaaatatatatatagtttctgtcccccaataatatttatttgatatctacatatatatacatcttagtatatatccaagaaaatccaggatcttaattataggcaataaggacttttaaaaccatagttatatgatatacataagtgataatatatacatgaatcgtagctatatatatgatgcgcgtgtatatatataatcccaattttgatgtatatagggacttttcatatcattattataaagaaaatcaaacgcataatcctattatatttataaggaaaaagtaaaataattaagaatataacatgtacataaaaatataaacagaatttgagaatatgagtaataagatattataaagaatcaccaaatgtcaaaaaaaaaaaaaaaagaatcagcacatacctggagaaattatttggctgagcgagagaggtagctatataaaattgtggagatggaaaagtgtaaagaaaaaggagatattgacgcggctcaatcaaattactcagctaattattttatcattggtcttagccttgtatttagattgagacgccccaatacctttttctcttttaattcatcactatccacacacacacatataagctagcttcaacgaccacacacacagcttcccaaagtagtatatatataatcgtcatctttatcctttctctctcttaatatatatatatataagatcttttgctcttgctgggttcagagagagagagaga

SEQ ID NO: 27357 - DNA, 3973 bp, Cannabis sativa
  modified_base (1610)..(1612): a, c, t, g, unknown or other
tttatattaaacatataattatagaaaaaatttaatgaaaataaaatttcattaagaagaaaatatcgtctaacaaagtagagatttattcaacaggaaaatttgcggataagaacaaaaaactctaactaagctatgagttatcttgttagtagaacgatacacaaataaaataaagacaaacctttaaacaaacaaataaccttggacaatcatcaactactaaaccgaaaggagagctcctaattaaatgactatgaacagcattaatcgccaccaagcaatccgattcaagcatcactttgactgaacaaatcccaaatttacttatcttattgataaacaatacttcattaactttatggtcccttgttttctttttataagagaaagttttatttgcattaatcaattaatgagaattgatatatattatgtgaaattagaatatgttgaatacataagtgaagacataatgttaggcgccactcatacatcgcaatgatcttgataaaaagaagtaaagaatgttagggtctttgcaatggcagtaactttaacttttagaatattcactacgcgtgcttaaacaaatgtactaggtctctctacctagtctttctaagcttgtacgttgaaaaagtgtaattttaaaaatttctatacatgaattgctcatctccactggccactgcacatagattattggagtttggagacttttagtttataaccttttcttctcttttttcacatggtgccaatgaaatttagtcttacaacttttacactcattacataatgtaacattatttctaataatatatatattcgacgacagagtttgtacgtgctaattagtgtgacctccatattttaatcttctattatcattacaaatcataatacaaatttgtaagatcatgtgataatgtcatcaatattatatattataaatctatctcaaacattaaaacatctattttctaaaaagaaatcaataaatataaataattgcataagtgatattaggtttcccctcttatagcacatatttgtgtttaatttttactcatcaaatataattctctactagatcaattcttaacagtattgtgttttgtataattggtgtaaaacaatttagtagaattaaagtatagaaaagtcatatatatctttgacttgagaggtcttatatgaaagagcactgataagggacagagggttcatatcttatctgtggatggattcatgcaactccattgggcccttattggacctacgtccattgataaaataatttgaatagtctagtcttgtctcacactgggagacgggtgtgtttgaagagtactttttaggaataattacccgctatttttgtaaaataattatatttttatgttcaaataatatttttttttacatttttacaattttctaaaaaaaaaaataaaaataaataaaattaacaagaaaactacataaaaataatatcaaaataatattaaaataacaataaaaaataacatacagataataaaaaactaacaacaaattaacaagattacaatataaaaaagccgtattttctgtaaataaaatannnaaaatcgtaaaaatgtttaaaattgtgtaaaaccgtatttttgtaattttttttttggttgtttttatgttttgtgaaataattcctactttttatatattgctttgatttgtacaagtatttgtttagcatcaatatagaggccttgctggagggcctatatttgttgaataatactacacagaatttgccatatataggcaggaatgaatactatctatatatatttatattgctttaattattaagtggtctaagtcctaacttatatcatttccaccaaggttggtggtcctagctctatacacagacgaaggagcatcttatttttcgtttttgaaactagctgtctagctagggttaaaatatgctatgtatctttcgttttgaaaacaaaaaaaaagtaaaaatactaccatcttttatagtacaatttatgaacacaagtttccacatattaatactaactaatttattatcaagcataaagcataagagttaacagtgttaaatataattaattcataacaaatagatcttttatttttaaaataaaaaaatatatatttttatgattatgattggattacaatcgagtcacaattgtaaataaaatgctacatagtaagatcatttctaatgcaagatgcaaaaattgtatcacatttggtgcaaaaaaaaaatattttgtgatatatttgtattaatttttgacattgtgctccaatataaaattataaaatttgatggattttttttattattataagaataaaaaataataatagctttattattaatattattattttttttattatgtaaaacaataaaaaaataataaataattcatcattaatgcaatggttaaacatattaataaaagtaacataaaagtcaataataaaattgtgcatttatagtgataaaaattttgaactatagcaagtgttgtgctaaatttagtataacatttgatatgtgttaaatttgtatattttttggcacaagcatattttttcttaaatggattatattttagctttatatcacttatttgcatattcaatagagatgctctaagtgagtggagtacgttaaatattatgttaattttatatattctactaattttacaaaacaaaagtgtctgaattgtactcactaaacaaataaactgatggattgacataaaatgatctggtttaccaaaaaaaaaaaaatgaaagaactgatgggttgatccataacttttataaaagtatgtcaaattgataataatattaaaaaattaataagaagaaaagaataattgcccataaaagtactctaatattattggaagctagcttctacattgttatatgatgaaaatcatccttactgtctcttcttaattagaatttaggaatttgttaaatgtaattgtttgaaaatataatagatatataaaatttctgaattttcttgctaaatctatttttttttgtttttttgtttttgagatagaatctcatacattttaccattcactcactctatttttctactctagtactcttccactccttaaagattgacatggacttaaaagaaaggagtgtgacaaaacaatagaagaaaataaaaataaataaataaataaacaggatactcaactttcaaaagggagcctagcacaattttaaaatattattactaatgaattacaccgtaaacaagaccatttcgaaagctatagtatagtccgcccataaatcatcatgatctacttgcatatataatgatccttgttggccataaaatcatgtatgcatgtttttatataatttccttgagctgctaaatgaactaaatataaagctcctggatatgatgtgcattttctcatcctgtaactaccctagtgttgatgatgtctctacacatatacatacaatatttatatataacaataagtgagacaataagtaccaaaaaacacagaagggtaaaacagtggtgacgtcactccctgaattgtctttccctatttgatgttcttatcgtctttctgttttttgacttagttacactctatacatgtctcttctatctttgttataattccaaagaactaataataataatttctttgtgcaattgtggtcccatatatctctatcccactaaaaaaaacaccactctttttatttcaatttacagttgaagttatatttattgcaactagtagtaacaagtaagtaaactacttgaggctagctcaagtggccatagaaggtgcgtgtatattggaggtcctgggttcgagttccaaattatgttgatataatatataaacgcttaaataataaaaaaaaa

SEQ ID NO: 27358 - DNA, 1401 bp, Cannabis sativa
tttgcatcaatgttgttgctggtttgggtgtttggcagcagggtctcatcaattggtatcagagcaccgactgcggtagatgtcgataacaaggatggaggataaatttgaggatcaatggaaatctcagtcttatcattatcaatatgaatctaatatattggaggaccttgctccgcttttggatcaagtaattctcaggaaagtaaggttatgtcgcctcgcctaggatctccaaagtcatgtcacaacagtcccggaggaagatgatctcactgagtagatggaccaaatcgtgcaatcagtttgggtttgcaacttggagcgcctccgtagtcacaacgcaccgaacctgatttatgttctatctccaacactagctacggatgttgaaggtgataaagagatggaaagggcaataagagaacacaaatgagcgttcgctagactcgccagcttcagagaaacagctacagccagcgacttcagggagtagaaccactgtttcaaggagtgactgagtggaattcacgtgttttggaaggtagggagagcacactaaactttggatgcctttacggtactcaaagaagccacatctaaagtccattgagtttgctcgttggtgaagttgcccgagcagcacaatctaatggagacaacggcttagaagacagagtttcgtggggggtcgtcctttccctccaatctatcaagagagtccgagtgattgtagttgctgccttaatactcgcacaacctgagaaggttgaaagtgatgaggggtcacctgagaagaatgaaaaaatcttgcagcaaatagacaaagagaacttaaatgactaggttctttagctagcgtcatcacctgagaataatgataaaagtcactagcagtaacgcagacaagaaagagtcgctagaatgggttccatcaccgtcgtcgaggttaatcacggtgctggagcggtcagcagtcgcacacgacaatcgcttccatgtcgtcaatcaagagttgtgatcaactgataaactctaagggtacattaaaaccctattattttagacccaagcccaacctattaattaatatttcaaatatggcccattcatcttttattgtataactaattctagtgagccccaatccatttactaataattcaaatatgagcccaatccatgggtctctagcttctttacttactccaatttaggctcaactaaacacaaaaatgagcccatttgtcgtctacgatcaaggaccaaccatttcggatccaagtcctaggctggaactcaattgttccaaaccacaggaagttgacaacccactttccaatctcgagttcgtcagccaccacagatgttctccttctaggcttcactttaattttgtct

SEQ ID NO: 27359 - DNA, 2873 bp, Cannabis sativa
atctcggaattctagaggtgctagtcctactcctgttgatagtgacattgacgagtctgatgaaagtgaagagagtttcaaaccacatagaggtgacggaagaaggcaggaaaggattagcaggcccagaaataatgaagggtacaaaagaaatgctcccgtgaactttagaaagagtatgcctgaagaggattcagatgaagagaacgtgcttagcgatcttgaaactgcaatgcagcaatcagatgctgatgaaaaacatggctcgagcacagcaagagcaacgaattataattataggagtgacagcgatgaagaagagaactcctataaccgaaaggaagagaagggtagaagattgacttacaggagaagtagtgatgactctgatgaatgtaatagacttgaggcaccaagagtagtaaagggtactcgaagaatgacttacgaaagcagtgctgatgattctgatgaatgtaataggcttgaggcaccgaaagtagcgaagggtagaagaagaatgaattatgagagcagtgatgatgattctgatgaatgcaatagacttgagacacccaaagtagtaaagggtagaggaataacttatgagagcagtgccgacgatactgatgaaaatggtagtagtttcaaggtaccaagagcagtgaaaggtcggcaaaacagagctggcggcactggtattaatgaagatccactaacaagtaccgcagcagcatctagtcattcagaaattgcttggcttgaagaagacgatacagaagcatcagggggcggaaaattagattactggagcagtggtgatgaagaagagtaccaagtcaaaagtgattacaaggaaaagactgatacaaggaaatcaaaatcagcaaaagagatggatgaaacttgggatagtgattaattaagtaggctatcattatcataagatacttgaggttgaggaagcccttcataggactttgcctttggacgttcatgaacatgtgattattactaatagtaagattcagcacattaacttggatgaaaagttggtggtacattcatggatgtggaagattgaagagagtttataaactgagctggttttcatatttttgagaagcttataaacttcatttctctattagaatgaacacaaattttgtactttatcgatttttttggtgtattggaaaaatgaatgaagatgaacagatgtgataactattgccaattatcaaatttacgagtataatttaataattatatgcttttagcatatgaatggccactgattttgttgtggattagtgtcatactgaactttaaacatcacgtgttgaattaggtttagtggcctttcatgaaaaaaaaagaaaaaagaattagatttagtgggaggcggttaggagagttaggccactaaaacatcgtgagggcgagtgggactgaaatggcgcgtgggttagaattatataagtgtgatcataacacgtggcagtcagaatctatgccgaatggaaacaatagagtccacatcatgatatagaaaggtgtgggccccacggacacaccacaacacaacgcgtatttattcatgaaatttgaaactccttttttattcttattctccttaaaaaccgttgaatgaaaaaacggtaaatagaatttagaaaacttatttaatttcccatcaaataaatgatgcacacccaaatatatatatgcaccttaccaagatatagggtttaggatttaagatttaggtatgttaaatttttttgaattttttacaattatacatcataacatatataattatgaaaaaaaaaatttacaataaaattctcttagatatcaacagtgtatagaatttttatttaatatataagtatgtgataaatatgtgtaatttgaatgtgtgttattcttaagaaaataagaatgtttgctagatattagtagtattaaatattactacaaaataatattttatgaattattaaattaaaatatacatatctaattacatcaataaattaaaataacttgaattaaaacacgactaatgatctccagtggtagtgaatcaatttgcctacttactgtacaggcaatttacaacaatttttctatgctttctcctttcaatattattatttaccactataaaaaactattggtttttgtttattgttctattaatagggtaactcataatattgctaaatcttcttattattttttaaaaagttgtttctaagaatgatgttcgcgctgaatttttatttattattgcttaagtcttaatttttaaatattcatagatttaaaaaaaaaaaattgtggtgaatttttaaatattaaaataataataataataataataataataaatagaggttgctagaataggcaattagaaagtcagcttttaacgtggagggaaggaagatgtcacaggtcaactcctacttcatccatacacgttgttgcattttaccaatcaattatcaaaaataccactttttttattttcttttattttatttcgtgtgtgagattatcacgccaacaacttaagttcaattaaatttttgttttgttttgttgttactttatagttggaaataaaataaaacaacatctgaattcaatattctttttgagacttttttcttacaatcctaattgattattacttccccaagtgaagttgaacaagtaattaaaagcaaaagagttttataggtttgatttgagttaataatagctttagaatccccacacaatgagttgaacaaccatcatgatgtgttcacctaaaaatgagtttataggtttgagttattggttaattagattcatta

SEQ ID NO: 27360 - DNA, 2569 bp, Cannabis sativa
gtttagtctttttgccatggtattcagcattcctctcactccataaacaccacataacagttataaagagctcaaacaaatcttgggagaggacagaggagacatgaaccatgaaatcttgcattgaagtgattcgagacagatgcaaacctaaaagaagatcccattgattccaaacttgttttggtctcttgcagcagagtaatgcatgaggaattgtctcaggttggagcttacagactggacacaaggaatctgatgcaatgtgtctaaagtgcagaattgcagcagttggaagtgcatcatgaaaagccctccaagcaaagatacgaactttagatggtagtttcaagctccaaaaattctgccaccaatcattagaggaactagaactaccaagagcagtagtatcttgagagtctgcagcaaactgatatccacttttgactgtgtagcagcctgttgaggagtaatgccaaatccgaatatcctcagatggataaaggcttaatggaattgtaagtatattatcaatgtcaggttgtgagaaattttgttgaagtgcctctaaattccattgtctagaaccagtaatgagatgagcaactgtcatagcatcatctcccttataaaccagtgacaaaaaagatgaatgattaggaatccatggttgagagttacattgaatattagaaccagttcctactcgccatcccagtccttttttaagcaactccttaccccaaactattgatctccaagtgtaagagggtgtattacccaaaccagcatttaacagatcaccatttacataatatctatgctgcagaattccactaagtagagagtttggagaatccataaggcgccatgcatgttttgcaagcaaagcttggttgaaatgtatgaagtttcgaaaccccatacctctccatgcactttagctttttacagaaaattccaattcttccaatgaattgaatttccagaagctgaagaaccccaccaaaacctcgccatttgttgttcgatttgatgacaaagctttgccggaagttggaagcaactcatagcgtaagttggaatcgcttgaactactgccttgagaggaacctccttcccccctatggagaatagttgttccctccaagaattgagaagcttccatattctgtcagtaatgccactaaagagctgacttttatcatgtcccgaaaaagaaggaagtccaagatagcgttcatgacatggttgaataggcatatataccaagtaaatgctgaaaaaaattctgctctgtacccctggtatttggcgaaaaagagaggacacatttgtcatgattgattacttggcctgaagcacgactatacaagtcaagacatctgctaacagcagtagctgaagatctagaagcccgacaaaacaatatactatcatctgcaaagagtaagtgcgaaactggtggtgcaaatcttgatactttcaagccttctagattaccttgggactcttcatattgaagtaagcgggagaaaccttcagaacagataagaaatagatagggagaggttggatctccctgtctaattcccctccgaggagtaatgttaccatggacaacaccattcaaaagaaaagaataggatgctgtttgcacacatcgagaaatcagctgaacaattgtatctccaaaccccattttgagcatgacttgttgaataaaatgccactcaaccctgtcaaaggccttactcatatcgagtttcatggccgcaaaacctttgttacccctctttctatttttaagtgaatgaagaacttcaaaggcaacaagaacattatcagtgataagtcgttgtgatagaaaagcactctgaaattccgagataaccaagtgaagaaaaggctgtatccgaagaacaatggttttagacacaagttgttacagaacattgcagagacttataggtctgtactgtgtaatcttggtaggctttttaactttaggaatgagggtaatcaatgttcgattaagcaaagttggatcacaaccattgttgagaacatcaaggacagctgaggatacaagaggaccaacaacagaccaataatttgtgtaaaacattacggacataccgtctaaactagggcttttatcttcggacattgatttcaaagcatggtaaacttcttctggtgtgtacggttgagataaaaaaaacttgattctctgctgaaattgtagttggaatggtggatagcacagtctcaagagcattctgatcgattccttgagaagaaaaaattgcagagaaataattatctatgattcgaaccatctcctggctactggtgcaagtaacaccagcaggatcttcaagcttcttaatccgattattcgaatttctgttattggcatgttggtggaagaatttcgtgttggaatcaccagattttaaccatgaaattctcgatctctggtgccaataatcttcttcttgagagaggagctcatccaaaatggcttcagagtttttaagagcagcaaagtgcgattgagaagtgt

SEQ ID NO: 27361 - DNA, 3591 bp, Cannabis sativa
  modified_base (49)..(73): a, c, t, g, unknown or other
ggttcgaggaggttccagcgccggtggcggacgtgggcgtcgtaaattnnnnnnnnnnnnnnnnnnnnnnnnnaaaaaaaaaaaaaaaagtttctaaaagtatgttttttttttttaaaaaaatgttttttatggggaaattataatatatagattaaaaataaagaaaaaaagaacagtatatggcaattaattgtccttacctgtttttcctttttttttttcataaaataacaattttttttataatatttacttgatgaaaaaaagttataatttttctcacatagtataaaatcctaacatttgtaatttccttttatgacaaaaatgagtaaagtaattagactagcaatgctattcaattttaaataataataataaataaataatctatttattaaactcttcaaaatactattaagaatttatttataaataaaattaaagtcatattgacccaccacaatcgaaggtcaaagagatgaaataagaaagaaaaaaaaaagtattaacgattattacaaaaacttttttcttctatttaatctcctataataagtagtgttaatccaaaaatatttgtaaaatttgttgaggattagctgaaatgataaattttttttttgtgtaaatttattttatatattaatgattgtgtatacattaataggaggagattgcattaatggagtaaatagtggccattttgtacaagggatttgtcattatgtataaaatcatttaataggcatatggtggaagctttgattaaattattgtgtttggattaagtggtatttagaaaaggaaaattgattaaatagttgtagtgcaaaacaagtcaaatatatattaggtggggtaattgtattggtaagtaaaaggacagtcaagcttataatatgtatcataagtcaaatatatattatggttatgataaaaatataatagacaacaagcttgtaaagctggttgctgcttgagattgtcaagcttgtaaacaagtaacaaactgcttaagaaagaataacttataatgtatcctagactatgttcattcaaattaatgggaacttgagaaaacactaacctttggaggtagtgtctattttttgtgtattatggacatttattctagaaaattttaggttttcttgttaaaacataaaaatgaagcctttcaaaagtttgtccattggaaattgctcgttgaaatctaagtaacagaaaactgaaaaacataaagaacagataatggcctagaattttgtaatgagaaatttacagagtattgttaagacaatagaattataaggcattggacagtgaggaaaatcccttaacaaaatggagtttctgagagaatgaacaagactttactaaataaagccagctgcttgctattcaatactggcctttccaatgatttctatagaaaagaagtggtaactgtaatttacctaatcaatagatgccactccagtacaatagaagggaaggccccagaggaaattcggtttggtaaaccactatacatttctcatataaggtctttggctgtgcaacatatgcccaccaaagtgttggtaagttggagcctaaggctctaaaatgtatcttttgggctacccagaaggagttaaaagttacaggttgtgggttaaaggaaaaggagggttcaaaactcttataactagggatgtaattttttaagaaaataatttttcttgtaaacattctaatgagcttaatgcaggtactacataagataaccctataggtacaactattgatttacaacctgaaacaaaacctaatccagatgatgtggaaccaactcaggaggaaccacaggctacactagatcaggtggaacctgaaataaaaaatgagagatatataaaccagggacacctggcagatgaccagcttgctagggacagaacaaggaggccacttaaacctaattaaagatacaactacaacatatgggatgagaatattgcatatgcgcctacatgtgcaagctagaagtaaaaatctataaaccaaagtagcctggttggaagcaatgaaggaagaatgtactccttgattaagaacaaaacctaaagagttgttcttagacctgaaggtaagagtgtagtgtcctataaatggctctttaaggttaaagagggaaggaataaggttgaacctgtgatgtttaaagctaggttagtggcaaaagagtttacacaaatggagggagtagatttcagaaagatattttatctagtggttaagtataaaactataagactcatgctatctttagaaacacagtttgacatggaggttgaccagatggatgtgactacaactttcctacatggggatctaaaaaaagacatctacatgaacaacctaagggatttgaggtcaaaggcaaggaagggtatgtgtgcaagctagaaaaatctttgtatggattgaagaagtctccaagacaatggaacaaaaggtttgatacctttatgactaatcaagggttctataaaagctattatgatcattgtttgtacttcaaaggatttgaagtaaacaaagtcatctacctatcactctatgtggatgacatgttgataatcaacaagaatatggctaatgttgacaaggttataagaatgctcaagttaaaatttgagatgaaggacattggggtagcaaacaagattctagggattaacatcctaagggccaaagagaaactgatgttacactaggaagattataatgtcaaaatcatagaaaaattttctatgaaggttgccaaggctgttatacagctaattgccaaccaatatcttatgtctaataccatgtgctctaaaattacagtggaacaagaaaaaaatgatagaagcaccctacttaaatgtagtaggctctataatgtaccgtatgattagcaatagacctgatcttgcttatgcaatcaatgtgctaagctggttcacgtctaactcaggaaaaaatcattggaaagccatgaaatggcttatcagatacttaaaaggcacaactaaagtaggattgatgtattaggcatttcaagcacaacagaatattgatggatttacatatgctgactatgcagtacaagggatagagacacaaggagatctacatctgcctattttttcttaagaggaggtaattgcacgagttgaaaagtgcaattgcaaccagtagtgacccaatccattattgaatctgagtaaatatccactacagaggaaattaagaaagacctatggataaaaggtcttatgaaagagctaaacctagttaaaaaagaccatattatctacacagatagtcagaccaatatcgacttatatgaaaacactatttttcatgacatgactaaacacatagggatgaaatatcaatttatcagggataagattactcaaggggaaattagaattgagaaagttcctataaaagtgaatcctgcaaacatgggaactaaggtggcatttgtaaatgagtttaagctttccttaagcttagtatgggttgacataggttggtaaaaccctt

SEQ ID NO: 27362 - DNA, 4866 bp, Cannabis sativa
  modified_base (3494)..(3494): a, c, t, g, unknown or other
aaaaaaaaaaaaaaccgaccaaatgccaaatggcggccacgagcgccgaagccatttaattaaattaattaaacaaagccataattcataaatattatcatttttaattttaatttgtatttttatttattatttatttaataatttaaaattttaatgtaaaatattggtggtgtggtctggaattaagaaacctacctttgtaaaactcatatttcaaaaaagctgctggtcccttccaatcctttattaattaattttattatttatatatgtaaattgttcttaaatttatgaagattctccatactacccttttattttttctttttctttttcaatttaattttgcttcttttcatctttaataaaatattcttatcttttgatttttataaaacttggggaggaagagtttgattaattgtatggcctaggctaccaagcaaaaaaatatatataattgtttcggtagatttttatttatttcggtatttaagagagttttttaatttatttttataattgtatacgtttcagttatatagaattacttgtaaattttaaaaaaatttagtaattaacaatggtaaaaattaaatttaaatactttattgtatgtgtgggttttttatacgcgtggtaattaattatttgaattttattttcgacacgataaaatatttaaaaaatttaaaatttatagataatcctaaatagctacaacatatacgattatgaaaaaaaaaaattggtgtaggaaaattactactgaatgtgtagaatcaaatcaatgaaactcaaaacaatcaaacaattagcaatgacaatattatcaaatcaagaacaacaatcaaaaggaaaaacaggggcaaacagaatattaaaaaccagaaaacagtaaatgcaaaaaataaagaaatcaacatcaagatatatactggtttaagtccgatagatcgatgtgatttatgactctactctagttctaaaacaccaccgtaattcttctttattgattaagaatgtgtacaatacagttgagatgagattctctattgagtcctcacaaagtatttcaactctcacactttataaagaagattcttcttacaaaacccaaactcaatctctctcttttctttgcacctctctctacctctcaatctttctctctcaaactctcaatctcatctcaattttgcacgtgatctagtcctcttgaaatgacaaagtcagggtgatatttataggcttaggattaagattctaatatcggtagctgcaaaaaatgggttgttaaattagttagaaataactaatttaaccaactcctctatgagcgaaatcctcacgtcagcttaagtgccatggcctctgggaatataaacgagcttctggactcgaggaccacggagtctcgctgaagatggttccagataggataaagtctgatgaagtcaactatctagatctgtcattccaatagggataactagccagttggaactcatttttaggggagagctagctatcttgaaaataggactgaagtgaacatgatagtcgtccggaaacttcctctaggatggataatagcgagtgaacaacttttcagaaatgacgattgcaaagacttttttatttaaagaaactataccacaattgaattaaaaatttctttagactaccgaaacagataagaattttaaccaaaaaaaaaaactctttaaagggtgtactagatatatttcttatattattcaattttctttttttaataaaaaatctgataagttgtatgttttgacttttgactatattaacattgtattggtaataatttcaatgatttagtacactaagactaaatattactacccttctttgagtatttggagtggtgatactaattgatattcttaatcttaattagtcaaatatgcacacaaacaaaagagactaaacatgattattcatttgtacaatcttttaataactattaaataatacaataattcattatagataaaagtatttcaaacaatatttctttagcttcctcaaatcaacttagactttcaacctcttactcttctctcctagtatttcaatattttttcattcattttcttaaaccaaataataatgtaattcaaaaagaaaaaatatgggcacacaaattacacctatattaaaattaaaactcatcatgattacttcttaattgcaaacatacttattaatttaagtcttaattatccaattgagtgaatattaattggttttgttaattaaaaataaatcatgacttcacatgtttattagcttgtcatttgcattaataagacaaatgatagagaatttgtgtttacaaaaaaaaaaaaaaaaagtcctaaattaatttattattttcaatcacgtaattttgtacatgtggtcttattttgaaatgatgaaaataatctatctttgaattttttttgttattactttatttattttataatatttttatatgttgattttaaatttattcgatagacctcaatttataatttttaaaaatctctaaaataattaagtcggccctaccttctctctcggttgaagaccttctaatgaaagtacttagtaatttgacgataatcggatctctcggagccgaaggagattggtctagggttgctctttagcttacttttattactctttctttctttttttttctttactattttttattaatttcgacatacatataataattatctaattactaaaaatttattataaaattaaagcatgatagctataatttttttcacattattttttgttttttcatactatcgatcctctatttaattccttgaatcaatttttttttcttaaaaacaaaaatatatactttttaattaggttgtgaacaaaatttgacatgttaaaatattttcacacatagctataagatagccttttattctttataaaaaatattgtcttttattattactctaaaaaatagagtgggaggtgaaaaaaatagtctcaacttaattcaaatccatttcatatattacacaaaaaaaaaaaaaaaagaaaaatccatttcatattatttaaataacattaatttttttacatatttttcttttttttttttttaaaaaaaaataggcatataaataaatgtattatttgaccactcattgagagagtgcaattaatgttctaaataaatgatcttattgttattaccacgaaaaagattgtaaaaaatcaaacattccaacaactgcaataaatcctttcctttttttaaaaagatacaataaaataaaagatatttatttttaattaaggaaaaagcaataaatatacatgtttggtttggagagtaaaatagaaaaaaatgatttttttttggtaaatattattttaaattttatgttttgcaaaagttatcaattagattctctgttttgttaaangacaaaatagactctgtattttctgtgaaattgtaaattgtacacaaataggaataggactaggactctgaactgattttttgtcaaaaaaaaacttaataataatttgatttagagatatcatgacaaaacttgttacattatctgtatctgttcatgttataaattgtcttaaatttaattataaaatacaattgttaaaaattgagtttatggtcctatttttaccacttttgaaaatataaagtctattttgtcatttaacaaaacagagagtccaattggtaagttttgtaatacacaaggtccaatagatatttgttttttttttcttttcaacaaatagtgctaattacaactcaactttcatacttcaaatatttattttatttttttaatttttataacagtatttattatagttatcatattatttttataaatttttttaaaaatatttataataccaaaaataaagttcttaatatatatttcagattaccaagcgtcttcaaaaaattttaaatttatttttaatagtataaattattaaaatttttacaagaataatgttataagtataatgaacacctttgtaaaaaaaataagaaaaaaaatcctaccgtacgattttaagtatgaacattaattaaaaaattcgtaagaagaatacttggttgataaataacttatttcttggtctttggatccccttacgagcacgcccgattagtgtaatgggatgtgtttatttatctatctcttgactcgaaatgagagcaagtttgaaaaatgatcttagagtctctaaggttgttcatcaaactgctcacaccgcataaattgcacgcaccgtaccacactacataaaaaatgtgatttaaatcttttgtggtgcgggtgtgctttgtatttttatcaaatcgggcgggcagtgtgatttacagttttgaatttaattaaggcggtttaaaccggaccataccatgtattatggaattaccaatttttacaacataatttttattttatataagaaaaaaatatatgttattatatatgcatttgattatttatttttagagacaactcaatataattacttgatgattattagtatatatattataatatttaaacttgaataatgtttaaaaataatgataatgtaaattgtttaaattatatcgcactacaccgtatttttacagtgtgatttttgtagttttaagatctcgtagtatgatacggttgcaatttgaaaaaaaattaataacccccatcgcaaatatccttaaaagtctttaaggttgtaaatttgtaagggaaatttgattttctatacttagaaaatcaaaaaatttgatttcta

SEQ ID NO: 27363 - DNA, 1755 bp, Cannabis sativa
ggacaaaatttgatccccgttccctatttagacggggaatcctcaccccatttagtggcgggtccccgcatgacccatccccacaggaaaaatgtgcatccttaatctctacttagaaatatattcttaatttcaaataccaagtcacacaatatatatgcatcaatttataaaattaaatatattaaaatattttctactttcagtataaattattgatattgatttatatatagagtgaatgaatcatattcattatattttatttcagtaaattaattgataaacataaatattttatatataactagattttgattcaccaaattttttattacacgatttgatttttttatattaattgttaaattattctgagaattaatatgatacagatactgatgaaatatttcttctataaatatagggtaccaatctcaagcttactactcattatatgcattatattacttccatctaaaagaggtagagagaacttgaaaatctgatgatctgatctaatgttatttttttatttttcatttgtagatgtagaagtttgtacaccaaagttctagaaattaatggctggaggtatttcgatcctaatattattatacatgttcaatataaatttatgtcgatgactctattttaataataccaattcattgattaattaattaaatacaaaataataaatgtggtactaaaacaattattatataagtacaaagcatgactttgcaactgtcaaatagaaaaactaacaacaaataaaaatagaaaaaagtaaaaacacacaaggtttttatatgtggtatcaataatccttacagattgttactaatctacgaggccacgcccagagataagattcattaatattgtttacggagattttcaaaaataaaatatttaagagctaaagaaataataacttgcacgaattaaaagaagaattttttttcttggttcagttgttaataaacctttgtccacgaatcagtttattagcttttaagggcggtattaatgtgtttacaatatttttgtataaatcctaaatctttactcttaaattcttttagctatgtattttaggctttaccccttttcatgataataaaagggtatttataggctaagtggcaggtatggacagactcatgactcgcctaagatttctgcttaaatcccactgtttcaataaattacatgcaatgtagagttgactggatattcccttgggtagcattatgtctgtgcatgtcgcaacttgataatagggaccatttcgtacaacttggacacgtatcactcaaaggtttaacctttaaaactaggggacgcatgtcactcaaagcttgtttctttacaattagaagtccgtaatgtccgtctggtaaaagggtggtggtggtgtgtgcactacctattgggttttgtgccctaaataaaacatattttaatataatcagatttacttgttatactcgaaattcggctccacttcagaagttgacacgtgtcctgtagtggaatatgaaccacctgatttaataaaaatacaagataaaataactcgttataaaggtttaatagaaaatattcacaactcgcttactatatagtcttaagcgagataagtataaaaagctatcaaaactgatattgacgagacacaagctgttgggttttatgccctaaataaaactcatttaatataatcagatttacttattattaaagatc

SEQ ID NO: 27364 - DNA, 5243 bp, Cannabis sativa
tcgttcctagtttcgttgcccatgcccttatcctgattctaggtctaggtcttagttctggtcttggttttggtcgtggtctaggtttgggtttgggtcctagtctcggttcgggtttgggtctcgatcgtggtttttattttgggtttgggttcaggtttgggtccttgtcctggtcctggtcctagtcctagtcttgttccagttccagtcgcgattctgagttcaagtttgggttcgagttcgggtcggggttcgagtcttggtccgagtttgggttgaggtttggatctcagtttaggtctggatcatgcttcgagtgtgggttaaggtcctgggtttgggtctagggtcatgttcgggtctgagtcccaggtttcgatctcgatctgagtctgagtttagttctgggtctacgttctaggttctgatcccggtctaggtttgagttcgagtccaggtggaggtcaaggtttgggtctgattctgggtctgggtctgagttcgggtttgattttaggttcaggtccgggttcgggttcgatcctagtagggttcgtgtctaggttcctttcctagtttgtgtccggggcatgtttcgggtttggttataggttcgacttcggattcctgggtctaggttagatcctggtttgggttcgagtcccgaatttagatctaggtctgggttccaggacctaggtccctggtctaggtcccgcatccaagtctgattcctaagtcatgatctgggtctaggtttgactttaggtcccgagtcttggttttagtctaggtctcggtcggggttcggggctaggtctcagtcccaatcttggtccaagttcaggtttgggtccttgtcagggtcgatatcctggtctggttcacgggtgtcaagtcatggcgagggtttaggaccaggtcaggtctaggtcccggtccaggtccgagtcccatgtctcaagtcccagtcctattcaaggtcttggtccaaggtctcgtatgagtttgggttatggtttgggtttggttctggtctcaggttcgggtcctagtcacagttccagttcaaattctgggcccaagtttcatttcaggttcggtttggggtctgggtccatcttggggtcggggtctgactcttagtccaagtccgggtacgggttttttggatccttgtcttggtccaagtctgagtccgggtcctaggttcgggtctgggtctgcatttgggtctggatctgggtcttggtctaggtcccgtgtttcgatcacgatctaggtttgggtcggtattcgaggtcgtgtctgggtttagtccatgtcaaggtccgaaccccattttaggtcagggcttggtctgggtccaggatcgagtcccgagttcgagttcgggttcaggtttgagtctcaatcctagtgtgggtctgggaccgcgtctgggactgggtccgagcccgagttacggtgctgggttttggtctagttctgggtcctggtccaggtctaggttttggtcacggtcctagtcctattctagggtcttggtcacgttctggttcatgtttcggtttcaggtcccaggtctaggtctgggtcaaggtcctggtccatctttgggtgcttctctaaggcccagaccaatacaccgactatgggtgttgtccaagcacgtgttcccgaatcctgggacaagatctggatctcaatcacgggtcccaatctggtttaggttcatgtcccaggtcccggtctcggtctcggtctaggtccgggaccgagacatgggtgcagttctgggtctcaatcctaattctgggtcccgagacctgttccatgttcgggtctgagtttaagtcttggttcatcctgagtcccggttcgggtttggattgatgtttgggaacaaatcccaagctgagtccatgtctgagtctgggtccgggcccggttacagttttgggtctgggtctaggtcatggtcgtggtcctgttcctgggtccaaatcagcttctagttttagttccaatttcaagtcacggggtacgggttcgggtcgagtttgggtctgactttgggttcgggtcttgatttttgtctggggcgaggtttaggtccgagttttggtctcagttagggttcgaggtttggtctcgttccgagtttgggtacgagtccaggtcctggtcctgttttaagatcccagttcggctccagttcaagtttcagtttttgttcccaagtttgggtttgggtttgggtatgtgtttgggtcctgatttgagtttgagtttgggtttgggttctggtctaagtttcaaatccagacaccgactactggttcgatccaagcccccggtatagatctagatcttgatctaaggtcctggtttgattccattttgagtgccaggtgacgaggtaggtcctaggttcaagttcgagtctggggtcgggtactaggtcccagtcctagttctgctgcctaggtccctatcccgtttttgggttcaggtcccggttcttgtttagctttgggtcccaatctaggttcaagtttgagtcctattctttgttcgggtctaggtctcagtcttcgttttaatctaggttcgggttcgagtttaggtccttgtcctggtcctagtgcaagtccggttccagatctagttgtgattccgagttcgagtttgggttcgagttcgggttcgagttcgggtcagtgttagtgttttggtccgagtttgggttcaagctcggatttcggtctaggtcgagatcaggctctgagtttgggttagggtcctgggtctgggtcttgatgcggttccgagtcccatgttctgatcccgatcatagtccgagttcagttccgggtctgagtcttgggatctaatcccgatctgggtttgagttctggtctgggtccaagtctaggtttgggtctgatgggtatgggtttttttaatcccgggctgggtccaagtctgagtttgggtaccaggtttaggtctgggtctgcgtctgggtctgagtcctcgtcccgtgtttcgatcccagtctaggtctggctcagtattcagtttcaggtttgggttcgtgtccaagtctaggtctgaatcccagtcttggtcaagggcttggtctaggtccgggatcgagttctggattttggtttgggttcgagttcgtgtctcagtcctagtctggttccgggatcgggttcgggacttggtctgtgctcgagttttagggcttggttatggtctagttctgggtgtcggttcaggtcaaggtcatggtcacggtctcgatcctattctagggtcctggtcacgttctagttcaagttttagtttggggtcccatgtctgggtctgggtccaggtcctggtccaacttcgggtccttgtcagactcccaaatcaagacacggactatgggtcttttccaagcactaattctcggatcccagaacaagatttggatcccaatcacgggtcttagtcttgtctcggttcatgtcccaagtctcagtctgggtctcggtctaggtccaagaccgacactagggtgcacttctgggtctcgatccctgttataggtcccgagtcctattccatgttcaggtctgagtttaggtgtgggttcgggtcctgagtcacgattcgggtttggattcaagtttgggacccaatcccgcggtgggtttgtgtctgtgtccgagccctggttcggttacagttttgggtctgggtcgaggtcctggtctggggtcctgatccgcttctggtttcggttccaattttaagtcacggggtacgggttcttattaagttttggtccgagtctgggttcaggtctcgatttgggtccgaggcgaggttcaggtacgggtttcggtctcaattagggtccaaggtttgttccagttctgggtatagtttcgggtccaggtccctgtcccgttccaagatccaggtccagtttcatttcaagtttcggttttggttcccgagtgtgggtctaggtctgggtatgtatccgggtcctggtttgagtttgagtttgggttcgcattctagtctaagtcctagatctagacaccgactacgggtcgggtccaagcatcgagtcccagatcctaggtcccgtggtgggtcctaggtccaagtttgggtctggggtcgggtcccgaatcccgataaaagttccgaggcccaagttcttgtcccaatttagggcccaattcttgggtctgggtcccccatttatgttcagatcctaggtcccggtctggatccaagttcatgtttcggttcgggttcgggttttggtctcgagtcccggtgtaagtccaagtcccaatttgggttcagcttcgagttcaggtcccagtccaagtgttgctccgagtttcgggtcccaggtccgagtctagttcttaggtcctgggtccggccctagtttttgagtctgggtccaagtcctagtcttgctttaggacccatgtcaaaggtcccagtccgggtccaagtcccggtatggtctgagtttgggtttaggtttgggttgggtccctttactgtcccaggtctgggttctagtctcagacctggtccgattctgattccgggtttggatccaagtctaggtccggttccaggtctaggtacggatccgggtccttgtcctggattcaaacactgactactaatcaggtcaaagccttaggttgagattcggatgtcagtcttgttccagttcgggtcccgggtcttgggccgggtcctaagtttaggtttgggtccgggttttgggttgtgccccggtagttaggtcttgggttctaggtccagggtcgggtcccgtgtctcgagtctagagtcgagttttgggtctcggtcgcgaatctggggcctagttactggtctaagtcccccatctaggtctgcatccttggtccaggtctgggtttaggttttggtgtgggtcccaggtcccccatctaggtctggatcctaggtcccagtctaagtccaagtttaggttcgggttgggattcggagtttgggtctgagtctaggtcccagtacgggttcaggtttgagtctggattcgggtcccagtcttagtctatgtccatgtttgggtctgaattggggtcacgattcgggtcccagtcaaggtctaggtcccagacgaggttttggtatgggtttgggtccgggttcaggtc

SEQ ID NO: 27365 - DNA, 2641 bp, Cannabis sativa
tcacaaaaaaattatattgtgattaaaaatttatcattaaaagtagcaaattttttatagtaacaacaaccccgacccagtccaatcttccacctcttaaaacaagtacaaacatcaacaaacagattataattccccgaggcagctccaaacatgttcactacaagtaggaaaaaaggaaggaagtcacatgtgatggcggtgcaagggaagtaagagcttcatggtagcgccaaaggtagctaagagcccaactaatcaccatatcatcagataaatagcttttaattatcttgtacataggtattacgatgatgccaaatcttccaacaaagaacaaaaaattcttcaactgggaaaggatatccatatccccaattaagagttgtccaacccgccccggagacgccagccgaaccgaatagacttaagggatggacaaaaccacaatatacttaattatatattatatctatattttgagtgtatatatattataaatgtgggtctaatattactttaatttggataaaactacatgtaatatactagcaatgatatgtataagcattattgatcaaaacaaacttatatcataacaagtatttttttttataacaaaactaacaagtatttctttgtacatagatacatacatgtattatgcaattgatgtattaacttaatgtaagatgaaattcaaataagaaaaaaaaagcctcataaatttttatatttataattatttgaaaaaagaactacgtatattgttcattaatagataatccatgcatgcacgaaagaagtacgtagctactatgtgtataaaacacgcgcagtaggcgcgtgttcttacactttgacaattactatttacaaattggaaaccattaattttgtcaataaactacgatgtgatagaatcattaataatacttacctagttagacttctttaattgttattttttacgatcctcattttttaatgtcttccttagataccaactcgaaatctagaaaaattgaatatttaaagttagaaatcgttcatctggatctcttaaaatggaagtcttgtgatcgaattacaaatttaatttgccgccaaaaaaatcactaagaaaagtaacatattgttaagaagactattttttgtctacatttataatatttttttgacattatagttaagggtttcaaacttgggactttttttctttgtaaacaaaagtatgataccactaaattatatcaatgacaataatttcaatatatttttagtaactcttttatctatgttactaagaatttgtagcatgtaaaatttaaaaatttaaaacatataaattatataaataatgtaatataatgaaagcattgacatatatattgaaagaaagtatttcattaaataaaaaattaattattataccggcactcaaaaattgtgaacaagaatctgtctaatacactttatattagagctagtacctgaagttgcaagagcacctacaatacaacagctaataaagactaaacatcactaattattgaactaaaaacaatgttgttttgtggacacaaaaccacaggactccattgagacaacaatgttgttaatgatgataccattacataattaatatgaaaaatatggaacattacaaaaattgaaatagagattttatttataagaatatagaatattattgattttatttactaaaatataaattttgtttttataataactgtggtatatagttcctccaaatgaaaaagcctctaatatcctagaaagtcgtccctggaaggttaggtgtctcttggaccttgttcctggacagctaacttttccattccagaaggagtcttgtagaatgataatcgagtccagaagagattcctggatgactatcatgttgacttcgggttcagtcttcaagataactagcctttccttggaaaagagttccagttagctaattgtctcctggaatggtaaatttggatagtggactccatcaagctatatcctatccgaaagagtcttcagtaagtgtccttggtccacgagttcgggagctcatatatgttcctggaggctctgatacttaaactgacgtggagatttcactcaaagaagagttggttaagttagttattttctaactaacttaataacctcgtttcttgtaactatcgactttgggatctttatcctaagcttataaataccactgtcacttatcattttaagaaagagactagatacacgagttggagaactctgtttagatgagattgagagtttgaaagagaaaatgttaagaggtagattgaggtgcagagaaaagagagagattgggtttgggttttgtaaaaagaatcctctctagatgaagaagattcttgggtgtaagtgtgagagttgaaacacttagtgaggactaaacagagaatcttgctcaatcaataaaagagaattacggtggtgttccaaaattggagtagagctatagatcacattgatctattaaacttaaaccagtatatatcttggtgttgatttctttattttctacatttatcgttttctaaatccacatactctctttgcccctgttttattttcgatt

SEQ ID NO: 27366 - DNA, 2675 bp, Cannabis sativa
ctacataggctatgagttattttcgattgctaattgggttttgtaatcaaattgaatatatgatagctaacttctggtggggttccaacaaagatggatctaagattcattggaaaatgtagaaattgttatgcaagtcaaaattttaaggaggtatgggctttcgttcctttattgattttaatcaagctatgtgtgcaaaatagacatggagattgtttgagaatccaaactccttattgggtcgccttttgaagcataaatacttttcaagaaactcctttttgaaagtacaccttggacactcaccttccttaacatgccaaggaatacattggggaagagaactgctatattgaaaggtcttcgatacaagataggtaaagggtttcgagttagaagtggggtttggatccttggattctaggacatgatgaattcagactaatcagctacattggaccggccaaccaaccttgcctatgtccacctttatcaatgatactatggattggaagttgtctcttctataagaacactttgctaaaatcgatattgatctaattgtcaccagtcttttatgcttttaccaatctcaagatcgactcatgggatctactcagttaaattagggttccacctagcaaactcaatctccaaaaaaaaaaatgaagaatcaactatagatgatttcaaaagttggtggaagtttttttgggccttacaactaccactaatggtaaatttttttgcttgaaaagtcattcaacatgctctgcccatatagccactgccttgcacaaaaaaatttattgattgggcatcatgttcaaggtgtaaaagcgcttgggaataaattggacatgctttacgtacctataagcatgccaagtttgtttgaaaaaaaaacacattttagcattaattttgatcatgctcatggtatgttcaatggtgattatctaatccacttggcaacaacaatggataaggtagatgttgaactcctaatctgcattatgtggagtatctggaatgacatgaataaagtgcttcatgatggaacaaaatgtgatgcctcttctctagcaacacacgcaataagctacatggataattatcgatcagtcaagcaaagctgcagaaagaaacaacaacatcatccccctcagtctgtgtttcacaaacaaaccacattgctagtgcggccaaccaacaacaacattatcctcagtttgtgttacaccaacaaagttcctagcccatgcggccaatcaacaacagttaacttctcagtatttgctacaccaacaaacatcctcagctcgtgcaaccaacaatcagcaacattcttaacagtatgtgctacaccagcaagcaatgacatacctagaatttaaagtgagggggcaaaatttttttggtaaatgaggggggcaaaaaagtaaacttaaaagaaaaataatatgcttttagtgggattagaacctttgtcctctaacgtataatctaagtagcttaaccattacactaaagttaatattatgcttataaatatcatatattctcaatttttttagggggcaactaccccacctcgcttatatgtgggtccacccctgccagcaagcacactttgaaattgttgtgtcacaccagcacgacttggctcaacatgatgcttcagatcacattgtgaggctagcaattgggataccatggaagccaccagatgttaatattcttaagataaatgtagatgcagcagtcaacattaaagataaggtattgagtattggagcagtggtttgaaattacaaaagagaagttattgttgcattatccaaaccagtccaaggctgttttagaagtgatgtaatggaaacaaaggcactcattcatagtcttaattgagctaatcaacaacaattcccaatcgcacatgtggaaacagatgccttgagagtttcttctgctttgacctcttctcatacaaacttatcttattttttaggtctaattgatgacgtttgttcttctattcttttctcctagagctactattattcatgctcgtaggcaagttaatagatctgcccacaacatagcaaagtacgctttagaattggatgaagatgtcttttggatagaaaaagttccatattctattttctctattgtataaatgacctttaatttataataatattaaaaatttctcaaaataaaaaccttatcaaaaaatactaatttaaattttttacagtcataatttaaaaaacttcatataaaatagggcaattttcaggtcaatggaccaaactccaaagttcatcttattattaatgaaagcatcaagaaataccgtatgagtaaaataagataacggagttaaaaaattattgaataagagaaattttaattctcagtaaatactatttttctaattatttatttgccagttattaatactatccgttaataaaaaaaaattatatttataaattattaaaataatataaataaaattaattattttatatatttttatgaatattaataagaaatttttacatgaaaaatccattttgcacactttattacaaaattactcacacacgcctattactacatttttacttacaaagttgtttttattacacatttaccactta

SEQ ID NO: 27367 - DNA, 1828 bp, Cannabis sativa
ctttaggggtagataaggcttgtttttggtcggattgtatccctccgcctataagctctattattgtaaatgactttaccatttaatttataataacaagtttatttcctaaaaaaaataaagttattacaggatctcctaaaacaatgctatacctaacccaaactaaataatcaaactcaattgaagtattatgaattctcattatatatattacaaaaaaaaaattggatagagagagaaatataaatactaattgaatcaagattttaatcaaaatgttattggctatgaattcaatattatcatttgaaagccacgcaattaatggaccaattgtatccgttataaatatatagttacaaatctcagtagaggacgtaggcgagtatatatacgtaccccaatttaacatatagaaataggaagtctgatattaaaaaaaatagaaaatcaaacctatacattagtgcgctataaattattacttaaatgtattttgacatatataataaattatatatatgtcacaattatttgtaattagtctaactactattttggatggcaaacgagacattaacattattttaacatatttaaaagagatttgggtcggcattatatatattatatattgaagattcattttcatacatatagatatggttagtgtgtttgacaaatacaaaggagtcaattttgttaattcaaaactgagaagtaaataaacgggctatgtatataataaaatctagtgtaactgtaaccacagagcgtatttgtattaaccaatcaacaagccaaagtttcttctcagatttaggctatcactatcgccatcagaggcatcaaaagtctattttctttaaaatacataagaaaataacaaaaactacattccatcatttctaatatttttttgtttttgtccaatctctataattattatttttttttaatttttttaactaataaaaatataatatttaaataattttaaagtatgcctattaataaaaatatattaaaaaataaaataatttgagttataaattcttaagtttaagtattagttggaaataaatatttaagtttaattttttgcggtaataatacttaagttgcggtaataaatatttttaataatacttaagttgaaagtatctgactattaaatgtaaattcattatctatttgttattttttattagtatatttaaattattttttaaaacattaaaaataaaaatttactgatttagactaattaaaaattatcactttaataattaatagtcaactatttacataaattctaaaattataaatttaatattattaaaaataaaaatttaatttaaatattttaattataatatgaaatgatataataatatttttttttatataaaacatcatgcgtaattgaattatatatgaatatgttctattctaatattgtacattaattaataacagacattgtttgttattaattattcttggaagtgatgagacattattggtatggtggtagtgttgaaatgaaatatttttgttggtaaactttggtttgtttgggtcattgaatgcgactgctccaatcttttcaagagtgaaagactaaacagtaaagagatggctggctaaaccacttgagcttaagcttagctaaaaaggctgtatgtgttggaaattttggatgatctctcaaattatacattgtaaattaaaaagagagagagagagatgggtggttaatgggtattttaacagctcagaagtggccaatttctacagacaaagtataggtatagggcatagc

SEQ ID NO: 27368 - DNA, 2206 bp, Cannabis sativa
tcttctccttccgatccaattctcaacgtactcccttcttcttcttctccttctccttcgcttcctccgaaaccctaaccactcgttccaccaccaccacctccttctcttcctccggtatcttactctcctccaacaccatcggagtcgaactcgatccgttctccgcgatccgattcttctccttcaaaatctgaagcagaccagcaatactagcgatagtctcagacacctcagctccagcctgaaccgacttctgctgttgcagagcttgaatttggatttcgagctcagcgatacggcggaggagcgaatcgcgctcgcgagcccagcgctgctcttcccggagccaccgctgttcttcacgaatccatctttgctcttctcgcacccaaaacgattcttgtctctcgaactgtgaggaatcggaggcgaagcagagtaaggatttggaggttagagattttgtgaaggaaggaaatgtggaagcgaagagattctgaggcttgatgtaaattctagggtttagaaagattgggagagaggaagaagacattggaggagtcttcgagattttctttctgggttttgagtttttagataagctaagaaaaaaaaggaagaagaaagagatatttatttggttcgaaactcaaaccacacgttttgagcatgtggcgggaacgtatatttaatgggcctgatatggtttgggctttacttgggcttattatacttgatggtattttttcagaaaatacaaattttattggtttttataatttttgtgcaaaaaatatgattttttttttctctaaaaagttattttatgagaaaaattgaagaaaatgttgaaaaaaattggaaaattaggtaagggtaaccaagtactcttagagtaaggtaaccatttactttatactgttttttcaaaaatggaaaaaaaaaatcattttttcacaaatttatatctaaagaatcataaaaataaaatcccttatgaaaaatgggaattttatatttatggcttttaaagtataatttttttaaaaaatatgactttttgtcaaaaaaaaaatattttgtgggaaattttttttaaaaaaaaagttaaaaaaatataaagtaattgattctcctccctctagttactataaggatacatggttctcatattttctaaccttataatcccatttgcttttaagaagtttattaaaaatatatttgggctttgtaataaggccgaatttgaatgcaaatcataatcaaaaagtcacctttcccatctccaatagtaaagggatcctttttctttttctttctgcaagtaacttttcccattctcaaagctaaagctctaacttcagggtaatccaaaatccaaatgcgtcttctttcttttcttcttcttccttttatgatgttaagaaagtgggctttaaatttttaaagataataatactaacaagtatggagttggttgtaggtggtttggaaaatggatgagcttttgtcaaatgagagctcaaatcgtagtactacatgcaatgaagaaggagaggaagatgaagaactttgtccaatctcagggaagaatccctttttcagtctctttatgtcaaagtctaatctcaaccctaattatcgtctggttggtatatatttttccttttatattatttcatattttcatatttagctcctaaaaaaatttgaagtagacaactttttttttaactctactttagttagaaattgttatctttaagaatttttttttaatttaaatttttaatacaactattttaatataataaaattagtagggttttttattaaaatataattaaagtatgtttgaaattactttcagtctgaatacagagaggtgcattgatagtccacctgatattacatttgtctatatttatgttttgggtaacttttgacaagtttaagtgtaattcaaattgtagataaatccttatatttaattttttacaataataataaatatattatatttcaagaactttccttactacataggcattaagtgttaaggtaatggcctcgtgataatctctagttactcaagatcattaaattttattttttatttaaaaataattttaaatatatcaataaaaaaaatgacatatgacacgtaaataataacttgacactcaacaatcaagtaact

SEQ ID NO: 27369 - DNA, 1801 bp, Cannabis sativa
ctctctgttttttaactcaagacaaggcattggcaccagcaacaatctccaaaatctctcctgtgattttggcttgacgtttcctgttgtaaaccatagaaagatttttcttaagctcagatgcattatcagtggcactgctcatggcgctcatccttgcagctagttcactcgccaaagactcctgtaaagctcttagaatctgactgttgagatataaaggcaataaggcatcaagaatctgaactgggtcttgctcaaactgcaagattggtgagaaatctaatgtctcagtcctaactgaatctctttcaacagtcaattttccttcttttgttgttaacctgaagaactcatcctcagctgcatcaacacagactccattaatgtcacaaatctctccttttggtgagagaggaagaagagtgtggattacagggttggatttgactaaagatacaaactttgtgtacaaaagctcaactttgtcaacttcttcactaacaaagagagaaaacacatcatcggctatggcttgagcttctttggctgttggaagattacccccttcgagaaatttatctactggaatataaggccttcgaagaaagtaagagttaccctttttaccaacgctaatgactgtgtaactcaatccaagactcttcaattcggcgattcttgcctcggctttcttgatgaggaagttgttgaaaccaccacagagtcctctgtctcctgtcacaaccacaagagcaactttcttaacaggtcttactttagtaagaggggattctacatcgtctgtttggagttgctcgttaatgttgtagagaacttcaaccagagtttcagagaagggtctgccattaacgacggcttcttgagctctacggactttagcggctgcgacgagcttcatggcctcagtgattttctgggtatttttgacagacccaatacggtcacgaagctcacggaggttacagtggatgggagtgactgaggatgatctggaggaagggtttggggttggggaagaagattgagagggaagctgaaaaggggtgatgaaagagcgagaggaaagggttgaagcttcggaaagggaaggttttgatgagacccacattgttagatttgagcaagacatggttgaatttcttcacgaagctttggttaaggaggaaggggttggaaatggcggaagaagaagaagaagaaaagagaagagaagaggaagagggtgtgtgttaagtggtattttttgacaaaatggtatttggtaatggtgaaatgaaatcttatcttgttgatgtgtttattagttgtgatatggagtgggaaaaatgagtggaggaagaaggagggaaaggatgaggtttggagataaggatttcgagcgttggtaatctaatgtttggacaggaatttgagagtggggtcctaataagtaacttccatggcatcatgatcatccgagttggctcagtgacagtaaccaccacactcattcttcaactgactgaatctcatacagtatatgcggctatgcgacttggacttttctttatgctaaaagtctaaaaaagttagtcaccaatgatatttcaataatccaaatatttactcttattaaagtaactaaagattaacaatgccctgagtatctccaatggtaatattttggagaatgttggatgaggtggaaaatttatgtggcaaaatatagagatactataccattggagataaaagaatgctatttttgaaattagcattgatgccacacaatggcatt

SEQ ID NO: 27370 - DNA, 1548 bp, Cannabis sativa
ttgcacaacacttcaaattgagtgttactcagatgcctaaagatgaaaccaagaggtctgagatgtcaaacgtttcgtatgttagtgatgttggctccgtcatatatgtcatggtttgtactagaccggacatagcatatacacttaaaatgttgagtagattcatgaaaaaccctagacaaaagcattgagaggccctgaagtggatcttaagatacttaaaggaatttgttgacaagggattggtatttggcatgaaaacatagagtaattaaagttttggatgttatcaatgggtatgtgaactctaattatgcagggtgtattgatacaagacattcattaaatggctgtatttttaacatgtttggtacaacaatcagttggaaagtaaaccatcaaaaggtggtggagctgtcgacaactgaatctgaatatatggccttaacggaagttgatcaaggaggcactttggttgactagattgataaaagagttaaaacttaactagaaagttaccaatgtgtgttgtgttaattaaagtgtaattcaattaaccaaaaattgtgtgcaaaataaacatacaaagtacataagtataaagcttcatttcatcagaaaagttgtatagaaaaaattaagttgtgaagattgtcaaagtaccgattgatgataatccttcggatatgattatcaaggtagtactaagtaataaatttgagcactgcctaaagctgattgggataaaattcagctgagcttggaatgggctagagaacaataacatgtaataataacttgtcaagcaacttcaacttgcaactagaaagaagttacagaaagcttggcgatattttgaattgcttgttcagaaaattgtgctagtccgaatagtcctaccagatagcttgtcatctataaaaaaatttttagataacttgtcatcaatttggaacgtacttccacatatctcgtagtcagtccaaaacactcatccaaaaatatgatcctatccgaatcaactcgtccagataatttgtttagaaagaacgttattggaactgatttaaagacttaattagtaatgatattaacaaagctaattttagcaacaatacaaacctatatatagtatcacctttataatttattatgtatcagattattgacagcttgagtgatatcatcattgggtaaggttggagagagatcattgggtaagggtggagagagagagaaaggttagagaaaaaattcatcttataatctttgtgaaagtgaaatattcttgtaatcttctaagttggtcctaaaataatgaaccataaggaaaaaatattttaaaggaatttttttaagtccttaactctaaactttaggcacagacctaatctgtccaaaaccgaacctgtaagcaaatcttactattataaaagtgttgtaatgaggtgatagtttgaagaccattttaccctttaagaaattcaatattaacaattttgccttttcacctttatttaattttctgtcttaattgacaactcatct

SEQ ID NO: 27371 - DNA, 2348 bp, Cannabis sativa
  modified_base (196)..(210): a, c, t, g, unknown or other
tatttattttcaagccttatgatacttttgacaagtgttgcttaagctttgttgtatttgtgatagtttaattattagtgatagtccaacccgcaaaaacagcaccgcacttcattatcttttgcagtgcgattttctcgattttttagtttcacggtgcgggtgcagtttgggaaattagaaaaaccgcatgtgnnnnnnnnnnnnnnnaaatggttaaaaaccgcaccacccacaccgcgaacaccaataaattttagtagtctcgagcactattgaaagaagtgtttttttttcacaaaaataattaattttaaggcttgtcaagctcaacattgagcactattgagcaaaaatgtatttttcactaaaagataaataggtaaaagcttgattttaaggcctatcgagatgtctgcataggactcgatgcatagctcaactggccttaatgatttttatgaaaattacatgcctatttttcctcaacagtacttcatagtgcttaaatacaattctcgcaagaggtttaagtttacactcgggccatcctaacatcacaaactcctgttatggtgatgtgcgagtgatgacatgccttataaaacaaaattgcaccataacattggcatgagggcagacttgacccgtgcttggtgaggtgtgataataaagaatctgacatccatgcattcgaggggttgtattgtgtgaaaacatatagggggggaagtaagatggagatgacaaaaggtatggtataatggattgaaatgttatgcaatacaaggagtataatacgaaattactctgctcggacaacgaacatgttcctaataatatgcctatcactacaacaagtgagagtgaccttggcccttgggataggacaaagcaccatcaatatgtgctgcccatcttgcctttgatgttgcttgtctaattactttgtccaaaaatgttaaatggcaccataaaatttaacattactttaaatgtcatatcgctattggtataactaagtattaaaatacacataatttaatttaacaactgttatgaaattttgctaaccatttacaaaacgctccttttaagtggtgccactagtgtctaataataatgctccaagggccggtttggttcattagtctacctggtgaagattgcaatcaattgcatctcaagatttaatcacactgttatatataataataaaaactttctgttatgtatacattttggtattcaaaactcagttacaaatgtgtacatgcaagtgtataatagaaagcaaaagaaatgacaaacaaattaataaaacaatctacaaaattattaatatggaatttacagagagtaaagtataatggtgggagattgattatattttatatatatagaattatccataagaaccttcttggaaacttttatgttgttgaacgaccaaaacagagccattgacattatactcagaggaagccaagagatcacccacagttccaagctcaggacactcttcccaatcgctcatgccagttgtcaatggtgagtggcctctcccacctttccctacaatgaacagtgaatacatatctccaatgtctttcagagctgccactgtttctcccccattgctcacgtatttttctacgtatccaacttgcccagatgtcacacacctaagctagtttaataaattaattagcattaaaaaaaacaaaaacaaaacatatatcaaaagcatattcagtatcatatgccactacagatgaaaaaagtaggaactaagcccaattagtagtgtttttttgaaaagacaattagtagtgtttaataagcataattacatttatcttataccaaaaacaattataatttgctgttgtaacactgaaactacagtcataaagaaagaaattttgctcaaactctatgttagaacttatagtagtgatatatattctctcattgggtcaatactaatctcacaataatttaatgttctatatacctagatcgaactaatccaatttaaagaaaaacatataatgtaattatgttttaatttcttatcagggtgtttatcgttcatattcataattcatagaagctgatctcacgttaagtgaattagagagtgttttaatattactaataaaatcttatgaataaacaaagatttgggttaagagaaattactcgttatagaaatcgctgagaaacgcattatcaatatccttcccagtctccaaactcgccaacgacatgaaaaccaccacatcatcacgatcatccaatctctcactccttgaccgagacgattcaaacgacagaaacctaat

SEQ ID NO: 27372 - DNA, 3225 bp, Cannabis sativa
ataatatcgacttgtatctaggcgcccatacacctatttacaagacaacaaatgagtaagaacgttctttactagggtacaaccactgtatcacatacactacataccactactgcacgagtgttggtagggtttgtttcgtaccccgagtaccattaggtgttgtacgacacacaccccgtacctttccgtattggcactggtaacaccgtaacgtactccttaaacattgtacaatataccaatgcactctatacaactaccatactagtgttggtagtgttcgaatcacaacaagcatgcatatatatcacacatacatacattcgcatatatatatatatatcatatgttctatgccattcttacctcgtttccaaattcaagtgagttggccgacctgaacgaaaaatctcgtgctgcatggatgccctaatcatattacataaatgggtaaacaacacgccaaaacactaatctggaaaactcaaccctccaactaaaggttctgctattaataactaatacaacagtaccctaagtatcaaggaatcactcaaccaaggctctgaaactaacacaaattgacgaatcaaacgatttgggaaacctgcccctgttccggttaatcggttttacattacctgttaaatcggttaatggatttgcaccaagtttccccaaacaattcaaattttgctcaaaacgtgcccaaaccttaccaaatcttccagaacacctataataacctcaaataacaaattccaagtagtagaaactagaaacacacacaaagttatattgacattcatcatgcttgaatatctatactgacccaaatttaaatatatgagtaatgtatgattatttgattttgatgatgtgagtttacttgctgttattgtgtggtgaattatatgattattgttattacttttcttgctaagtccttgtgactcacaagtgctatgtggtgcatgtaataagtagaaatgtttaaacaatcatgagtcaggaatcttctccagcaagtttacatatcagcttatccgacaagtggtgctgagttgtcaggaattgtgtttcaaatgttttgaacttttaaacgtatatttatgataaactgcaatgacatgtattgtaatattttaaataggggatccccaatcgtagaaaagggactatgccatggttttattatttagattacttagtaaaattttattaaatcacattttatctaaaatacttgtttattatcataaactagtttataaacacacacgtggcgtccctaagggttagggtgttacaccttggctcgggttacagcttcttctaccttgataaagtcatttgttctatcgaagaagtcattcatggtgtatatttccttgagacgaaggtcgagcgacagatgactcatctccttgagtccagttacaagtgttattacccttgcattctcgctaagtcttttagtcttagcggctgcctttaagaaccattagatatagtccttgaggggctcgtcttccttttctattaaattattagactcgatttggcgttgaattaattaataaattttaaaatgaaaatgaatcaaattaattctccttttcttttcttttttttgacgaaattaactacatgagtaatcattcagcagaagttacaatttctaaatcttgaaaattacctctccagattaactccctatcaagccctaatacttttttagccatataatgtgcatgaacattaaaagttctaggctgaaattttaaagcaacattagggaagagagacaaggagctattaatatcatcaactatgtctgaaagtactgagaaatccttcttttttccttcactttgttcaccagcagcttagagtcagttacaacctttgcaagaggcagccaaacattgtggcaccaaagtaaccctaatctaagagccaaagcctctaccattttagaatttatcctcgctgccataggtatcgaaagaccaacaaccatgatccctttccaatccttgattaccgccccaagccaaagttttccactatttgagttgatagcagcatcattgaacaactgataaaacccctcatttacctgcttatcttgctccaaaccctggaaattaatcttttgattacagtccaccctcttggattgagcattcctatattccacaatataagcattgatctagttcactacatcaatagcagacatgtgagacttcctaaagagttttttatttttgttttcccaaatagcccacaatatacacaacaacagcatgaagtcatctttatttaaagtagaaaatccagacaaaataaaatcacgaatatctttatgcttatgctaaaaataaaagtgattaagggaagaagttttccaaatttctctcgctttggaacaatctaggagagcatgagttactatttcggttagacaattacatgaaaaacatgagggagtaggaaggacttttttagaaaaaaaagttagatgcagttagaagaatgtgataaaatgctctccaaccaaagatcttaagcttaggagggagacataaattccaaaacttcttccaccagtaattagtagaactgatatcaaaggtggaaggaggaaaaaagactgtgttgactaggtggtaagcaaattttacagtaaacatacctgagggatccccgttccaaatcaaattgtcacttttgccaaaacccccaataggaacatagataatattagaaacaatatcactatcaaaatattgtgtgagcctactcaagtcccaatgaccattttgattaataaagaagttgactctttcagaaggaggtatatggtcacctttatatttaagatatttgacattaggaatccaatagtcctctaatgtacgaatggaactaccatcaccaactttccatgtaagtccatccttaagaagatctctaccccaaagtaaactagtccaagtaaaggagggagaatgaccttttttggcttctaagaaggaattgtatttggaatatttagctttaagaatcttagataaaagagaattaggatttgagaaaattctctatgcttgcttacccagcaaggcttaattatggtataccaaagatcaaaaacctagtcctccaaaacatttagagttataaaggtaggaccagtgtaacgccctaatgcta

SEQ ID NO: 27373 - DNA, 7811 bp, Cannabis sativa
atgtgttgtatatgcattatgtgtaaattattatttttgtatttaacaatagtagaaattcgacggattggtaaagatgtcacattggtatatattagtattttagatgtatcaaaaaattttatagactattagaaagtttgtgattgttgggttattagggtaatgacccttttacccttaaatatatgtatatgtaggtttatgattaagggtattttagtaatttgtcatggaataagataaacattattaagtttatcatataagcttagatttatgtacaagttgagaaaacaaaatcagaaattaggtttcactttaactctagcactctcttggttgaaccccctaaaggaaaatccaaccaagttcttgccaatttctcttaagatttgaagttttagtaactgaaaattgaagtatttgatcttggaaagttgaatttggtagaagaggaacaacttagaagagaaaaagatatttcttcaatagttttaaattactttgattctttaataattgttattcaattaggtttggattgctgggtgttagaaatagttttagatgttgattctggttagtttggcttggaatttctatcttagtggtagttgggagagaagttgagctatgagcttaagctttgagatttaatggcaaaatcttgatttgtgaattaaagtgtactctaagttgtttagtatgtttataatgcattaataaactgtttcgggaaatttgattgggtttgaagcaagtttggaaggttagaacttgaaaattttgagttgcagaaatttgcagtaatccggacactcagatggtagaaccgggtgtctggtagttctagtagtgccaaaaattttaggcacccggttagaaatttggtgtccaagttgggaatttttaagggtacctcaatttttgtattttttttttttatatatttaaggcagtttcactttatttatcaataagacaatttcagattatgaatttaaattctagaaagtgttttagcgagacacttactagtttaacactaatgtgactatgcacatacgcatgtatattatattttcttgttgttagcatattagagatgtgagatagtgtacatagagttgtactgggataccgacatctaatatgatcgacataaagtatgaattaacattaccaacactagtacaattagagtactgagtgcagtttaatattatgattaattatactatagttacaaacgtttgagactcagacatacgcattggatgcgattagcagattttatggtaattgggtgtatgggcgctatattacaagtcaaacatatgttgtgtatgttatgcttttcttattaggtatgtctgctcaaatatatgtttccatgtgtagataaaggcaaaacgaaaattaaacatcagtgagtggtgagcttgatgaagattgtacatattcaatcgtcttagcattgaaggttgcgatcttcagaacaccgttggcagtattttggttatgtcgctagatgataatttttgattattgtatatattatgtatattatataaacgaattttaagatcccggattataaatattttacaaaagtattttatgtttattaaagttttaattactacgaaaattttgttaagtacacttttatgttaaaatcctttgattagcaaaggttagcacaataatcaagaaaatatataacatgtcttagctagttggcgttacaatttgctattagagccgctaggtttgttcttcgaagatttgtacaatcatcatcagagagaagctcgactcacagttcagtaagcttttatatgctttaatagttttaaataagatatcatgattgaaaatgcatgataagaagcatgttagtaataaatatatggatgagtaatagattgagtttccatgttttgcggtaattattgcatgattatgatgatcgacctaccttatgaaatcacaggctcatcctatagaatggacacctcgcgaaatactagaagtcagggtgatatggttgaggctagaggtggtcggggaggtaagtaagaatccccctcctgatctcagtcgaggtagaggtcgtggtcggggtcgcagcggtagtaatgctaatctgccataggctccgcaagattgggaacaaaagtttgcagaaatgcaagccagacttcagagataggaagaggagctgtagcgactcaaacattaagctcctcctgttgcaccacctcaacaggtgccaccagttcctattctagtgttgctagttgggaaacctgccactcgtaaccgaatggaaccactgtatgaaaggttccagaagtagggatctttaatttttctgggaggtctagatgtgatgaaagtcgagcagtggctaactactattaatagaattatgaacttcatgggagttaccggtaatgaccgagtaacttgcgctacatttcagttccaagaggatgccttagtatgatgagagatggtatctctcaaccgtaatgtggaaactatgtcttggaatgagttttaggattttttcaatgccaagtactataatgaggtagtacgcagtgccaagaggaagcagtttactcagttagttaaggaaatgtctatgtcggtgactgagtatacgataaagtttgataggcttgataagctagcctcgggcatagtgccaacaaacttaagtaaaaaagaaaagtactttgtagggctcaatgccaagattaggcaagacctaatgatcataacggatgatgccaccacttatgctcaaatggtggaaaagactctccgagtcgagggtgcagtagagtttacacaagagtctagagtgacagtggagttactactccccatactttaagtttcggtaagggtggtagtgacttattttatgatcaaaaaaggaagactcccgtggcatctggtggctcgagtcagaataagaggtttcgagggaattatgatttggtaggtcatcaatggtcccaaagaccgttacatatatccagaatgctcagtctacaaaaaacatcatctaagtgagtgtaaaaatatattctagtgtgatattatgggggcatttcaaaagagactttccctaattgaaaaaagaagaatccaagaaggaagcaaaacctagttcgagctcgaaattttgctattattatcacaatataataatatattaccttgccttgagattttatttttatttttgctcaaaataaattatataaagacatgggaataaaattcgaagtaaaattctaatagaaacagtggataagaaagactaacacgaataattttaagaaaacatgggattaaaattcgaagtaagaacatggaagtaaaattcgatgtttaagaaagacttgcacgattaattttaaaatctctcaaatgttaacttttttttttttggtaaataaacggaatttattgaatgcttaaactaaactagtgaccacagagggggccacttcccttaaacaaccacatgacttgattctagaatctcgagcccagtgggcgagacaatcagccacggcattacaagaacgagaaataaaaataacatccacatataagaactccttgcaataaaggaggcattcaacaaaaaccgggtaagccccccaaccaaatggtaaagagccctgatggagacacttaacttttactacaagtggataagacattttatatttgcgatgcctcacatacatatatcttgtactaaaggaaaaccgtctgtattccctcccaccaatttaatacccaaaccaaatcattgtaagcaatggaaacaactgcagttataatgagaatcctgatgcaattcatgcccaaaaaaattaaattataaacaccaaaaaacttccgagtgtttctctcaacaaagagcgggaatctaattttatgattgacctgattagctaaaatggatcaaaataaactcaacagtactccaacatttagatacaacaaaaccccgctaggactggccgtcctaaaaaacaattcaatgtttaaatttataaagataacaaatttagagccgaaaaagtattgccgtacgtactcatttcttgacttcttcgaagtctgcctcaggagcctgttcaccaccctgtgaaccacctgatgaagaatcgctgctagaaccaccagacatgtgctgcccgatctttgatacggctttgtttgcaacatcaagcttggccttaatttcgtcaacgttgtcctctcccatcgccttcctcaaatcagcaacagcatcttcgatttccttagctacttcagctggaattttttctctgtactctgctaagctcttctcaatgctgtagatggtggtgtctgcactgtttctgatatcaataagagctttcctttcctggtctttctgcgcatgcaattcagcttccctgaccatcttctcaatctcgtcttctgataaccctccagatgaacggatagttatttgttgttcctttccggtggacttgtccttggccgagacagtcaccataccattggcatcaatgtcaaaagtgacttcaatttgaggcaatcctcttggtgctggtggaatacctacaagctcaaactcaccgagaagcttgttatcagaagccatttcacgctcaccttgcagcaccttgataccaacctgagtctggttatctgctgcagttgagaatacctgtaataatgttatagaggggacaatcaaaggccaatgattaaaacacaatgtctaagcaaaataaaacgcattacttgatcagtgcaacaatgaaagttggctgaagagtaaaaaatgatgtggaaaatgtaaaggagaattagtctgaaagctatcagaagcactagactcataatgcggaatgaatgcagagacaaaaacaaaagtagaaatttcacttcaaccctcttatttttctttgggtctgggttgttgttatatgaggggctagagggcagtgactgtatccacttaactcgcaaaataatagattattcataatgacatggcattaaatgcttcttcattttcaaacatacctgactcttctttgtagggattgttgtgtttcggttgataagcctggtgaaaatgccacccaacgtctcaattcctagtgacagaggggtgacatctaacagaagcagctccttaacatcaccacgaagaataccaccctgaagagcagctcccatggctacagcttcatcaggatttactcctttactaggactctttccgaaaattgctgtaacaacctcttgcaccttgggaacacgggtcattcctccaacaagtagaacctcatccacttccttgatggatatatttgcatcctttaaacaattcttgcatggggccttggtcctctcaatcaagtggttcactaatgtttcaaatttagatctggttagtgtaatattaagatgtttggcacccgaagcatcagctgtaataaatggtagatttatctcagtttgagaagtcgatgagagttcaatcttggccttctcagctgactctcgaagtctttgcagtgcaagcctatctttcgcaagatcaataccctcggtcctcttaaactcactcactaagaaatccaacaaagcattgtcaaagtcctctcctcccaagaatgtgtcaccgtttgttgctttcacctagacaagacagaaatgttgtgcaaactttataaaacagaacagaagacattaactaaaacttctcaagatgcaagaaatgaatacctcaaatacaccattagatatctctaaaatggagacatcgaatgtcccacctccaagatcaaaaactgctataagaccttctttgttgttcattccataagaaagtgcagctgcagtaggctcattaattatccttctgtacgtcaaggcctgcaattctgccagcatcttttgttgcttgtctctgggcatcattgaaataagctggaacagtgacaacagcttttgatacactctttccaaggtaagcttcagcagtctctttcattttggtgagaacaaatgctccaatttggctgggggaatattgctgtccattagcctctacccaagcatcaccatttggggccttaacaatcttgtaaggaaccatcttcatctctttctgtgtttgagcatcatcaaaccgtcttccaatcaaacgcttggtgccaaagatagtgttagttggattggtcacagcctgacgctttgctggagtgccaacaagtagttctcctttctggttaaatgcaacaactgatggtgtggtacgagctccttccgagttctcaataactttgggattctacaccaatttcagccgcaattagaaacagatcaaaacacctaaagttcaatcttttgttttaataatatcacttcaataagacaagtccgtaaattctaccttgccctccataacagcaacacaagagttggtagtacccaagtcaataccaataacatcttgtccagcaggttttgtactgtagtgaaaagaaacaacattaaaccatcatctattttaatatagcacacatatgcacttcaggaaaatccattatacctgaaaggtctcaccaaggttgaccacttctggccgagatgagatggcttggcagtgctagtgaactgaagaaaagaagaagaaaatgtaagctaaccattgcaagttattgggttctcaagtcaccacacattacctcggaacaggacatcatgttgaacacataagattattatttgtcgagcaataatattaatcctactgaagcatttgatcgaggaaattttgtcccatgcctcacattttgaagaaacttagataaataaatttacagaatactctcgtccctatcccatcagcccaaatctcaagtaactattaactcaagaactacaacacatatcgagctttaactttaaacatatatccacgaattttcttgtaaatgaaaccaaaaatagaaaaacattactatcagcctctaatggagatgaatattatcgtttaaactaggcacgggatacatattgtttgatgaattgcttgagagggatacatattattgttgaaactaggcttctaacataatttcctccatcaaatccaaatgacatacaaatatcaagtcaagaacagcaataagcgtcgagctaagactttttctatgaaaataagtgaaatgaaatgaaaccaaaaaacaatctaatatacgattgggagcttgataatagagttatagaggaagataaatggtattaaaaccagaatcctaagctcaaacaaataccaatgaatgttcaaaagagctaaagacatgaaacgaaaacgaggaattggtggaagcaaacatacagatctgtatgcagagagaggaacggaagcaacatcccgtcttcgaatggatcgaagcaacgcagcagtggccatggctgacttgaaggagacgaaatggttagggtttagggtttttgagagagaacgaaccacaccagtgtggaactctggaaggttttagaaggttttaagttaagagctcataactctattttatttatttatatataaattataaattattaattattaattattaggctgagctgattttccttaggtttaatgtgggtagctgaaacgacatcgttgaatctggtttctttgaagggctggcagtagcgaatcgtgtcaggcaggctatcaagcaggttttctt

SEQ ID NO: 27374 - DNA, 1888 bp, Cannabis sativa
  modified_base (1817)..(1858): a, c, t, g, unknown or other
taatagtgttacaaactaaattatcacacccttactaaatgtgtcaggtaccttaaaaagtgtgatgatcatccgattccccctcctctgcattataaaatctcgttgaaagcccctcctaaaaccaacttcaaaaggaatccttttgacctttccaactctttccctcttgatgaacttactcatcctaactctaatgtggaccaatcccttgctgctgctgtgaatcagtttctttccacggaagatcatggggctgggtcttctgtttcagcccctcctggcagtgtgactgatgatagacctttgggaatggaacaggtcatcatttcttctgatactcagtcaaatacatctactctgaatcctgaagttcacactcactatggtgaaagccccaacggggtcctttgtgatatgcctactatgaatgctcatccagctactgttactgtccatgacaatagcagtcatgaggaagcctttgataatagtctgtctagacttactgagaaagctaaaggtaaagccgtagctggtgttaaaagggctgcttttcttcctcaaactgttgtggttggggattctttgcgaaacattctcaaacgtgctcaggccggtcctactatcgctgaagtctcatctgctatcaatgcttctttggaacaggcgggggttgcggggcaaccccgcccagaaaaatgattctcatgtgctggaatgcttgtggtttggggagtccccgagcattccgtaacctctccctttttgtaaaaaagactttgcctaattttctttttgttatggagtttaaatgtcttgctggctgtggggacaacttttgttatagattaccttttgaccatgtttttgaggtccctaggaaaggtttaagggggggtcttttgttattttggaattctgatgttaaggttaatattttgaattactctcccaatcatattgactacattgtaactattaatgataatatatccactcatgtttcttgcttttatggttctccttatgtgcatgataaaattcacacctggattcttttacatcatctttatgataatgctcctactcttccttggctcatctttggtgattttaatgattacttgtccattggtgatagatcttgttctaataatgtccctacgtatgctatgatcaattttagaaattttcttaagaaattttccctatctcctctccaacctgttggtaacccttacacttggaaacatggccatcttcgtgagagattggattggggaattgtcaattctagttggcaaactctctttcctagggttgtcctttaccatctttgattctatggttcggaacatagagttcttaagattgttcttgatgatgaaagtttgcacacttttaggcacaagagatttttgtttgaatttttttggctcgctgagccttcttttttttttatatggttaaggataattgaaacaagctttcttttcaatctgataccactcccctcgggtcttttctttctaagtagcaatcttgtattgctgccatcaaagattggaatgcctcttttaaaagcttatcctctcgcattcatactcttgagaactctatcaatgctcttcactccaattttcttatctctagtgaggatatcaagctggcttccacgctccaatccaatcttgattttcttctctataaccatgacgtcttttggaaacagcggtctaaaattcattggctcaatgcggatgataagaatacaaaatattttcatagtaaggccatgttgggttttgtgcccnnnnnnnnnnnnnnnnnnnnnnnnnnnnnnnnnnnnnnnnnnaaagatcagaaataatattttatgttgcat

SEQ ID NO: 27375 - DNA, 2862 bp, Cannabis sativa
aaaaaactataaataaagttgataaaaattttaataacaaatatcgtcgaaaaagttatcgaagcagatatagtcatcggaaaagtcaatgtcaccggaaaatttactatcggcatggaaccctacgagatgttgtacagaagaaagtgtcagtcacctatttactgagatcaagccagtgaaagaagatattttggacctgaaacgatccaaagaactagtgagattattgaaaagaactcagctcatatgctcccctcacaaagtatacagaaaagctacgctgatccgaagcgtaggaatattgagttccaggctagggactttgtgtttctccgagtgtcgcctttgaaaggagttcaaagatttagaaagaaagggaagttaagccctaagttcattagtccctttgagatcctggaaagaataggtcaagtagtctatcggctagctttacctcctgctttatatagagttcataacgtgtttcatatctttatgttaaggaagtatgtatcacactcgacacatgttctaagttatgacgatattgagcttcagacagattcatcctacgaagaacaacatgttcaggtgttggataggaaagaaaaagtgctacagaacaagacaaatctgctagttaaaatgctatggaggaacaccaaagttgacaaggcaacttgggaattagagtcacggatgcgggagcattatctcgagttgttcaggtaaattttgaggatgaaatttctataagaagagaatagttgtaatatctcataaattaaattctaataattagagcatattttacaacatatgagataataagtgtgttatgagtttaacgggtagaaatatgatcttattgatcatattttgtggtaaatagaaattttaatataaatgaataaataagcataacttatgaattacaataattttattggaatatatgagtatagtatatgttgttggtgaaataaaaatattatcaggcccaataaccgcggagacctgataggtggccagaaatgtcacaacgatattagcttgtgcttttgttggttttgataagtttggttagtattggttttgtcagggtcttcggggtaattggttatgaccaatttactcttagattaatgtttacttaagtaccaatttagtgggtaaaaggtattttaattaagttttttttggctttagtagtgatgtttgtgttggtgatactagtagataatattagaatgcattagtttagttgatagacttaggaaaatcaagaagaaagaaaaacacaatatttctctctctctctctctctctctctctcatcagtttcctcaaggttttcagttgagtttaaggtagaattgtggaagatatgatcaaggtaacctttgttttagtttctccttgaatgtctagggtttaaagtttgaaattttacaagttttcaatgatttatttttgtttaggttgcaataggttacagtaagttttcaatcttaaatttaagtattatagagttgtttgttgtgttttgttgcaggttttggttgagagatcaacttgagttcatgagaactcaagcttgagctctaatggcagatttggatagatggagttttgtgttgcttgagttgtgttatctgttgtattgatgttaataggctattatggagaatttggttgaaattggttggtttgtgaagtttaaagctcagtgcaaagagtcattactttaaattgagaccgtagtgatattggatgtctgctaggcttatcaaggttgtctcattaggcaacagtagatagggttactttatgaggtaaccattataacttgtcttattagacatataattgtgtagctttgaattattttacatatgtgattatttatactacttatatgtaattgattggaattacttgtttgtcagcatgtgattattgcttttactttttttgatgagatgttgtaactcacaagtactttttaatacaagtaagggcaagggtaaattagggcagccatgagatagcattcatcttcgatagatgtacatttcaatctatccggattgcagagctgagttgtcaaggaatattttggcgttgtatctgtatagtattttggatataaattccgtattaaatcttttgtaaaacttttgtaacaagagatctccgaaacgaaatatttattgatgtaacttttttattttaaaagtttattttagtaaactttatttaaataaaaaaatttaattaaactgttagtttattattataaactaatttacaaaagtactgtggcgtccttagaggttaggttgttatacaatacatggttaattaaagagaaatactaaaaatatcagtggtgcctaacgtcttccaaagtgtcatatcacttctagtgcaattacatattgggtctcatataatttaatataataatttttatgtaatttcactaaccaatttcaaattatcacctctacgtggtgcaagacacctatggcagagattcagaccaaaccctcactgcagttgcttgtagaggagaggtctataatcttacagatgttgatattctgtgcttcgaaaaggaagtcgcagatgatgaaattaaaacaactttttttgacatgagtcatttgaaagcacctacttgtgatggtctccacgctttattcttttaaagtcaatgaaatacagttacggagtcggtttgtcgtatagttaaaatggtattacggagccccaacgaaactgagtaacacttgttctcatacattgatgtctagtaacaatattggaaagccaaaagtatagattaatttcatt

SEQ ID NO: 27376 - DNA, 3246 bp, Cannabis sativa
  modified_base (195)..(198): a, c, t, g, unknown or other
agagatgttggtttacacccacgtcaattgtctccatcatcattgacaattcaaggttttaaccaagctggagaaaaagtaaggagaagtatgacactaaaaattcaaataggcgtattaaatctgaagccttattttatgtcatcgattcagatacatcctacaatgtgttgttagggcgaccatggcttcatnnnnatggagtcattccttcaacacttcactaatgctttaagttttgcaaggaaggcaaagtcaaaagtgtcattgcagacccaaattccttttacagggaacaagtgaattatgctgatggaaaattttacaagccagctaatgttactattctgaaagggaaacctgaggagagtaaacgtcatgaaagctcaaccgcacaaaactctctgcaaattaaggaactatcccctgtgaaatctcctcagcccaaagaggagaacttgaaggtatctaaccaaaaacgaaccttcaagtatatccctaaaagtcgatgaggagtagggcaaaaagatttgacaccgatcgaagattcgatgacagcccttaagacaagctttactttaccattaaggaaaatcgattagtcactacaaaagggtaaaatacaaatttcagttgattgatctattcaaccgcatgaacctctctgctaaattcagatgtaaaattataaatatatagatatgctcatgattaaaaaaaatgaatgaattaatctgatgaaagaaacgaagtcaagaagtcagatctatgcgtgtccaatcatgtgcctttgtttgaagaatgagcatgctttatatatgtattcaattgtcaaatatatatataatatgttcaataatgacattaaattgtgtgtgatgtatagacacattgctcacatgagtggtgaagaggtgagaaaataggtggcttacactttaaaattgtgaatcaaatttcaagagggtctcactcatatgcatatactgtaaggaagagtcaaattaatcttcttttcagtgagtaaaataaaaaaggaagccttacctgttcacaaaaaagggagcactctgattgggattaattgttaaatatacatatgactttcaaggatcaaagttaaatggtcttatattatatgttgtatcttgtatatataattcaaacaagaatatgaatttgaattataaaataaatatttttgatattatcttaaatttttattgacttacttaaaatggaattcaagatagtatgtaataaaagataaattattatttttaaattttggaataaataattaaaatgtcagccaaataatctttttatttataaaaaaataataaaaagatttcaaagttcaatattatcacaacaagtagtaaaattctaaagtcatataaaatgacacaaaattccaaatgagctcattaaaataaattgaaatgatgaaatattatttcaaaattccaaagaggtccttaacgtcacaaaaattttaaaatggtaattttacctaacaaaattcaaaagtgcactaaaattcaaagccataataaattaaatagcattcctaaaggaggtcattcacctcaacaaaagtgaattcacttttcacaaattgtctttttcttgggaactacgtttgatttgattcctataaaaggatacgtaggcaacttagttgctaagaataagtgcaattgccgataccgtaaaatggtataaaaatacaaatcttaaaatttcataaaaggtcatccaccgaggaatttttcgtaaatttttaaatagcaaaggattcctgaaaatggtcatctaccggaatccttatatccaaattctaaactgccgtatttagaactacaagtggcttatccttcacaaagaaggtatgtaggcagctcagttaattattgactgagttcagctgcaattccaaattcaccccaaatttttcccaaattacctcaattatttaatatcatcgtaattgtaatcaaagggtgtttcctttaaacaaaggattgtaattaagagattattcttataatcttggatggattgaaataaaattaataaactcttatgctgtaaaatcagcataggtgaaattatgttttgaatttatttttaatactctaaatgtgaaatttttacttaacataattttggacacgcccagtgggacccattctccttttcatctccaactatgatgactattatttaactttatattatggtgctaataatgtttacagttttctggaaaaaatggcaccacaagtcacaacttacttccacaaactaccaacgacctcttctgcccaaggagggaaaaagaaccgcttcttggcaacattttctattgatcgagcacccatttcatgcagacccgaaccagtggagaatgtgaagacacctataccagttagaaaggctggaagagggaaatgtgtgaagagtgtccctaagattgcgcagtccttgagaggcaaggcagcaaagggcttcaaaaagaggcaagctcggacattggaaaggtttgaagacaaaagttgtcaagatagaagggaggccaacgaagattggctcccccgtaatgatccaaaaggaatggggccataagcgtatcttgattggttctattcctattttcttacccactatcgcctcaatgatggttctctccgtagaggaaactgaggcaacacccacttctcaaactctgagaggtaggaaggcaacaaaaggcaagagggggaaaaaaatttcaccttcaccaaaccctcttgaaacaagggaattagtaggaggcacgcggattaggcctctgatcgtaatccttattaattgccaaggttaacagggggcatctgctgagatcaatgaacaccctatattagatgaggggtgtaggacgcctttctccttcccaaagaaggctaagagtgacagtgtaagggttcccaaagcaaaccctaactcattccaaaaagaacatggtaactggatgttcctctagggataccgaccaacaagggtcacttcaactgctaatcctacttcctacacgggacttgtaactcgatcaagagcttgtgccatgcgtacaattcccgttcaggaatcagtgaacccttttgtccaaaaagttcaagaagaggggtgttgcacatctgaacactctttagaagacactccctttatcgaacacaataagggggtgtctgttgatctcat

SEQ ID NO: 27377 - DNA, 1887 bp, Cannabis sativa
ctgctaaaacaattgctaaaataaaagtggagcatgctgcgactgttgatgctaaaaacccattggttgagaagatgagccaaatctatctccaggcatataaaagcgagacggttgtggacgcggtggttgcattagagcagcctcattcatcactgtctccacatgtacacgttgtttaggtgtcaatatttgtgtcaccgcctgaagatgtctttgcagctgaaatatagtttgccttaagtcaggttgttcagtggctgcagcaggttgtgagcgtcgtcctgatgattgtcctttcaatttgtgatccactcctcgctcatggccacacctctctccaagagtctcacaaagtatctcaatctcaacatcttgtgtacactcaaaaggactagattgaccgtcatattttgtcttcatccgtacctattttaagaataagttagaaaccaaacaaacttacaattatttgaatatatttaaaagtaattagtttacataatcttatatttttttggcatgctcgttgacaaactcgtctgtgcccttctttgtgtgaaaaactttccaattctcaaagcgacccatgttttgctaataaatataaattgtatgaaaaattgcaattaaattaaaattcataaaataaatagtatatttatattaacttacatttttatgaagggtctcagccatagttatggacccttatgttgaaggaaattgcatattctgctaattgagagcatttcgctttgaacgagtagtaaactcaggagatgtgaagaactgacatattagccgtcattgttcttcattgagttcattgggcgggggtcttgactgcaatttcaatgtcttctggatttttgtaaaattctttaaaatgtacgagtctaatgttctttctcatcttatattttttggccatttcagctaacgaaatagctagtaattttggatgactttcaatttggtaataatatagcatttgacaaaaaaatgttgtaataacatactgataatttcatttattaatttagatatacatttcaaaaagtttacccaaagtttggttaaaatgaggtgttcgtattgccctgagacacttgcccaactaagattatgtctaggaacatgcaatgtaacctctttctatacaaaacgagggaaggctttactctccaaccctacaattctattggagacgttgtcaaattctaatggcaacggcatccgatctttttttctactatcttccaagttagtcaaaacattcctccaacggccttttctagattcaccagaggtctcgcacgaggcaggtacactagtaagatctaacaggtcatccccacctccatctccaccatgataactagcaatatttaccaacattttatgctaaaaagaataacgaaattatatgagcccttagtcaaaacaactaatcaacttagattaagcaataatagtacaattagtcattcctcgaaacaaaataacattagaaaaactagtcatcaatacaaacaatatccaatacattaatcataatcatcatcactaatataatttgataacgcaatcacttgttctaatatgtcaaaacaagtaaattgtcttagaggacatctcttctcaacacttccatcaaattcacggtccttcctcatatgatgattggatggaaagaaacgtctatggccaatataagaggtcttaccaatcactcgaacagaattagcatcttcgttgcatgtaggattgttgggctttgtgctctacataaaactctattttaatgtaatcttttctattcaaatatcaataaagaaatagatttaatttcattacttgtttaatgtgttaattggttcatgt

SEQ ID NO: 27378 - DNA, 1434 bp, Cannabis sativa
aaattctgagtttgaatgaaaatctgtggcagccagggctgcacagggaacagttcgttcctcaaaatcaacctgatccaatccatttgtaaggagaccacgaggaagaccttgaggctccaggactaggagacatgaaaataaccaaaggaatcccccacatactcaggaagaacaacctgggaatgtaagagaggtcctaatgggtagagaaaatcaacccaactcaggtaatacaaaaaatcaagaacattgacgagatgtttcaagaacttcctatagatttgcgaaccaaaggaatgaatggacaaacataccaaaatcatcttgcatgaatgtagaggcgagacaactgcgaccaggaaactaggaaatttctcgtaatcatggaagaaatcctagaaatcaacctaggtccaatggtcgacccctaaggcatccacaaaggccttctcgcacagacagagagaatatgtacacttacctgagtaggggacgtgtgtgtaatctcttttgaagaagaaaactaatgcgatgtgtgttactagcagaagctagtgaaataatcagataaattcatgaagatatttgtggagatcaagcaggttggcaaagcttatctaaaaggatcgataatccgtcaaggatactactggccaattatcaataaggacacacacaaatttttcaagagatgtgacaaatgccaaaggttatcacatatacctcaagtaccactaacctagttaagaatgatgacctcgccatatccatttacgatatggggaatcgacctgattagggctttacccatagggcgaggtggagcaaagtatgttgttgtggcagtcgacttcttcacatgcaaaaaggttcttgattttgtcatcaagaacatcatatgtaggtttggcattccaatcaagatagtatctgataatggaactcaatttgatggtgaattattcactaagttttgtgaaaggaataaaataattaagagattctcgtcagtatcgagacctcaagtaaattgacaagtagaggctgttaataaaaccttgaaagatactattaagaagaagttagatgccgccaagggaagatgggttgacgagctttcaaaagtgctctaggccaatagaaccacaaaaaaaatagcaacatgacacactccattttcattagcatttggctcggaagtaatgttacctgtagaagtgaacattgcaacccataggcgtaaattctacaatcaggaacaaaaccaagaacttatgaatatgtccttggatcttcttgaaaaaaattgcaatgagtcacaaataaccaattctgcttatcaacactgtatcatgaggtactttcacaaaagaatttaaaagaggttgtttaaagtaggagatttagtgttaagacatgtatttacaaaca

SEQ ID NO: 27379 - DNA, 2106 bp, Cannabis sativa
attatatttaagctgtaaattttttaatttcagatcaacttaaattagaataaatttaagagtatattttattttattttaataatcattttcccacataattttgaaatacatttattttaatatagatatttcgaattttttcaattttgaaaattagattaagttgaaaattaatttaattaagtttagatcaacttaaatcatagtgaacttatgctagaaaattaatttaattaattatatttaatgcatccaactagcacgtagaacttatgcagaaaaattttaatgcttagaataagctactaaacctgcctctaagtcaagtacaggcatactttggcttgacataaagaaaattaaatttggatacttacatgtcaaggccataagaagatagtcaggacgatcgtatgtccatgataaaaggctttaaggctaaatgatagtagtgttaacagagggcctatacgccaaaagcaagaacatgaaagcctagaggccgaatatgaatgaaaaaataagttcacatgcataaggccaaggccctacaggaattgtatagccagagaagtaccgaacagagtgtctataggaaccacgtaccaagctaatgctaaggtagagttcctagtaggttccaagcaaaaagtcagagttccttgtaggttccaagccacagacaaaattttggaaagtcatacccaagggtacttgcaagaccatgtcagcgtacaagttggagatcaacgaagtacaagtctcaagtgtaagaacttagactaatgttgagacttaagttgaacatttgactataataacctcgccattaagtttcatacagagtttctaagggaaccacgtatgagagtaaggttgtatatgcctacaaggccataacaagattcttgccgatgtcaaaaaaggacaaaaagttggaaacccccttagaaccaaggcccaagttggccagggtttccaagccttgaaagggtcggccaaggtcccatgactcaaccaagaactggccaaggtaaccaaacccaggcatgaataggctagctttatagggtgaaaccctagagctagacaagttccataattaagccctagggctgccaagtctcaagcgagacctctcaggccggccaatgatagttttgaatccaaatgtatttttttttcaaaactcaaatatgtgcctcatgttctctatgacttaatgagtcagaaatcacaatcaagcccaaaattgaatctctttaaccaagtagtcacacattatacatcccaaaactgccaagaggatcaatataccaaagagattacaaactaatatgtgaatcaaaaagtttctaacatcttaaaaagcttaaaacttattaatgacatgtacaaaaaagaagaagatgagcatatatacaaagagaagatcaaagatctaaaagtacaccgcgtaaaaagccaacacttgtctgagcaaggttgttcaccaaagactactacaaataagacgagagctagaaagtccctaaaagatgtcctaatagggacttgggggcaaatgttatccaaaaattttcctcctaacatggcatgtgcacgtgagcctagacaaagttcaagtggaataaaaccttgccaatagcaagacaggatctccatacaaggtatggcaaaaccgttaagtaataactaaaaggagtgaagaaagccatcaaggagttgtaccaacatgtctagtcagctaagagaaacctataggcttgccagggtgagcttgtatggccgaccatgatttgtacacaagctagccagcaaaaaggtgacctttagaccgagggagcttccatttgatcaagaaaacccaacctctacaaggaaaaggtgtacaaatctatcctccagttaccaaaggatagcctccacattcaaaggctggcctcctcttggtaaagctgacaggaacatgacctgccagaccctggcaggaacatgacctactagatcaaaattttttatttaaaaaaaaaatcaaaattatcaatatcatttatttttatttttaaacaaatatataaaaattataaaaaaatcaaataa

SEQ ID NO: 27380 - DNA, 5612 bp, Cannabis sativa
tccaaattttatcagtaatgccactaaagagttttgtcttatctcggccagaaaaggatggaagaccaaggtattcttcatggcaaggctgaataggcatattgagaagttgttggaagaaaacctgattatggtgtcttgtattgggagaaaaagataggacacatttatccggattgattgcttgaccactagcacgatggtagatgtctaacacttgttgaattgacctggctgattgttgattggctctgcagaagagtacactatcatcggcaaaaaacaagtgtgacactgatggggcagttcgtgacaccttcaacccatgtaaggacccatcattctcttttgattgtagcaaccttgagagaccctcagcacaaataagaaaaagatatggcgagagaggatctccttgccttatacctcgggtaggaagcacatccccaagaacttttccattcagcagaaaagaatatgagaccgagcgtaagcagcgaagaatgagatcaactatgactgttccaaaacccattttcatcataatttgagcaatataagaccattccactcgatcaaaggctttggacatgtccaatttaattgcagcatatccttgcgagcctctttttcgagtctttaaagagtgcaacaactcaaaagcaatgagtatattatcagtaatcaaccgtttggacaggaaagcactttggtactcagagatcactaatggcaagaaaggctgaagccttagtacgatcgacttggaaaccaatttataaaggacggtgcacaagctaatgggccgatactgagtgatgagttggggcttcttgaccttgggaattagtgtgataatagttctattcagaagagcaggatttgcaccattattaagaacatctaagactgattctgtaacaagtggccccactatatgccagtaattagtgaagaacatgactgacataccatccaagccaggactcttatcatcactcattgagttgagggcattgagaacatcatctgctgagtagggggctgatattatttctctggaattagcatcaagtactgtagggacaacttccaatatagaagcaatggcattatcatctattccttggctgctaaaaatagactggaaataggtcgagataatatcaagtttagcagcctcactggtttgtgtattgcccgctgcatcggtgagtttcttaatgcgattattggttgatctagcattagcacgctgatggaaaaactttgtattggaatcaccggattgcatccaagaaattcgagctcgttggtgccaataatcctcttccttagccaacaactcatcaagaatctgttcagaattttttagtgcagcaaaatgttgaggatcagtagaagaggagttctgaagcgctgcaacattctcatgagattctttaatatctcttttcaggttaccaaaattcgagtagtgccatctctgtaagctagtggcacaattggagatattagttgtgagttgaactaaagggctgctattatcccgaatccaattggcactgattatttcagtacaagcatcttcctttaaccatattttttcaaatctaaaacgagatctgaactcaggtacatccactcgatccataagtgcagtaacagtcgttttaaggcctctgtgatctgacttataaaagtccaagtgtttcaaagatagtgcaaggaaagtagcatcccaatagtgattagtgaacccataatcaagtcattctttgacattcccactgccctggtttttatttgtccaagtccatcgttgtccctcaaaaggaatttgacataatttacatgcatctaccactgaacgaaaggcattgatttggctgtcactcctccttggtcctccaattttgtcttcatgagagaggacctcattgaaatcccctaaaactaaccaaggtgaaaagggtgcaatatcaaagcatctacgcagtaaagtccaagttagatgtctttgagaagcacatgggtgcccataaaaaccagtaaagtggaaagatggcccatcctgactttccaaaaaacaatcaatatggttaagtgaataattgtttatggaaagagtgacatgggacttccaaagaagcataagtccacccccttgcccctgccttggaacttctatgccattagagaagtgtaatttactacgaaacatatctatactaccattttgtaatttagtttccataatgaaaagtacacagggagcttgctcttgaacaagcaagcataaatgtctgaatgcactcgggttccccaaaccccgggcattccaacttatgagattcatggctgagcgcggcgttgcggagcaacaaccgctgaactttcaggctgagactcttttgaatccaagaagctgctgttggaaactgtgggagtcgggtaaataccactcggtgctgaagaatccgactggatttgaatagcattggatcgacaacgcttgagaacatttcgaagagattctgagtccatttgtcttttaaattgcttattaggattaatattctcacattcatctttagaaataagtacagctttgcctttcaaattgtgtgaggatgacagcagagtagcagatggattggtggaaacaattgtgctatgatttggaggcaaaataggagatgtaacaggtgcaaatggtgtgcgtgatgctgactgaacagggagagtatttggtggataagttgcaatcataggtgttatggggagataggcagggaatggtattactgggacatcatcagatgaattaaagcatgaagcagtagatggagggataggatttgatgggaaagatgaagttgagacatgcaaatgagagggtgagtgtgcggaggtggcagattctctgttagtcatattgggaggcaaaggaagtgttctcttggacagattaggaatagcattggcaaaagatttcttggcaagacgggtcattaaaggccatgctcctcccttaaaaaaatcagttctgtagcgatcatacccagattcaggaagaggagatccaatcatggaaggaccatatgcaagggaaggttcatgtccattatagatttcttccaaaaaatgatggcaagattcaaaaggatgaccgatgatgccacattcaaaacagaactctggtaggcgttcgtaacgaaattctaaccagaattcatcaaccgagtctttaagttttaccattttttcgcgaagtaatggtttggaaatgtctaaaatggcacgaaatcggagaaatggaccccaaccttcattcaatgagtcttcatgaacatctacataggtaccaaggaggttccctgcccattcagccatagcttttgttttactcaagaaaggcaatctatgcaattgaatccaaaaaggagtaaggaacatggtttctggtgtaggcgactgaagtgcagtaggtgaggaaaggactataaggtgattctggaaatgccacggctccaacaacaatactttcttaagatctccaaggcaaccaaaggaaacaaggaaaagtccggaatgatggtctgtgatcgtagcagggtactggcctttccaaaagctactcattttaattcgaaaagtcttcctgttgaaatctcgtgaagatacaactcgagcataaaggacatggctcgattgagaggaactgccattgtgtaatccatcaggaagtgtataaacttccttctcagattcagttagaattaatgtatgattcatatcatgtagaagattatccataactaagagcaggggaataacatgaatgcaggaaatgcaggtgcagaaattcaaagagaaaaaagagggaacggttaaaattcaaaataagaggttatggtatacgggggaaggaaaattagagataatgatgaatattgggtagttaaaacagttaaaaataaaagattaaactaactgccacagagctctttaagggcacacatgctcacttttttaaattatgtagtgatggtatctaatggtgttaatttatttagttacaatgaggcattttatagaggattaataatttttatttattttatttataaaaaaaaaatcataaccaactcaaccccacgtagcaaataacaattattttattttgtaaaaattaaacaagaatataataaaactaataaattaaaacaatatatgaaaaggaaccaactcttcatctccaacttaatgatcttcttctcctcgaggaaaaacctgttaaatgatggaccttttctatcggcattgttgaacgatcgagacattactttgttaaaaagtatttcaaatatgaacataacctgttatatattatgtcagatctaattattttttttttgtatatgttcaaggtgtatatattaaattaaatttgaatgaagagatgtgattgtataatcaatataattggagttcaagttctatgaactattgggtctaaaaaaatagaaaaatttcttgatttatgatattttgtttatttttctgatatattttttctttggtatcatattatttgttggtgaagaagatgatttgtttttaaaaataaatatggattaaagatgaagtgaaaaaacggttttgatctttattgcttgtttcattagatttgatttgaatcaaaaagtggtgatgatgctaattttttaaaagaatataaatcaaaaataatcacaaagatgagaaagaagtaaatttacactgctctataattcactttaagcttatacacctcccaaatacaaccaatcataatacaaagaaaacgccctcatatattgagtgcaaaagtagtgctctcacctaagaaaaatcctatatatatatttaaaaatagagtacatataagagagattttcttttttaaaaaaaaaaaactaataaaatggccaacaaaattgaaaaaaaaacacatgacaacaaaaaataaataaaaaatgtataaaagactaaaagataatattctttattagaaaaaataagtaaaagaaaacctcgaaaagggtgagattttattttgtttatttttttttttaaaaaaaaacatacataaaattcagattcaaaaaatgtaatttgagatttaaaaaaaaaaaaggaaaacgaaaaatatatattattttcctcatatatatataattgagatttaagaaaaagataactgtaagttgaaatattcatgtttttttatcagttaactaataataattttattttaaatttaattgaactgtaacttttttataaattcattatcgattatactcttacataacaatactgttcacggaggtgagaaaagttttcttttattatattgggtgtttggaataggttaatgtaagtaagggaattataatgttaaacattaccttatttgtttggaaggtttaatcttaaaatgccattctcctagtaatgtaaatacccttgaggaggataatgtttgatacattaaaaaaaaaggttggattagttattcccttccattatattaatttgaataacatttttaaattaataaataa

SEQ ID NO: 27381 - DNA, 1430 bp, Cannabis sativa
  modified_base (52)..(60): a, c, t, g, unknown or other
aaataattttttgttgtgactataagtaacattaagtcacaaaaaatttatnnnnnnnnnaaaaagttgtcactaaaaatagcagttttttgtagtgactcatttaagataatttttttatctaattttttttttttttataatagtattagtgtatgttgtatttattaaggtaaaattagggcatagtttttaaaaacttatatttgatataaataaattttttaattttaaaaattagcggtaataatttttaatgttatattttttataagtctgttaatttttttctaactaatctattaaataataataaaatgccacatatgtcaatttttaattgatcaaaatcatatttttaatcaaaaataatttaaaattaaaaaaaaatctaagaaaattattttaaaatcatatatatagatatatatatttttcatttctttcttgctcttctttttttcttcttcgtgattttgaaaatatatatcagtcattttaagagatgtataatacaattactatatataatataaacattcatttatatgtttttctacaggaaagatggtagattgtaccagtgaccattaaaattaatgaaatgtttagaaaatttaatacaaataaatttaaatgataattgtagtatgtatatatgatctatctcatttataattatggtaatttgttgtccttttaataatgatctataaataaattaaaggcgtacaactatacatttggatgtgaatctactgagcttgaagattgttactccaaacatttttggttctcaactacataaagtccttgaaatttttgtggttattccttggtatgataatacaatatatttatatatatatatattttttattgaaataaatggaaagcgttccttcaaaataaataaatacataaataaatgaaaagagtgaagaaaagaaaaaaagagtaattgaggtccaacaagttcacatagttgcagagtttgtcgtatatatatttatatatttgtcaacacattattattattgtcatatatccaacatcttgttcagtccttcctaagcaatatgactacaatatagttcgcctatatatatagtctatatatactctctttttttcaataataatattaatttatatttcggtaccagtatagaagagaatagtaaccaacatatttattttattgaaataattaaggtaaatacgaacacgacatgtttattaaacgtatcgtgttagaattgttgagttatatctcaaaactaattggcaatgagtggagtagtctatgttcttcaattctctaccatttattttatgtgggacaatacccacaatatatcaaaaactcgaacacaaacacgacacgattaattagcatgtcatatcgcatgacatgataagacgactat

SEQ ID NO: 27382 - DNA, 3005 bp, Cannabis sativa
  modified_base (2847)..(2850): a, c, t, g, unknown or other
attttattattaaattttagctaagatgcttatttgcattaaatgacattattattattattattattattattattagggtattttattattaaattttatatttatttttgtattattattattattttatatttttaataaattattatatgaacacatattaaattttgcatcaaaatttataattatgtattggaacacaataataaaatttgatatgtaaaaatatcacaaaatcatttttttgtactaaatatagttcaactttatatctcacataaaaaatagtgttaaggggggacctcatgagtattaaacaatttaatggcaactatcaccaatattatttattgtttatctagtaggctttcgttttgttttattttattttaaccttataattaataataatataagagttaggagagtgaataattgttctaatgagagtgaaagaatacgctaaagaggatcatatatcatatcataattagatattggatgtagtatttcgagaaacacgttgcttataatgatataaaaaaaattatatatttaatttcaaatgtttatttatatttcagaatagtggttagaaaacaaagaacattaaaaaaaatagttgtcctttaaaacttatccaagttacattgtatatatagtatagtaatggatttacagctatgaatgtcttcataaatatttataataatacaaaggggaaactcatgtgggacaggtcgatcaagttatagcaagcaatcttttgttttttttttctccatgaaactgacaattcgaggcacaagagatgtaaatatatatggatttattatgggtaccagtagtgtctaatatcttcgagacatattaccttgtgattggttagcttttacattaattaaaagggtttttttttttacacttcaaaatagttttttttagcatttttacgaaattctacacaaaaatttctatagcaactaatggaacaacttaaattgtaattaaaatccgtagcaatctacgtaaaaactacaagagcaactcaaattgtactatatagagtaattctccttaattaaactttatagttaccaatacttaattaaatcaatagcaatactactggtacttttttaacattcgtcagaaaccatatataatgaatatgaaagtcaggggtgtgtgaaattaataattagtccatggcaaactcagtgattggttcttagtgtgtgggggccatatattggatttgaatcataggtaagatttgataaagcatgagacatttatggtagatggaatttgtacttttatatttagggttcataaaactaccacactctgccaactttggtggaacaaacccaacaaggtcggctcttaccgtgtctaataagccaccaccggcaactttgactcatgactatgactcatgaatgatgacccattttcttttcatgcattttatttactagtctttggtcaataccatagagtagactaaaacttataagttgactccactttcttcatcttgatcaatctaatatttcctagtgtaatttgttccaaaaatgcttctcttactctttcaaacaacatcaccaactcaattgccatataaatttaaataatttattgtcattagaagttacatttcacaatacgatgtgtagacattttatttctgaatatgtgaatgatccataaatttatatataatatgtaaatgttagacattattatatgaatgatggatttgcaatgggcaaaaataaaggaaatcggatgtattttgatcaaaacatcttcagtcattaactttcttgagttttaatctcacacgagtttcaaaaaaaaaaaaaaaaaaaaaaaaactaattagtgtgagtaatcaggcttccaagttctctcaattctcttaaatagaataataataatcataccttataatagtgctagctatcactaacatttctctatcacatatgtatacatttagtttatatataattttatggaaatattaacaaacacatatagtgcttagtatcctctaaactatcttattattaataatgtatttaaatattgaacttaatttatatagtttaatataatattcttgataaaatattattaaattataacacatcacttttaaataatattaagcaaggcttaataatatttataattttattagcattaagatactagtagtatgaagcaacaataattgtctttagcatttttcaataaaaataaggtatgtgttagggaagcagccatggtgaaaaaaacaaagtgaaattaatatacgtgcctctttctatttggtacattggaaacaacaacatgtaagataagcaatttgggaatactataaatgcagaggcacgagagtgttgactctttgaatttttagagtgtacacataaaagatattgcatcaccaattacgtattgaggatgttcatgtacgtataatttattatttcaaaaatttgtaaatggaaaggaaaagttaaaatgacaacagttcaatatcaaaattttatgacatttaataatagaaaaaggctcattataacctcctattataattttttagtcaatgctaacatctaaaattacatgtcgaaatatttttttcataacggtattcgttatagttacaatattatttctgtaaatttttgaaaaattccgaatagtttacagtaccaaaaacagaattcctgatattctagtttagcaaacgcattcaaaaaacttcaaacgtatttttggcactataaactatttgaaatttttcaaaaatttacaaggatnnnnttgtaagcataacgaacacctccgtgaaaaaaaaaatattccaacatgtattttcgggcgtacaagttgactataaaattataacagaaggttgacagtaacactcatcttaataataaattgctaattgctcatatcattataattttagacac

SEQ ID NO: 27383 - DNA, 2229 bp, Cannabis sativa
tgttaaattaaatagtattaattcatctattatatttatatatttatgtgcatatatatgaatacatacatctatttagttgacaatgagaagaaatgtgattgaatatgatattacatatgagattggactacaatttatataaacataaatttgtttgcatgcatatgttttattggttaagtattaattttgttgttgtctatattcatgatatatatatatcatgaactgcttgaaaaatttatcaaaattattgaagaagatcttgatttaaatgatattttctgtcttgaaattgttgttaattattcaagtcttgatatttattaaaaaaacatattagttgtaatgataaatcatttgttattgaaggtgttgattctacttttaattaatgaaataaaatttttattgtgaatgttaatataaactttattaaataactagtaacaaattattatataaactttgtaactaatcatttattaaataagtagtaactactagctacataaatttgttaacaagtaataatttttttttctttaagtttttttaataatttcatttcttagtaagtttaaagttaagcatcaagaatcttaattggagaggagaaatattttggcaagtgttgattgattttctagctaactaaaggtatactttttctaacttttaggttaaattaattatgaataagcatgttagatgaatttgaatatcttaaatattcatccttagtaaagtagattttataaataaatgtataccagttagatttgtggagtatatatgtatattagaagagtttgaatattttaaatattcatctacagtgaagtaaattctgtaaaaatatatcggatgggtagacattacttttttattgttctgaattgttatatattcttaattgtatgcttaattttttcgggtgcgtctaatatatagtcgttattctggtaaaaatttcagtagaattaggataaaattttttatttaaattattttaaacttgtaaggattttatttaaaattttctttatgaatagatgcatgtgtaattgtttttatatgtttaataaatgtgtttattatacattgaggcaccgctcaactcatagaggcatggtggctctttgaaaggatgtggtatataattcaccagttcaacagtttctatttagtttagtggtttaccatagcttgattaataacgtctactatttacatatttgttgaagaagaaaaagaaaaggtattcaagatctagcccgccatcaaatttggatacagttctgtgcaaagaagaaggtcctagtaacagacttgaatagggaggttgtcgtgaagatagtaagcaatgtctaacataattcaattacaataaataggccgaactcgagcaaaaagtgatgttgggtaaaatttcagtcagtggtcagaatgacatattgactcgacacattatggaagctctaaatttattcattattatagatgaaaatgtattataattaatttatttaagtacatttaactaatatactaacttataattaaatagtaattaatttgtaattgaattttacattttgaaagaaaacctacttgcaatgaggagacggactggcgaccattacaacatgtgtggttagcgaaattgacacaacacttttatagttagtttttagacttagactttgaattttagacaatacttattttgtgttctacataaatttatcaatgattagacttgaaacatagcatgttgtagacttttaacattattataatataattaaattttattttattaattttaacattacaataatataattaaataattttttatttcaaactaaatcttgattcttataattaatttataaatatttaaaaaattaatatataatcattaacaaaaattaatatataataatttaaattaaaaataatattaaaaattaaataaataaataaaaaattaagagagtcctatgtctgcaattattacataataaccgaagataaaagttctctatgtctagggtaattcccccacatgagtttaaaattttgttccacctatgtcttcggtcattttgtgataaccgaaaagataggtcctcattacgtcttcagtattttcgaaacctacgcatcatcgcctcagacgacttcggtagcaagtatatttaaaaatgatgataaatt

SEQ ID NO: 27384 - DNA, 2263 bp, Cannabis sativa
ttaattaggttatagttacatgattttgatataattctgggaagggacttcttgttcgaagatgaagcaacaattgattgtaagcgataatggtggtgtttgaacctgttaatgccaacctagctgtgttgtgggcacggtacaaggatctcgtatacctagaattatagttctcaaatctagagaccttatgcgcaaatctgcataggattcttagctatagtagtgatactggacgacctattgtggatggatctaaaagtataagacttatttgtgaatccttagaagtgtatccatgagatttgcctagattagttattcattgggaaattaaaattgtcattgatttagttatgggagcagaaacggtatataaagttccttactgaatggctcctaagtggattatgttctaaaaactgtgttctgtacaaggtatgggcactaagaggttagtgatgtctttgggattcattaaagctctagtagccattatggattttatgaaccaagtgttcaaagattaatttgatagatcagtgtgtgaaaagtttgcaggagttaaagcagtggctgaaaactgctctagtattgaattttccttttagtaaggagaaagtttgctgtatattatgatgccttaagattgggtctaggctgtgcattaatgtaagatggaaaaatgatagcatgtgcttcccgatagttgaaagagtatgaataaagatgtcttacccgaatttgggaacttacattaattgtatttgtactaaagattgagcggcattgcctatatagtaagagatgtgaaatatacaccgatcataaaagattaagagatttcttcacccagaaggatctgagtataagataaagacatgggctagagttggtaaacgattagtattatgaaatcctttaccattttgaaaaggctaatgtagtaggtgatgccctacgtgggaagggcaatgataataggttatgtttttttttttttgtatttgatttgtttatcagtaaaagtagagtataagagacctgcgggattattacagccattgaattcattggaatagaaatggaaagatgttatgatggacttcatcgatgaactacctaagactatggggcagtatgattttgtataggtaatcggtaggtatacaaagttagattactttttgcctattcgaatgaacttctccatcgattagtatgctgagttatatgttagagaaatagttcatctttaaaatgctccaaagtctagtatttaacataaatataaagttcacctcaaaattctgggaaaaatttatttcgagttatggggacacagttaatttcaatacaatgtttcattttcaagaagatggacagtgtcaaaggactatccagtatttagaaacacgctttgggtgtacgtgttggactaggaaggatcttaggtaaagtaccttcccttgatcaagttttctttataatagttaccagtcaatcattgggatgacccctattatactgctctatgacagcaagtgtagttccctaattactaggataagttaggtgggataaggatttttggtcctaaaactattcagaaaatgagtgaggcaatggataaaattagaacttgaatgctcactattcagagtagacacaaaagtatgtggatccaaatcggcagaatattgacattccggttggagatatggtacctcttcataatgcactcatgaaaggagtaaagcgctttggtagaagaaggaaattaagccctagcttcattggatcctttttgaaatcctgaagaggacaaagcaagtgacatacaagttggctatgccctcaacgctagcagcattacctaatatattccatgcatgttttaaatgctttgggattatgtgtatgagagactcatcttatatttatgagatatgaagctttaaaactttaacttgagcgacgtacctatgtataagagccattattttaagggtgtaagaacacaatagaggcttgaaacatggacgttataaatgaccagtgagaatacttgaaaggagagagaagttctgaggaacaagatgttggtaatataaagcaatagcaaggttgaagagacgacttgggaattaaaatttgatttgaggcagaaactttcggtatggtttaagtaaattttgagacgaaatttctataaggagggcatacttgtaatattttgggattagtaaatggattagctgtt

SEQ ID NO: 27385 - DNA, 1648 bp, Cannabis sativa
attatcactgtcacattcgattatggtcttgtcgaagtcaaaaaccacaatggtatttccagccattgatttcaattaagaaaacaacaaactttgcggaaaaacgacgatgagaaaactattataagaagtaaattaaagtactactgcagttgaagaacagtgcttaaggaagaacagagagagagagagtattttgtgtgttgtttgatgtgagatgtgaatacaaacaggaggaggtgagtggtttatatacagaagcatttttatttaaatttggaaaaaggaatattccattcaaaaaaagatataacaaattgttgaaattaattgcattatttaggattaggaatagggaaatacgcggaaattagagaatattagagaggtagagaaataaactgaagcatctaggctcacgctcatgccttattaatttatttatgttcggttcatgtcccgtaaaatgaataaaatcagcaaatgataatctcagctttttctttttcgtttttactattctttcgcaacttattttttggattttgttatcattatttcctcattcatgacatataaacctagtacattaattaataactaccgatacgtttcatccccaataaaaaatataaaagttaaactgtattttgtacaaaaattaatttatgatatttttatattaactttattattgtgctctaatatataattttaaattttgatgcaaaatttaatatgttatttaatattcatttaataatttattaaaaaatataaaataataatataaaattaaatataaatttaataaaataataatataataatgcaagttttttagtgcaaaagagtatgttagctaaaatttaataataaaatattaaaaatgatataatagtaattagtaaatataatagtataacatttattgtgataaaaattttgtgtgatgctatattgtgatgtaaatttagcatactattggagtagatttttaataaagtgaactatattttgtatttatgacaaatacaacccctaacaaattataatataaagtgtatttaatatatttctcataaaataatttgcatcaaaaatacttaaaataaatacctaagttataattatgaaacttcagtaggtacttagatgttaagtgttaagtaaattacaacgtaataatcctgattgcaatttttttaaaaaaaaagaaattagtttaaagataccaataagaaaatgacatgtggataataatttaatatttaattcaggtacctaccgagtgtaattttagaaatataacttaggtatttttaccgccaaaaattaaaattagttatttatttacaaccgaaagttaaacttatgtatttatacggcaaattaattactctttctcataccataattttcatttaaaaaaaaaaagatttttataatgttttatataattttacatcgtaaaatttttttatacaaaaatacttttttatttagtaaacattaagaaaaaaaaaataaaaacaataaaaaatcaacagtacaattataaatagtttatgattttataaagggatattggcggctaaaccccccaaacttttgggtttgtgacagttaaccaccaaaactcaaattt

SEQ ID NO: 27386 - DNA, 929 bp, Cannabis sativa
aaatgatacaagatattttatacacagtatcagcaatttttgcaaattgctactagtccacgagataacgcccagagaaaaaattcattagccaaatttcaacaaatacaaaataattgacttaaacaaaatttagactcactctaataattttgtcgcaagcttgatgtactcttatttgttaagtgaatctccttaagacaccaaggtttaaactctttacaaattacttgatgaatgcttgcttcctcccaatgcaagacttgtagaaatcttctattgaagatagcaatatttgcttcctcctgatgtaaaatttagatgaaccaaagattgttttttaccttcttcaatttgagaatttgcttacacaaaagcaatcacaaatacacatgaattcaccaaagattattaaaaaaaaatttcctttacaaaaaaacactctcttatatgatagttaaaagttaatatatctaacaggtgtacaatgaaattataataaatgcctacatataagcgtttaaatttatacacaaatttattatactagaatttttattatggggataatgaaaaaatttggaactatgaataaattaatataaatttaatgtaaaataattatttattaattgatattttattcttgaataatatagaatcaatatcaattattaataataaagtcacatgagattattaaatagagatttaataataatataattagttattataaaactagtgctaattaaacaattaagttttattaaagttgtaataaaaattgtacttatgatatgagatattcataaatacagtaattgtttattatgggatttaagaacacttgcaaaaagtatttattttaatagtactaaaccagatacacaataaaagactttgtattatctgattattattgtacc

SEQ ID NO: 27387 - DNA, 2276 bp, Cannabis sativa
aataaaaaaaaattactaattaagcttgaataagtggacaaagtcaatcatatactttcattttattcatgggtatatattccgtgaaaatctcacccaataatattaaatacattttttctaataatataaaaaggtgggtcaaagttattctgggagtttaccaaattaattttatagtgaaaaagtcataattttcaaccacaaataattcatattcatcagcctaaaatgtaaggattaattccaataaaaacgtaatatatttgtattataatatgcaaataatcatgaattgaattccactaattaaaattttttaagtaaacggccatgattactttactaatttaattacacacacataaaagagtaatgctaaaaaatattactggtgtctaacactctcttcgatccttctcggtgcaattaagtatcgaacctcatataaattaagtatctgagacagcacgactctccaaatgcttttttcgagacaataccaatctcccaattaaactgaaattttattttctcatacatgttccataatataattacataattacatatttatagacttttatactaattacaaattactaataaatagaaacagattctaaaggaataattattatatggacttatactctttgaatgatgccataatttgtattaagaactctttatcttgtatctcttatgcttctttagctcatgttaagagagaaaggaaatacaatgactcataatattgctaagaaagcactagagctagatggagagttatcttacaatggtaatatttcaagtgtttttaagtgttaacttatactcgttgtaaaataatcaatccaatttaatccatttgcaaagtgtgtagatattcgcacttgtacgtacagattgaattggattaacaaatttaaaatttgcaattatgcagaatatatgttgattgacatgtaaaagtaaccgatctaatttaattcataaatatttatatatattttaaaaaattagatatataatatctaatacatatgatataagtatatttacaaactcaaatatatatttcattcttatttataagaaaaatataatctaaaacaaaattaaatatctttatacatacaatttttttcttcttgctttgaatttattattttttattttatttattgttgaagacaaacaataataatttattttattttgttgtttattttgttgttagttatgcgagataatttttttattattaaataatttaatattaaaaagtaaccaatttaaaatatacttttgcgaattggactgaattcgagctactatgtgaatttgattagatctaaaatatgaaatctacacttagtacagatcaaatatactatgaataaaatagtacaaattggattagataaactttatcataatgatgagattacatatttaaattaaaatacatatatatatattgtggttttgattggttttaaaataagtcggtgtttgattggacaatcctatcaaatgaagtctcccaatcaaattatataatatatattcattattatttataaattgaatacgaaagtgacatttgcccaacaaagcaacacataaaacacaatattaattaaatataatatttctttaattcatattatatagttatgataattgagagccgacaattaaaaatattggtcacaaatcatgtattattatataaatattattagtttttttatatagaaaaatattattttttttttgattaaaaaaaaaaataaaaaaaaaaaataagaagcacatactcttttcaattgggagttaggaatctaacctaccttttgccacctagactccccacacaagcattaaattcgatggctgagatttttataagaacaattagtaagtttgtttcttgaaattttgatactatctgatggtactcttaaaatatatgatttgttagaaattctcactaaaatataacagttacataatcatatttcttctattagatttcgtttcttttaccgttaaaaattaatatttttactccctgtattttgactaatgttaaattttttttactctttttgtaacaggcagtagtcccgtaatccgtaaggggaaatattgagtaacttgtgaagaaaacttaaatagattgattggtaccacctatatcaacaaggtacatcttattttctagtagcccatcacgaaagaattttacagttaagcgtgcttgacct

SEQ ID NO: 27388 - DNA, 5056 bp, Cannabis sativa
  modified_base (4242)..(4242): a, c, t, g, unknown or other
  modified_base (4297)..(4299): a, c, t, g, unknown or other
  modified_base (4975)..(4977): a, c, t, g, unknown or other
ttttaattttttttataaatttacggtttgagtttctaaggtagtttctattgggttgctatacgattttttgttgcaatttaagttgctttgctagtttcaataggaatttctatgtagaattatgttaaaaatgaaaagtgcccctttttttaaaataatctttcaaaaaataaaaacaaattaggtaatttttaagtaaataattgtatttgttatagtaaataatggtaaaagtctataatatcgtattttttaaaaaaaatatattagatttttgttcatataagaaaaggttttaacttttagttgggtgggtctcgcttattttaatttgagaaatatttttttattcattaatcaaaaatgttttcatatttatctaaaaaaatgatactttcatattaaaatttatttatttttgtaagtaggttgctcataccatcattctttattaagtctagaacataatttatattaacttaaggagttaactagaacatcatttataaaaatagatatatcttaaagattataaaagtaaaaattaaaatatgtaaaatagagtggatatttttttacttttttttggtctctctcaatctaaatcctatattcgttcctatttgtaataaagtcattgtacaaaaaagttgtggaaacatgtaagtatatgcagtgattaattagtttttgatatgaacttatattagctattggattcttttttacagtgtatctagcttaccttccaaggttggagagtatttgaagatgaaggccaaagaagtcaaagatttagtaaggagtcaacgataatcatccaagctaatcattgagatcacttcattactagttacttagcccactttttcttttcaattttaccctttttagatttagattctttcttttttttctgtggagatttagatttagattcattagtattagactacatcgtactctacaaaactttagtttgtgttatgtttttatcttcaatatgtatgttgaaaacccattattctactgttttttttttctttctcacttgactcttttagctaaaaatattaaaagagaaattaaaatagaaaattatttttattattcttactctgttattttttttacactcactctcgagatgttcttttatacatagggagacatatataatactgtacggttcaaaatacacacgacaagtcgttttactcacaattggtaaccaaaacgacattccatcggttactgtattcagagacacagaggcttaactataacagaaacaaacaacactactacattacattacacataataagatgctcatactgttcaaaccaattcaactctaaaagatggggtgttctcttctcttctcttctgttctgtgttcaagaaccactacggctcatgttccagaattcaacttcatgctcaagaacagtcaagagtgctacttcagctttcttgagctcatcatccgaagcctgtttcaaacgccggttggcgatgtgtttgagagaacaacagtacttaccaaaggcttcactgccccacctttggcaagtctctttcagttcaggtggggttcttgactcatctcccaaacacaaggcaaagctctcttggtacacagcttcaatggcccaaaatgcagttattgccactgtataattggcctccacgctcattaaactctccaaaaatctgcaagattcttatgttgagtgaaagtgaaccttttctttttactattttgctactgtatttccccacatttatagaaacttaactcatcaatcatcataactctatatattaaaatttaagagatcatataaatgatgagcattgtttttatgtgttctataagaaaaaaaaaatcatactaggtggtatttggttatgagcaatgaaaatataaaaataaaaattaaataaaatttaaaatgcataaaaaaaaatattaatttttttctcaatcataaatattaaaatgacgtttgttccatttcaaactagaatagtcaatagtgaaaaagtaattccattaaaatcacatttcaatactatgagattgtttccattccattttattacctcccaccaaacaccaccttaattccaaattcaccctctaacaattgtttctattgctcacaatctaattaatttgactaaagggtctccctaataatgcataaataagactagaagaaacttaataatctcagtggaaaacaacagaaccatagataattctctcattattaacaagatcatatttttccaccatattaggcacaaaagtatgaaatgaatatgtatatgtacctgcaatattcctgatttggtttgtgtggaagaagtgggtgagagagttgaacaccccacttaaaggcctctttcttaaaccattcaagttcatcattcaaagcagccataccacccaatatgacctccatatcactcctatcatcactctccttccaagctttcacaatcaaactcgctacaaaagggacaaaagctctaacaaagatgtaatcctgtccctgcatgcatttatttactcaataagaccaaaaaggttcaatctttaacatccataccctaatacttgttcaaaaaacaaaatttgagagatacccaagttgggaaaatgagaaaggagaaaactttagttaccagccatgttttgaaagaggagatatcaatggtgccatcactaatgctgagaatgaaagggtgtttagtggcaccaacgtatagcaaacggtgttttctaagccacgtgtcgatcacaccttcattttccattccagtctttcccttcttctccattgatcaccagaattagattaaacgttcacgaatgaatcatatatagattatagagagaggagagagttttgagtttgaccaattgagttgacttgttgttagtagattgttcaagaaagaggcccattggactcctttctgttctagaactacacgtagcgatacatggcacaagactaatgggccgttctcaatcttaggtggttatgattgattgggccccaaactgagtccaaggcctacttccacgcacacaaggttttgtgtccacgtaatgacacgtacacattcaataggtgttttttcataaatatttaaaattaacaaaaatattgcaaaaattggaatccatactttctttttttaagaagaattaggaattttgcttctaattagacattatctaattttacttcttaaaatatatagttagttaaaatttttctttaaatttttacgaaatttaattattctattgagttctctctcattattctatttaaatactgacgtatttttataacttaacaattttaccttttaaatttttaataactatcaaatcgtacatactcaaaataaaaataaaaaagattcgatatatttttttttttttgataaatcttaaaaaattaatttacatcttttagtagaatatatattttaaatgattaagaaatctaaaatatagattaaaattttaagagtaattaagtgattttaaaaatgtaaatatcttttttaaaaaaaaatatccaattaaatataaaaagtatattaaaattaaattttacggaacaaatttaagtctattttttctctaaaaacttagatttgcttaagtaaagataatatatttttagtttaatttttttatataaaaataattttgtatttttattaaatttctgattatttttttaagatatgagtttgtaaaaataaataagtttatttttttcacaaaaatttagtttgtttaaattatttattggatttcaataatttttgtttgataattttcttaagatatgtgttcataataaattaaattttgaaaataactttttttttataggaacaatgtagactttttaagtgaacttaattattttttttattaatttaatattttttttatcaattttaggaataatgtagactttttaagtaaacttaataattttaggattaaagcttaatggactgattagaaagatcccagggcttataattcatctcatggtcgaatctcttagtgaagcccataaattagaattttgccattattttgtttccttaatgacacaaacttatctttcttgagtaatatcttttttctgctttagttatttaaatactgattttatctatttaataattatnaataattatcaaataaaattactattttagtatatttattaattagaccttacannntctcttaattaataaataaacgttgaattctttttttcttcttaattaagccctttcctggtgaaaattcacaaacaagacgtagtcttatttcaaattctaattgattaattaaaccaattaattgagactaaaaaataatattatcccagttagtgtggggaccatgaccctgtgtaatcaatcttccaaaaagtagatctgaaatttaccaagtaaattttctaacttattaatttctcttgactccactataaatttagaattgaactcttaattacaaagaacgttctattaccaaaaaataaatgcgatttgaattacccattatttcaattctaatagtcaaagatcatctatagatgatttacatcgagtaaggacaaatttactgttctactcttcaatgtattttaaccttaaaacacttagcccattgtaaatgatatttcagtaaactaatataattactgaaacgagatctcaatcatttatcgcgttaagtcaagttcgaaagaaatcatcgtttcacttctagaagttatagaagctatagatttcatatctatgattagcgctctcactcaattatactatcatattcccaagatgtaagtagtgagtcaatccaattgctcagcattaatgaacaagttaaagaacacaaataatacannnaagccagaacctaaccatctcaagattaagatctattgacctaagatcaactaagtgattttgacttagaaagatataa

SEQ ID NO: 27389 - DNA, 899 bp, Cannabis sativa
  modified_base (74)..(76): a, c, t, g, unknown or other
tgtgaaccatgcaacataaattgaatttttatctttattaattagtaaaactgattatattgaaatgggttttnnntagggcacaaaacccaacaccttaacccctgcttaacgaaaagaaataatccactttgggtcctcaataactctgtccagtcgcttcttaattagagccgagaactttatgttactggtccaggtaaagaaattccccacacttcctagatccacacctcccaaaatcatcagaaagtttgaaagagcatcaaaatcaccttgggacccagaattaccaccaaatttcttctaatgattgattaaagtattcaagtccccgagaagcgtccaaggcctatccaaagcagccacttcaagagccaaattttcccataacaatttacgctcactcctgacagaaggagcataaacgaagagacaaagccatttagcacatctaaaaatattgttcaacctaaccaccactttatattggtctgtttgtaaagccactacatcaatcctagccttccaataaagacaaaggccgcctgccgaccccatcgggtccacaataacagcattgaaaaaacccaaccgcctccaaatactctccattttagcattgtttgcttttatttccatctaggaataggacatccgggtccatcctcctcaccaaacctcgtagggcttccactggccgagctttccccaagccccaacagctccaagacatggtttccatggtgccctagggggcttgataaggctcgcctcctcagccacaataaaatcctctttatcaatctctgtattaagagtgactcttcctcttgcaacattagcatctgaaataagtgacatagaacctgaaatagttaagaaatgttcacctgtca

SEQ ID NO: 27390 - DNA, 1252 bp, Cannabis sativa
  modified_base (1215)..(1223): a, c, t, g, unknown or other
gtgcgggtgcagtttgagaaattggaaaaactgcatgtgcgggttggtttgaaaaatagtcaaaaaccgcaccacccgcaccgcgaacactcctagttagaggtataactaatttagctgagttcaggcgtttcatcgaacatatggtagatgtacctttatatacatatatacacacaaaaatataacttataaaagaacaaaaaaaatgttggcaaataagcacaattaataataaacaaatacatcagcaacaaaatttttaaaaacaattttacgataccttttacctttgttggccaaagatttcccaataatttttgaagatttagaactttttcaaacctgcttcttaagaatggattttttaatagaaggaaatgaagaagatgatgaacgagtgacaactatttatataaaatttgattaaagaaaataaaaagaaagaagaaaacttggacaatttcttcaagagaagttggagatcatacacgagcaattttatgaagaggaaataccgtttatcttgtgtggaaatgattcaaacaaaaacttaaaataaaaaattaaaagagaaactaaaaatatatgagaaagtgaaagaagaacatgacagtatcaaatatataaatattatgtgtatgtgggattttggtaaataaaataaaaaatagatataaatgtttttcttgcaaaaataaaaggaaaattttatttacaccccatttttttttttttttgagaacaaaacctttcattaaacaatactaccgattacaaggaactggcaagtcacgatcaatagcgtgacaagcacaagggggagaaaccccgatccacatagctctaactttgttaaccaaagcataattggctaatacatgagctaccacattagcttccctaaatacaaaccgcaacccgccaacagaaccatgttgaagcaatctttgaatctccataataagaccatcctcctctcgacaccccaactcttcaccatgaataagtcgcaccggctgcagacaatccgtctgaacaagaaaccttggcagccagcgttgtataccagccagcaacccctcccaaatggccataagcttagccactaacggtgatcttgcaaaccgcacgacagtagcagatgcaaaccggaccattcccacttcatccctcaccaccacaccagtagactgttgggttttatgtcctaannnnnnnnnatttcaatataatcagattcacttattaa

SEQ ID NO: 27391 - DNA, 5081 bp, Cannabis sativa
taaaaaataccatctggcagtatttttgtaaaaaaaatagcaaaagttagtatatcatgtaaatttaccatattttttaaaaaaatatatgtatatttttcattagtttttaaaaatatataattttttaataaaaagtttaataatttatatttttttgaaggctcactcaatctcaaggttggtgttggctttttgtttttatttttataaaaaattaaggtgacgtttggttggatgtaatgaaatggaatgaaaagaaaacaatttttatttcattcctttgtttagttgcattttaaagtattggaatgacatttcaaatttcaatagaatgttctttcagcatttataaagtatttttaatttataaatgtcattttcaaaaaaaaattgataaaaagaagaaaaaaaaacaaaaaatatggggacaaatatcaaacataaataaagttaaatatgcacctaaacaattagataaggttaaaacttagtaatattagctctaattttcatgataattttttaaaaaaaaataactagcaaattatcattcaatcaaataatttgtccaatataattaatttttaaattattatcattctctattaaaaatttaattatatagtttttattgctaacataaaagaacaatggccagaactttgttcttcttcctattttttttttcaaaagataaaattacttggccagacatatcaagtaaaattaaattagaaagaattggaattggattaagaaatataagaaaaataaatgaataaattatattatatatgatgatatttatacaatcctctatttaattcaagtttgtgttggaattgaatttgattaatgcagaaactcatctatgtttacatatagaacaaaaacaagtagtttattcagttatctcaattacacatactttatcaaaagaagaagcatttattgagctatatatagaacaacacagctccaatgaattgggattggaggaagaggaaggcacaacatcaatccactctttctcaaccatctcaacatgtgaattttgcttcgggatcgccacaaaatcgagtttttccatctgttctgtcagcgtcgtcttcatgaagttcatcgaaaatgtcatgttataacttttctcgaaagcatttgcatctttcggtagatgaatcccaatatctgccttttgtgattcaacaaacccgagaagtagcgggtttagaccaacatgtctttcaccggtgttcaagatctgcaataacaggaaaacttgatgacaaaaatcgtaagcctcgaattgtactagatttttgaacggtttattttgttctaaccttaatatattcgatgccaagttcgctaaaactatctaaaatatcttgtgaagaaagcaagctgagagttcctcccgaaccaacgggcgattgtagcatttcccaaggtgatttcatcagaattttatgccttttgttttcttccggggaatcgctaacaactgggagtttctcttcctctaaaaactgtacctgtaatcgataaagcaaagacaatagaagttttaatacattttgtactcacactcgattacacgaagaccagaggtttttctttagtgaattcgaaccttttcagagtcgaatgagaagtgatcgttgtctgcaaatagagttgctaacgattcaacctcgccagttgagcagaccaaaatcaaaggcaccgttgtgcggtcttccatctgcaatggacacaaatgttatccaaaccgctttatatgttatggacaagcattctgatatttatgacaaatattttcaatcgaaaagtaaaagaatgagtagcacctttatgaacctctcatcatcaagtaatgtttgaagttgggaaaacgatgagttctcgatgattttcgagttcacaagatccaagtcatcagccaaactctgcgtgtttatgtcatttaaaactaaaacaaccgcaactttgccttccgatatgagctgaagacccttctctttcaacgggaagtgtgcaccaagcttctctttacttgcagttgaattgagacaatcctctgatatgaccaatgtactaaatttctcttttctattaccactgaatagtttggtaacattcaatctgatttagaaagtaaatagacaaaatcaatagattagaccgaaagcagcatattcacaacttcatggggcaactgctgcataatttgggactcgaacccaggacctccaacacacacgcactctccaatagccacttgagctagcctcaagtggttctttcaactatatgtttataactaacatttgtgtcttacccgaaaagtcggttaaatgatttcctacttttcaggcttaactgatttacccaagaacctttttcactcatagaaagaccacacaataacaagagaaagagagtaccttttaggagtttcgatatttttaagcgcaagttgaagcaatttagaatttacaccatcaatctgattagcaagtaagctcctttgttctttctctccgaatcttaatccatgaaatacatgtttttgctccaattcaattagtttcttctttgcagctatgagacgcttttggtttttcttccgttctttccattcctgaaatgtatcagattatgaaaagctcaaacaccttgaattcaagagatctattaatcaacaaaagtaaagatggttatatgaacatgataaaatatcagcaaaggagaccaagagagtatgcctcacaagttggcgcctttctttcttggacctctcatcgtagcgtaagtttagttcaaggagtccctttggaggcgttatctgcattactctttccttcaggtcaacaattggaacaattggttcgacaaatggtacccacacacgatggccggatacttttgttccttctggcttttgctttccagttgcatcaactacattaaacgatgaatcgagcatgacctctagaagatcactggctccactatcgaaaatattaaccacagttccaacatgttcaccagtttccttaagaagaactctcatgccaacaagatcccgagtatagaattctccttcctccaagtctggtcgttcttcttcctttacaagtagagttgacccaacaagctgcttagcctgtacatatttttaaacactaaacataaggacatagacatagtgccttgaaactgaactaaaaatttgtatttcattcctaaccttaaaactatttttgaagttaaagaaaaaattatcatgaactgaagagaattgtcgaaatctatataaactgtaattcttttatcattcgttagacatttcgaaaccctccaaatcgtaatcctatattattttgggagcgaaaaaacaatagcaagcaagccttgtgggatcaaaccataggctagaacattttagctacccctctcgggccatagtcatccaatatttagacgttgaattcgaccgaaccagcaaaaagaaaggaaaataataggattgctcttttacctggtccactgaatcaattcctttaaatttaagtatccaacttttctgaccagggtgtcctcctcttccctcctctagctccacttcttgaattacttctctgcctgaattttgttgtttcaaccatctcctcccaggctaaagaaaaagcatcaatccgaaccgaagaaataagcctttcaacaccacagtttacaaaaatcataagtgaagtttaaaatccataatactttgatatatataccttggaaaaacgcaattcaggaaagtcagtgctgggtttcacacgagtctccccttgaagcccgtgaacattgcagatgtatccaacctcaacgaatcccaactcggtatcagcagtttctacctcgtcttgagtagctgaaatgaccaaatacaaaataagcaaacccattgcacttataagaaagcaatttcacatattggagggaagagcatcatgtcactatcatctaaaaacaacaaaaacattcaattgcttccacattttaaacatgtgaaaatcaaatgaaagcactgtcaagaactttcatttcaaaagtttcctttcctcataaagctttttataaacttttgtgtaacttaatcatcctaagcatacaattacaaatttcataatgtcaagtttatgaatattgctatcaagtatgttgccttacaacacttgatgcaccactctatatgaaaagtcactaaatttaagctcttataagtgtgttgggaaccatattttccctatagcaatactccaagtttatagtaaacttaactaataagtaaccttgtaacaataacaggaaactatgaaaaggttgtattttttgaggtttaactaaaccccattaaacaataatgattctattcatttcctcagttgagataaaatcagaactaatgtttcactaaatcaaaaactaaaaccaaatccaatagccaaaaaagaaaaacaacttcatagttatcccaatgaaacaaaaacacatataatttaaagataaagttccaaactttagggaactttaactaaaacccactaaagctatgtctttccacaactgaaaccaaacaaacccatttgcaacaaaagctaaatatgttgaaaaaatacttgtgctatgcagaggagagaggtgcaaacggtgaatttgaagttgaagaggaattgaaggtaggcgaagaggtgaggaaattgggagtgttggattgggatgaattcgaaatgaagtagttgggagtcgatgagaggtgggtatggctgatggtatggaggaaagtgagtttgaagaacagagaatcgaagctctctgcatatttttttctgggttgggttttactgaaactatgcagagttggagaaatgaaagagtaagtacatacaaagaagaagaagatattattcttatttttatttttttttaatgtgaaaatataaattgtaaattgagaattgctaccgtcaatctttatgttcgaaaacacattattcgacttcttttcaaaaataaattaatag

SEQ ID NO: 27392 - DNA, 1731 bp, Cannabis sativa
  modified_base (526)..(536): a, c, t, g, unknown or other
  modified_base (753)..(763): a, c, t, g, unknown or other
  modified_base (1296)..(1297): a, c, t, g, unknown or other
atcttaaattcttaatagttcagggggaatttttaacggcaaaaaaagttcagggacactatatagtacatgtcaaagttcggagagaaaaattactaattaacctttggtttttctttttatttatctttttttttttgaaaaaaaaaattaaaattaaaaaaggcacttttagttttttttttttttttgcggtcgtataagacaaactttgtaaaaatgtagaatggaaattttatttgcatttcaaaaaattataaatgcaccttaaattaattatttttattttagaagttttttcatttttaaattttaaagcaattttttttgcatttataggaaaataacggaataacaatccacatcgcaacttacgcagcaactactgtaaaaattaaaaaaaaatagtatataggataatttcttttattttacatagaatatatatttttagttacattaatttttttatatatatttttcttctatttcatatcttataaatatacctatcaaataaaaatannnnnnnnnnnaaatattataacaaaaaattaaaataaaaaatagggtttttttatttttacacttcaaatcaattttttttttttttgtatttttaccgaattctacatagaatccttattgcaactaacggagcaacttaaatcgcaaccaaaaatcgtataataacccacatagaaagttagaaaccaccggagaaatcactttagaaatccaaaccgtaaattnnnnnnnnnnnattaaaaaaaaaatagtatatggattaatttccctaaaaaatatgtgaaatttattaaaaaaaaaataagttttacattattaaaaaaaattaaaaaataaaaataaaaaattattgaaattaacacaaaatgtgagaacaaaattaaaaaatattaaaacttatttttaaaaattattttaagcttaattttttaaatattggggtgtatatatcattttgtggagtgcgcatagaatttctcaatgtaaaaaaataaaaattctatttgcaccccataaaatgataagtacaccatagcatttaaaaaaattaagcttaaaataatttttaaaaatcactcttactatttttttttttaattttttttcatattattttatgttaattttgatacttattttaattttattttcacaattttttttaaatgatgtataatttttattatttttttctaataaaatttcacataattattttttataatatttaaaatataatttatttttatttggtaggtatactttttnngaatatgaattgaaagaaaaaaaataaaaaaaatactaatataattaaagatataatttatgtaaaataaaaattattaaaataaggtgcatttataaattttttaggtgcaaataaaactttattttaacaatataagtattaaaattgtgccaaaatgacattttgtgtagaagcccccttttttatctagaaatataaagggagaagttgaagattatcctttttttatatattaaccaaatttattttcaaataaaatttaattcaaatatacttctttttacgagtattgtacccaaattatccttacacactcacataattaaaacataatttgaaataaaatagatttgtactcttttgtagatggatgtgtaggcttgtgggaaagttggggccaaattttgattagagaaaataaaaactatctt

SEQ ID NO: 27393 - DNA, 4079 bp, Cannabis sativa
tgcaaaaattgggataacacctatcaatccaacacaaagtctccttgataccaatgatttctgccaattcaggttggacccgacccatctttcctaaagtaaaatcttcaatcattcgaccattactgtccctggccaggcatcccaaaccaaaacatcttcttgagcaaacaaagctccatccatatttaccttgatcttattcccattgggtctgaaccattgctcagatctattcccatgctcagcaagatgagatagagaaaagcctctacgttcttgagaaatcttacattgatctaggcatgatcttgcaggcgcaacaatacttgcttcattacgggctctccaaatcgcccacgccaccatcgccagctcctccaattcattaatcttcccacggtttactaccgcctaagctaattacaaaaatcaacatcatcagtaataccaacatcgaccaatgatctactccagcatgatcttgcaacaggacaagcaacaacagcataaaaaattgtttcattatccaaattgcaaacaggacagattgcacttataggtacatgtctcttctgcaatgggatacaacttggcaagctaccagaagctaccctccacaagaaattgcagacatttgggggcactttaagattccagatagtacgccataggtttgtcagttgagcagcagaccaagctcccttaagcacctggaggtgtctataagcactgttgaccgtgtaacctccatgtttctcaaacttccagcaccattgattctccaagacattatcactcatctgaattgaaaaaatgagagcctgatctctatcctcaaaaagatcacgaataatatcttcatcccactctctagaatcaattctcatgaggctgctaacagaatggttaattaaagtaggatgattggataaaacaaatggtatttcatcagggagacacggatcattgagaatggagactaattccattgaaccaatcgatcgacaaacaccagaaaccaacaggtcttttgcttcaaaaatgctacgccgcacaaaacttgagttatcacccaactcagcgttcaagaacattgctgtagggtagtatttagctttaaacacacgccccacaagagaagaaacatgagtcaacagtctccaaccctgattcccaagaagagccatgttaaaatctcgtaagtcccggaaccccaatccccccctgcatgtttgtgacgacaaatacgactccaactcatccaacttgtacttctagtttgagttgaacccgtactccaccaaaacttggccataagtctttcaagatctttgcatgtatcaactggcagtaagaatacattcatagcgtaattaggaagtgcttgagtaacagattttaatagcacctctttaccatcccttgaaagcatcctcccttcccaaccattaattcttttccttagcttgtctttaagaaaaccaagtatggaatttttattttttccaattgaatatggaagacccaagtaagaaccattttcatccgcttcaaaaattcccaacaagtcacagattgtatcacgcaaaccagcaacagtgttgaagctgtaaaaaacagatgattttgagaaatttattttctgtctagatgccaattcgaatgtgtgtagcaactccttgatgttatatgcttcctcttccgttgcttcacaataaatatagttatcattcgcgtataacatatgggaaataattggagcgtgacgagcaatcttacaccccataagtagtccactttgctcataggtacgcaaaatacacgagaaaccctccgctcaaagaataaacagataaggggataattgatctccttgtctaatcgcacgtgaagcatcaatagggcctatttcatgtcttccatgaacaatagaaaaagacacagaactaacacaaaacattactaaattaatccatcttccatcgaaacccatcctctctaacatagctttgatataaccccactccaacctttcataagctttgctcatgtctaatttgagagccatgaacccatctcttcctcctctttttctcttcaaataatgcataatctcataagagatcatgatattgtctgaaattaatcggccttgcaagaaggcattttgcgtcttagatataatggtaggaaggactcttttgagtctattagcaataaccttagatattatcttatataggacattacagagggaaatcggtcaaaaatctcccatatcttgaggttgcttctttttgggaatcaaaacaaaattggttgcatttataccagtaggaaaacagccaaattcaaaaaaagacttaacaaggttaaagatatcattaccaaccacaacccagcatctttgaaaaaagcctagagtcatactgtcaggccccggagaattatctgggtgcatttggaagagagccttacgaacctcctcaaaggaaacgggctgcatcaagtctttattttgagtatctgttacacgcgactagacagcagttgtaacctcattccaattcatttgagcagaaggaaacaggtggatgaaataattcatcatgacatcgggtaaaccagtcttccaattaacccaaatacctgacgaatttttcaggttctaaatggagttgtttcgtcgacgagcagataccgaggcatgaaaaaacttgcttttattatcaccatattggagccaaagctgctttgatctttggcgccaaaaaatttcttgttgtgcatacgttttaaccaagttatgtttttcttgtttgaagtttttaatagagatgtcatcacgcccagatttccatgtattcatctcctttttccatctcccaattctttctttaaaattaccagtatactccttaccctaacattgcaactgtctactacaggctgccaccttactttggacataactgccaagaaaaccatcccaactctccttaacaagctgaatgcacaagggttcacgaagccaagaattctcgaacctaaatctttgaattgaaggattcgttaactcacaagttaagtccatgaaaattggacaatggtcagacgtcgacacttcgaggttataaagtttagctgcattaaacatgtctaaccaagattggttaaccaaccctctgtcaaggcgcacttcgatcaaaattacagttcccctacccctttcccatgtgaatggatagccacataagtccatatcctgaagcccactcttagtaagagcttgttgaaacccttgaatcaagaaatcaggatatcggttgcctccttatttatcatcatgagacattacgttgttcaaatcccccataacacacaaggggaggtttgaaataacagctaaattccgaagcatatcccatgttgcctttcttttacttcggttttgttcaccataaaggcctgtgagcctccatttcattcgtcccacaatagtaacttcaatgtctatatacttattagcaaactggataagagaaacctcttcttcatgtctccatagaagagcaaaacccccacttttacccttcacttctacatcaattataccatcaaaacccaaagaaactctcaccttctcaacttgatcacgtctacagagtttctcacaaagaaacaaaaaattagccttcttttggatgacaatatcctttaggaattgtacagtccatgggttcccaagcccatggcaattccatgataaaagactcataatggttggtgggcttgtaaacctgaacccaccaaatccacattttttgaatctctttgaacttgggccgaattcctcccttccaaattatcttctgaacaaacaccaaggcccatctccgttcttcttctttttgagtcaactatcatcaaacaatcttcatctacattaatagcattattttcctaacaatcagcatcagtcaaccctcatctctctccaatatttgattcaccattctgtccaataactacccctttattacatgatacttgacccccaattttctccttcatca

SEQ ID NO: 27394 - DNA, 2954 bp, Cannabis sativa
tctggtacgtatactgtgagcggctacggacgggaaaacgatctaaaacgccgatggtgccttagctttattttaagcagttaataattttaaacacaatgaaaatatattatttaaaatcatttgcttatcgtattttattttaaaatgaatgatccttctctgttgcattttgatttctaaaacccactgttgtatttcaagtatttttaaatcttttcaaaatatgcattaaaatagtattttataaagtaaggtaaaatactggggcgttacatattctcccaaaacttgattcacgaccagctgcaaatcactaaaacattaaatatttttcacttttaaagtctctgcaatccttaggccagttaacaaagcttcatactctgcctcattatttgaagcttcaaattgaaatcttaatgcataatgaaacttaatgttttcgggcaacaccattattactccaacccccgagccattctcgtttgaagctccatcaacgaatagtttccatatcttatcatcatttcctgctctaaagtcttttcttgagtatattccctccactaggaagtcagctaaagcctgacctttgatagaggtcctcagatggtaagttatttcaaattgccctaattcgattcaccatgttatcaatttccctgatgtatcaggtttggacaatacttgtcaaatagctgatttgtgagaaccttgatgggatgcgcttgaaaatatggttgtaacattttggatgcatggaccaagcaaagtgtaagtttttggagcgataggtatctcgattctgcccccagtaaccttttgcttatataataaataggttgctggttcctaccatcttctcgcaccagtgcagcatttataatgttttttgagatggccaagtaaataaataacgtctctttagtgattgatttggccaatactggtggtgtgtagatatgcttttttatctcttggaaagcctcctcgcactcttcattccattcaaatttttttgttgccttagagaatgttgaaaaaagggaggcatttatcaatcgacttcaaaataaatctatttagtgctgccattcttccagtcaaagaatgtacttcttttggtttagttggcgaaggcatctcgcacaatgcttttattttgtcagggttagcttcaattcctcttgcatttataataaagcctaagaatttctccaaagacaccctaaatgaaaatttcttggggtttaatttcatattatattttttttagtatggtgaagctttctacgaggtcttctatgtggttctcgcttttcacagacttcgccaacatatcattaacataaacttccatattttgctctatctggttctcaaacataccattcacgaggcattggtatgttgcatatccttatagcaataaattcccatatttatgacaaagcttgtatgctcctaatctaggacatacattttaatctagttatatccagagtatgcgtccatgaaggtcatcaatttgtgccctgctgtcgcatctaccaattgttcgatccttgataatagaagcagtcttttgggcatgtcttgtttaaatcgaagaagtctatgcaggttctctatgccccattaggttttgggacaaggactggattagatatccatgactgatagaatgcttcccttatgaagttattggtcaacaatttgtcaatctcttcttttagtgcattttatcttttatgatctaaaggtcgttgttttttacgtttaagggataagtagagtcaatattgaggtgatggcatatcacattcaggttaatcccgaccatatatgaatggctccaagcaaactaatcttggtttgccttcaacaaagtaattggttgctattttagctcttccctcaaactctttccaatgttgacacatttagtaggattgtttagatctaaattcacctcttctaattctttaataggtttgagttggttatattcatcatggatcctttgatctagatcttccatcccttcctcattttcttttgttagaatcaccattaattgatggcttgcccttctatttttcaattccacactatatcattgtcgagctaatagttggtcgcctctcatagttcctacccctgaatgagtggggaattttagggacaaatgtttgatcaagcttattgcccccattcttgttagcgctggacgacccataagtatgttgtacacagaaaagatgtcaacaactaaaaattcttgcatcaggttcattgatagcggtggttctcccatggtgagtgggatatcttgtacccatgcttgaaacactatcgcttgtgaacccgcaaaggttaagcgtacatggtttcaaccttacttcttctaagcccatcttctttaaagtttttttttttatagaaaatattaacagaactcccgttatcaatgagaactctctttattctcttattagcgagctgaaccgttatcactaggggaaccgcacatgtgatgtgtcttcatcagtaaagatgaagggcggttcttcagactttgctcgctttagaggttctggggcgaaagctaatttctcatttttttacttcatttatatatcttttttaagcatttttgctatttcctgttaggtgtggccctccagagataactaagatgtcctaaccctcgacttggggaggttgcaatccttggttgttctggttattgggcagattctgctcatttccctgagcccttacatactgcctcaggtatcctcgcaagatgaaattttcaatctcatctttcagttgacaacactcttcagtggtatgtctaatgtctcgatggaaatgacaatacttattgggaactctcttgcatgtctcactggatcgagtcttcaaaaagcgacccaatttttatt

SEQ ID NO: 27395 - DNA, 2511 bp, Cannabis sativa
  modified_base (1355)..(1356): a, c, t, g, unknown or other
tcctaatcagaagaggaagaccttcccaaaatttggtggttcgggttagaacaaaaggttctaaaggaaccaaggtgaggtggacaacaaggttattcttaccctaagtgccctcgttgtaagaaacaccatcccagagagtgcaatcgaaagacatgcttccaatgtggccaggtcaggcatttttagaaagactgctctcaaacaaagagggaagaacttaagctagaggcaaagcccacacctgcttaggtgtttgttatcactgaaactgatgttgtagccagtccttttatggtaacatgtcaacttcttgttaacgactcctatttaactgtaattttgactctagagctacacattcatatgtggcatcaagagtaattaaccaattggataggccttgtgatttctttgagatagggtttagaaccctactgcctagcggagaattggttatctctaaaaggtggattaggtctatgccagttaggatagaaaatagggagttgagtgttgacctagtagagttggaattaacagagtttgatattatacttggaatggattttttgtccaagtattcagccagtatttactgcaaatgtaagatggtaactttccagctggagggcgaagatccatttgtttatgttggaagttctttaatcccgattatctcaattttaaaggctaaggatttattacatagtggatgtgtaggatttttagcagttgtcatcaactctagtagacctaaaacatttgggcctgaagatgtcagagttgtaagatagtttcttgatgtatttcccaaggaattaccgaaattcccgccacaacaagagatagatttcatatttgatttggcacctgaggcagaacctgtttctaaagcaccatactagatggctccagccaaacttaaggagctaagaatacaactttaggggatgctagatttagggtttacccgacccagtgtatcgccctggggagctccaattttatttgtgaaaaagaaggatgaatctcttcggatatgtattgattaccgggaattgaataagctgaagattaaaaataggtatccattacccaagattgatgacttgattgatcagctttagggtaagactgtgttttctaagattgacttgtgtttaggttatcattatttgagaatacgggaggaagacattctgaagatggcctttcagactaggtatggtcattacgagttcttagtgatgtcgtttgggttgacaaatgctctagcgacctttatggatctcttgaacagagtcttcaaggatttcctcgataactctgttatagtgtttattgatgacatnnttgtatactctcagacagaagaggagcatgagcaacatctctgaatggtttacaatgacttagggatcataagttgtatgaaaagtttaaaaggtgtgaattcttgttgttggaggtgtccttcctggaaattttgtcaaaaaacatgaaattatggtcaatccgggaaagattgagtcaattaataattggtcgaggccaagaacagttattgaggtatgaggtcttctcaagtttgttggttattattgatgttttgtgaaggcttttctaagattttaataccactaacgaaattgacaaagaagaatcaacaatttttttggtttgataagtgtgaaacgagttttcaagagtatcaacatcgttacccgacacataatttagaacttgctgctattgtgtttgctttaaaaatatggtgacacttgtatgagaaaagtgtgaaatctacaaagaccataagagcctcaagtattcaagatttgaatatgaggtagagacggtggtgaattagtcaaagattatgactgttaaattctatatcatcccaagaaagccaatatagtggctttgagcaaaaaaggtcctgggtaagtctttagtaccacaatgatagcacctcaattagcttcagatatggttagtgttgaaaatgagtttgtggttgggaaatcacacaacctgactctttagtcagatttggttgaaagaattaggaagacacaattggaagacactgagttagttaaaatttgggatgagttattaatgggccgacctaaggacttcttaatcttaaataatggaatgttactttacaaggcttgagtttgtgtaccgagtagtgatgagcttaaaaaagagatactcacatattaaatcttattcgttgcactcgggaaccaccaaaatgtactaggacttgaaacccttttattagtggtgcaaaatgaagaaagacgtagttgaatatgtttcaaagtgcttaacttgtcagcagattaatgcagggttactacaaactattagcaattcctgagtggaagtgggaggatattatgatggactttgtggttggtttacctagaactaagagaatgtatgactcagtatgggccatagtggaccgtttcacgaagacaacacattttc

SEQ ID NO: 27396 - DNA, 1093 bp, Cannabis sativa
atggcgctctagacaggttaaaggcatgattagttgctaagggttttcaacggacagttggggattgattattttgatacctttagccctatggtaaagaccaacactattagaatattgttcacattggttgtcacctatggttgggacattcaataatgcattcttgaatggagacttaaaagaaactatttatatgcaatagccacctagctttgattactccacatatctcacctatgtgtgcaaacttcagaaaaccttatatggcttgaaacaggcacttagggcctagtatgaaaaactcaaaaaaaaaaaactttactttcttgggattttacaaagtctgtctctaacagtagcctattttttattaataaaaatggtcagttgctttagttttgatctatgttgatgatatactggtaattggatccagtacaagtgatttttctaacattattagtgcatttcaaagcacttttgctcttaaaaacttgggatcagtaagctaatttttaggctttcaagcttcaaaagttggagataatttctacttgactcaatctcaatatgcttttaacattcttaacaaagccaacatggaaacattcaagccttgttcaaccccatgtgtccaggttacaaattgcacactagtgacaatgaaactttcaagatcctacattgttcagaagcattcttggctctctccagtacctctctttgacaggacctgctctgaccttgctgttaacgcgttcaatcgattcatgcaacaccctagtatggctcactagaattattgtaaaagagttcttcggggaaccattcatcctggtcttgtgtttatgctagcaacaacacttactttagaagtactttcagatattgattgggcatgttatcttaatgacatggagtcttctatagtgtactacttaacttgatctaggtagtaatctcatctcatggtgctctaagaaacaaaaatcaatagctcgatctagcactaggtctaaacatagatctctatctactactgctattgaggtagtttggactaaatcaatccttgttgaacttggcatca

SEQ ID NO: 27397 - DNA, 4825 bp, Cannabis sativa
acgtaagcatgccacgtcatgagagaaaaaaattaggataatagtgagggcggtattgatggaaaatattgatccattggtggtgtataagtcaatatcattaatgaattcaaatcaatgatattaggtgtttcctcatcctccaatgtcacattttctttactttcatctaacaaccctttttttttctcactttccacttggctatccataactttacttgtgatttcatattaaataatttcatgatcatggatagaatttacttcatttactacactacattcattatttgtcaagtaaaaatccaatttagacaaattttgagttaatacaacttcatagggatcttgatcttcaattgcaagcaatgcttccacctttttcaaacaactctcataaccttggttatttgagtcattgtccgtaaagcactccacattatgcaccattaaattattagttatagatcttaccatacactccaattgagttatttcttctacaagtgatggtgtatggccttcctcctcaatttggttgggaagagttttggtaatgttgagggtattggtgactccaaccttatagtgaaggatctcaatgccaatggtagtcaaaatcagccatatcattcaactaatgcattatgccaacatgacttcttcttagcaatggctcaccagttacttctgctccataattcacccaacttttcatttcatcatttgatcaattgttaaagaagaaagtcagacagcccctcgaaaagttgtgatgacatctctctaccaattcattaaaccttcccaagcagcgtagaatggctcattgtgttgttggaaaaattcacaaggtaatcttgatgtagtatttttttatgtaccttgcaagacaaactcatacaataaaattagaaataaaattaattaaactgatattgataattttcaatccccaacaatgcgcaaaaaacttgtttggtaaaacacaagtatatgcaattgaaacaagtaatataatgataaataaagtatcgtcccacgaggcttgattttagttctatttgatgaatagaaattattggataaatagtaaataaaataaacaataattagaaaaaatttaaaaaaaataacaatgataaaaacaaggattattatgatccccaactatcctttattttacttcataatgtaattatttgaatcctcttcttcctattcaattaataagttgagttaagaagtttataatctagttaagatttataaactcaatctatgtgaaaacttcctatatttttatagtaagtttaatcacaaacatagcattaagcatagcaactaataaaatcatactaacgacctaggtactttcttcctaaattaatttgcatccatatcaataagagcatattaaaatctcatcttttagaattttaatttgaattcataaataataattaaagttgattagtcaataattgcaaaattaaaatagattgtacgaaattgaataaagagaggaagaagaaattgaacaatcatattaatctataaaataaattcaagtggttcacataataatctttaaaagaaattagctactaaaagatattttaaaacaataaaaattcaattaaaaacataaaagatagagatataggagaaagaacattgtttggagtcctccgctagtgccttttgctccttgccctccttctacaatcagaatttctctcaatttttgaaaggtatcaaagatttgcctcagccctctttaaatagagcaaaaaatttgagttcccaaaaaaaaaaaataccaaggtcgcaaccttacaagcgatttcctcttttctttgctcatttttgcagtttcccgttttcagtttcgtattgcgatgaccgatagtattttggccataactctctcgatataacttagaattggactattaaagatgttttggaaagatgaaagagagatctttatgcagaaagtttttcaagaagtgaatgaatcatagtcaaaaatttacttgaaacttcagagtttatttttagtcacaaacagagcgtgttgaacatctaaaacttagattttttcaatttatttttaaaaaatgatcactcttgactctagaccacaaaatttggagctaaaaatgcaatcttttgaccaaattaaggcaataagaaattcaactaagcattattggagtttttttttctcttataatttcctatttttgtctcaagaaggcttgaaaaacaccaaaattatcaaaaacggagatctccaaacatttctcctaaaaaataataaaaatcaaaacaaagcataattctgcacaataaaataattaaaatactaaaacataccctaaattagactataaaaatgcataaaaataacccttacactatggcagacccctcacactatagaagtatgattggagcacttcaatatctcagtcacacaagaccagatatttcttttgcagtcaacaaacttagtcaacttctgaaatgtcccacgacagtgcactagaatgcaaccaagagcgtattgagatatctcaaagaaactgtaaggcatggacttcatttctctcatagtaacagattgtctctaactagttttttagatgttgattcggatttttgaccagatgatcaatgatctgtagcctgttattgtgtgtttttgggagattcgctcatttcatggtcttcaaaaaagcatatagttgttgcaaggtcaagtactgaatctaagtacagggccttagcataactagctgctaaaattgcctggctacaagaactgcacaaagaaataaagtttaagctccctggtgtacctgtaatgtggtgtgacaacatgagtgctagtgcactaacttccaacccagtgtatcacgcaagaaccaaacacattgcgctagatgtgcacttcgtaagtgacatggtgttgcttaaacaacttgacatcagatatgtcccttctcacgatcaagtgtctaactaaagagctcacacactcacatttccagttcttactcgacaagcttagtgtgatgaaatcaccctctctctgaggggtggtgtaatagagtaaatacaggggtattttaggcaatagagtgtgtgtccaagttcgttggaatgtatgcaatcccgaggcaatcgtaccacctgtaattatctttattgttagtttcattttcaggaatatactttctgttatgatgtatacgtgtaaggtcatgattgaaatgtaattaccttttgggtgtcatgtttagctataaatgaaaagttctagcatcaacatcatttgagctgatcaatttcattttcaaatttctttagaaacttcactagttaaccatgtttttatttgtaaaattatttgatagtaatttaccatacatgcaacttggaggaattatacctccaagcataaaaaggcttagtaaaccatagagaatttagatgtccatctcacattaacgtgctttgagacttatgagtaaaaataatagtcttagaataattttcattctctatggtatgctttagaaattttttgttattgataaatatgtcaacagaacaaagtatgacatacttaaattgaatttcttcatatgcaaatatttgacaggtagttatttttaaggtggcaacgaatgaatattggaaatctttctcatcttactattctgtaagatctttattttgttgaaaagaatgctcttaatagtgattagtctttcttagtgttatatgtatctcaactacacactattgttgaaaaaaaataaaatggataagtttttgatcatcgtaattggtcttctcttttatttgttttgtttttaacatgattaatgctgatatttttctcttagattgtttaggatttgggatttaggattaaatggttgtattgacgtgataagttcaaactttaatttgcttagtttttaagaatgagtgtgttttatgactaatgttgtatgacctgaaccaatacataccaagagaaatcacgtgtgaaatggtatcttgagaaaagatgacatcagagcaaatttttcttgaaatggggcagccccaacttttctggtgcatatctttaccaacatggttttatctttgggtatctatgctcaagatactccagcatttccatttcaaagtgaaggatccttaaagcatatgcaaccccacttgcgagtggcctttcaaaagtcttaaactgtctaaacatgttatatagtcaaattgtatgtctaacatttgtattcatgtgttgaaattgtttttcttaatggatgtgtacaaattgttgtagcatttattcttcatcatttcatttccaagaaattaaaaaaaaaatgttgtagttttatttatttaaatttataattaatcttgtattttcactaatacaatatatataatattaggatatgtttatggtaagtacattggttttgttcctatagtaggaatattttttttttttgaaggaaatggtaagaatgtttttacaaccatagatataataaatatgtttatggtaggtacattggttttgttcttattgtaggaatatttttacaaccatagataatgaatctaatggtgataaattaataagtgcatagacaataattaatatttaggatgtattacttttgtgaatttattttttaataatattttatcattaaataataatttattaaattaatgaattcatattttcttaccacacaatttttttgttttgtttctttttttttttt

SEQ ID NO: 27398 - DNA, 2580 bp, Cannabis sativa
ttaattagaatagatatatcattgtataaaagttagtagagatttttgtttcttcatctttaatatctattaaattataatttttaaacttttaaagtcgttaaaaatttctcatcaactactgagattattaaatttcaagaattttgtccaattttagtaaagaaagtctaacgtgaatgaaaatttaagagacgtgatttggtacatgtcaaagttccgagagaatatgattgaattagtaaaattaaataaaattgaataaaaattcttaaatccaacaatctcaatagttcaaaaaactattaacaccaaaaaaaaaaaaattagaaaaacataatttaatataagtgtcaaaaattctagttaggcttctataaaataaggtacttttgattaaatttacgtggcctggttttgatagtttccctataatataaggttgtaatatgtaggcggtcgctttcagtttgggtgctatatagtatatagtataatatattaatcaccgcaataataggtttttgcatgtgaaggagtcggtggttttccttatagcttttctagttacacacatcttattataattattatttgaatacatttaaataattgtagtaaaatatatgtattatgtattctcatttagtcctcataaaatatgatttttgttattaatatttttagttgtagacattttttgtgacaacattaaaataagattttaccagaataaaacttgtgactaaaaataagattttgccacgatgcatggtcccccccaccaacgggccaattctctttgaatacagatgcgtcagtgaaatctagtagggacttctgtggggttggaggtgttatacgagatggtgaaggggtggtttgggcgtgctgggcagtggggatgactagaaagtttggtgtgaatgtgtcggagttgcttgcggttaggttggggttgcatattgctcgataatttggcttttctatctctaatattgaaagtgatttgatagttgttgtagactagattaatagcttcaattccaataacgtatatcaaccaattattttttatgttatttttttgttactatctgttggtggtggttcttgtaaggttatttcacgttctgcaaattgtgttacctatgtactggctacttctgttaataattttttaggagattatatttaaataaatgcttgttcacgctttattagttctcctataacagttaatttatttattaaatgaattatataatttcttttaaaaataaataaataaataaataaataagaggcgctttacggtacacctttaaatctctttgtgtttttgaatatcataattattaaagatattcactaaaattttagaattttaaataatttataatttataaaacaaaatttaaataatttatttcacataataaaagaaatagacatgcaacattttgaatattgttttccccactttaaatttaatttttttaaaaatttacaataagtcaacattttttaatccatgtatttttataatgtcaagtcataaacatagctaggttgcctagctcaaccttctggaatcaaaaataactagctagaggagcaacccctgaatctttataatgtatttatatttaaaagaccgtttggtccttctattttggcaaattgaaaccctttaaacaagaaggcttggaagggtagaatagtacattttgggtaagattcgagaagaagtcaaattttattatattattagttttatagttgaatttcaggtgttgccatataacaaacttaaaaacatatggttatattttgggtaaactaaaaatatggtattttctaaaattgtaataaacctttcctcataatttaatgtttgtgcaaatagacccttaattaaaatatggtaagacaagctattaactttttgagtgaaggttttactttgatctaacctaaaaaagattactcttaaaaaaatggtaagaagtaaaaaggttactcaaaagttcactgatggtttggttcttgagacgaattgtttagtgactgttcattaaagttatttaataaacatctttttatttagttgttaatgattgtagaactctttttcgttgtatgaccgtagtctttttattatttgtttgtccttttattaacaaagtgacttatacttataattttgttagagtttcatgttcttcatgctataagtttttgtctattatattaggtgatttatcttcataataaagttctatttacattctaaaaatgacatttcccttgtttctcaagaaaaaataataatgcttctttacaaattgaatttgatcatgagatcccattttgtaatttttgaaacttaaggtatatgattttttagaaaaaattcattaaaataaaataaaatcatatgttataaataaatatacattctacataaaatatgaaaagttatctaattaaacaaattatttttctattcaaagcatgcgcaactaattaatgacttttaaaaatttgcataacttgcaaacttttatgatctaaaat

SEQ ID NO: 27399 - DNA, 1201 bp, Cannabis sativa
ggtaaaataatttccaacatagatctagttcatcctcttcgcgaatcacccctagtactggttgagaagatgttttgacttctgttatatttccttcttggagcataaggaccgtcttggttgaaatgttatagcagcttcttacactcttttggtttcctctaatcgttccaacacttttggtgtaacgccctaagaatgaagcacgctacgacaaccaataatataacctaatcccactaaactgggattactagaaaataagagcatgaacatttaaactttgattaacttacgtaattaaatataacttgtaataatttgaactttacaaatcattccataatattaaacatgtttcgagatctcataaaaattttcacaaaatattacaagttactcttacatgccaacctagacggcaaaatccaagaatacaaaatgcagcagctggtagaccttacccgattcatctacaatttcctgaacatgtacgatccatcgccaatcctcgcactcatggctgattacagacagatttatcctttcctgcacagtagagcacccatgagccaagcccagcaagacagtataaatatcgatatacataataaacaaatgtcacataattattgatgccactgcaattattgtgacatagatttgcatgttacgctcacacgcctatttatttctatgtagcatacacccatgtgttacgctcacacgtctatttacaataaggccttagaatggtttatctcagttctaattatcgagtctaacctaattatgcctggaacacatttcaacattataagcatagcattatatacaaaactttttaatcactagggtaataaccctagactatgtaaccgctaactttagggtaataaccctaatcacggttcctcattaaatcacaattataatatcaaacatgattgccaccgcgcttaacactacgtgctaactactgtattacttggtgtcccaagtatgtaaagattccaaatccacgggtgctgaacaagtgacagtaatcctagtcacaattctcgagatttcatatatagggttaatccccaaaattcactttcacataatcatataattggcatttcaatacacattaacatgtagagctcagaacgagctttccaacgatatacagaatgttatagtgagatttttctca

SEQ ID NO: 27400 - DNA, 1381 bp, Cannabis sativa
ttgtgtaacaagttattttacaaagtgatatttaaaatttaaattgatttttaagatctcatatcatttaactaagagaacaaaattgtaatttttaaaattggataaacgagtaaaagttatacacattttagtttgaaataatgtaaaattcgctactgtaagccattagaaattttgtttggatctcaaaattctagttataaccaatccagaattccgaatcacggcagaatgctacacatacaagctcacttaattatgagttgtacagtgtcttaattatatttacacctacaacggtcaaaaggatggtaagtccaaatgcatgatggctcatttgaattagcccacaaaagtaagttgggtagcccactactaacaagtctaacttcacaatggtcatgtacgcaacccatgtgccataccactctaagacaattataactaatcccacttttcttgatcgtggattgatatccttgaaaaagtgggtgtttagcccacaacgataggataacatttttgaatcatagagtgaaataacgattctacttttttactgaactacgatagaatttgatcccttttgtaaaggtatttaggaaatttaagaggagatcccaaactatttacatagactacaccctaaactcaagctcaatcccaaacttctcactcactcactgctcaaaccgccatctattgtctctagccaacgcaaaaaagttctatacgactgttggcggtccgtttgatgagtgcatttgtatactcattcctagtcaattattagttaaattagtatttatttcttaaattttgtataaatttaatgtgttttctatagtgcgcagtcttatacataaagtgatgaaattatgacatattagaagtgaaccgtacataattgagcgaagtgccaaaatcaaggagcaactgaatcgagaaacaagataaagtgcaaaaaagttagtgcttggtgctatagcgcaaggtgtaggtgctatagcgcaggtctgggaaaaaaatattgcaataaaaaaaagataattttagcacgtggttattttgagatatttctcttactctatagctcagcacctatcttttttaaaaaaaaaaaataaatcataattctaaggaagttcatctatctttgttggcctatataaagaagaatgtaaatcggatggagggacgactggagagataaaaacaagcaactttgagattaaaaaatacattgaagagcgagagagaagacattcaaagcaatcatcatcaactttcatcaatagagtttttttcttcttcttatatatccttttgtttagttatttaattatgaacatgattattgtagttattatgtttgtga

SEQ ID NO: 27401 - DNA, 5160 bp, Cannabis sativa
tagcattagggcgttacatgtacctaccagcctttctagcttctttgtacaactttccttgtaaaggtcaggcttccttgattgaacaagcctttttggtctgatggacactctttagtcggctagcttatgctcaaaccctggccaacctacaagcttcctctagctgacctacacactccccttggctagccagacatagttggtcaaggccttcgcattttgcttaactccttttgcttattgcttgacagttttgcttgatttctttagaacccatgccagttgatatgttgtgtaaggaaactttatcctattattgacaagttgtattccacatgctcagccttgactatatggatatgccacgtcaggttgataaaattttggataatatttgccccaaagtccctattcatacgatgtacggatagggacattttagcttttgtcttgactgtaggagccttttctgaacatccttgtttggccaagtatcaagctttttgaatgatgttatttttaaaactttgatcttctctctccatttttgccgcatcttctcttctttgacatctctttctttctttgaatctgctattgatatgtttcaagctttttatagctttagaaattttttttattctcatgctttgaagtagtcttttcacattataagctgtttgatagctttaggatgcataatgtttgactttttgatgaacaagatcgtgtcttggactaataccttgttagagaccccattcgactcttaaaacctttttgagaactctatccaagacctagatcctatataggaactctttccatggcctagattctgtataggaactctgtccatgacttagatcctgtataagaactctgtccatgacttagatcctgtatagaaactctgtccatgacttagatcttttataggaactctatccatgacttagatcttatataaactctatccatgacttagatcctatatagaaactctctatattacatagaaccttcacatgaactctatccatgacttaaaaccttcatataaactttatcgaggacgtagaaccttcataggaactctatctagtacttagatccattgtatgcccctgtttggtacttagcccccttttaggagctctatatggtacgtctcgggcaaaatcttccctgactggtcaatggcctttcataggctatctggttcatgattcttaattttatactttgccaattacagctttgtatttcaaggctatctagctaatacccttaggtttggccagttaacttgtcttttgtctaagtctttttatgttcttagttgttcacccttctccctttttgaaggataaacctgcatgatttctggggaggtgacaactagattgacaaagacttatctgtctggacaactagtccttgtgatacaactttgaacttgtcaactccagttattgaagacatctgaggactttgttgtttttatccttttattttgcatacttcatcttttgtccttgtatgacctttaggcccttcactttcaaacatatgatatttttattcttgtatggccttagggccctttacttttgaataatgttcgtgtatggccttttattttcaaataagtgaccgtccatgtgctctttaatcatgactttaacttattttttctagacatgcagctatctaggcagcttatgtctaaactgaagtatgccattcacttacttagctttcaattttttttgtaccaaagctttaaattttgcctaagtttagctgttcttgttcgatgttgtatggtgagggttccccccaagtgatcaagcagacttatggtctcttggtcacttgcaattcaccaagtattatagagctttgcctgtgtattttcttggagggacctatttgtacgcatgtggaactaataataaagattaactttaagaagttatcttgttagcaagctgtctgacacaatattaaaccgaaacaccatttttattcattaattgatcttaaatatgtgttgttgctgttcgacgtacattttttgtgtaacaaaagcttacaaattagagtctacttttgaaaccacattttggctacccctacgcagcatgccttggaagggtcatcacgaaagagtgatggtcatatagctctttaatttttggctacctctgcatgacatacagtgcaaaggccatcactgaagagtgatggaaacatagctcttttctaaattcctacacagtgaagagttacaggaacaactactgaagagtagtgttctgtacaagtgggatactggtagtacttgccaagatgtttttcattccactatcttggtagaagaactaactccatgttcttattatactcgccaagcttgtatgcaccttttcttattatcttgtaacttggtgcagaccctttcagtttgttccaaacatacttactgcaggatctttggtattaaggattattcttcaaagtactaagtctcctatgaagaattttctcaccttgacttgtttgttgaagtaactggcaaccttctactaataggcatgcaacttgaggttggcttggtctcttcctctttcttcaattttgtcaagagattttgctagcaaggtgaggtttacttcatggtccaaatagaccaaaagtgccttgagtatctttttgacaaagactaacttagttggctttgccctcggcatgattgtcgtagagtcttcatgcactcttgtcaatagttgttcaacttctttcttggtaacacatcttagaggtggcactgagataccacgtctatacataaccttgtccaggattagatcccggtagctttcctccttatttttcttgcttcattcttgttttctagtaagatttttgtttggaggtatgctactttgggtgtcatccatgttggattgttatccagcatgttatttcttctgaaatagtgatgccagattcttttaagaactgtacacgtaccaattttaggacttgccttttagtgtagcctttgagctaactttataagtcttgaatttggctcaaatagggtaacacctttttgcgttgggcagtatattcacctaggacataattaacgactattcaagagtcgttgtgtgtgtctaggtgatcagctcgcactctgtgtgctagcctgaggccaacaattagtgcttcatattaagcctcaatgttggatgctttgaaactgatctttgttgccctgtgcaactgttgcccccatgtaacgagggcaatgcctacaccagacaagttgtcattaaaactttcgggatgaatttttacgctcttgcttccgctcttgctcttgcttcttctctggctctttcttttctcccaaatcttaagacatttcaagagatatgcctgtacattcagccataaattccacaagagattagcctttttatggccatttttggttgaaaagtgaccttatattggctgagcttgatggcccacttgagtggttagccaggtgcttcaagtttcggcaacacctgtcgcaatagttggttggtgtacattgttttgggagtttatgtaagagagtgaagcatgtctacttcttctacttctccttttgattttatggcataaggaaattattgaattttcccttttcgccattattttggccaaggccattattttgtgtttacctctattatttttcttgttggagggctgacagatactgcctgtgctggttagcatgttggacagtacttggggtagtatgacgcccttggtttgttcaacattggcttgtcggacaacttcttccaactttatgaaaccattagctccctcgaggaactctttcatgttgtttgttgagatccttctaatattttttcagaattcactcaataatgcctccaagtatggccgtatatcagtctttttctgtcagccctttcaccttggtggccaaggtcatgaacctttgaatgtagtacttcaaaggctaacattatctttgctttattttgacaagatcctctaattgtgaaagtatttgtcttgaggcagagaattgagtatagaattcttgagagaaatttttccaagaattaaatcttcttggggccatcttaaaataccactattgggctgtttgagataggcttcctagaaaaatccaacatcgcacatctccagttactttttagagatctatttggatctcaaagtattttgtgtgtgcaatgggatcttctttccccgtgtacatcttcttagttgacattttgaacttgggtaggggcaatgcattaatgtatgcagagaatggtgacaaccttgacttatcatgttctaggcctgacagctttgggctagataggcatttgatcatgtcttccaattggatcaattgtgcttgtacatatatgtctattctagtgggctcttgcccaggcagccttttctggctcgatgattaaggctcaaatttatacattttaattccttatttatgcacatataataaatataaattaaatattctttatttttaacactaaaatttatttaagtaaaaatatctaatttactttaatttttgtgtaatttttcaaatttaggcaaagtggtcgaaagaaaaatacaaaagtccaatttagaaaagcccaataaaaaataaaaaatccttctcttttctttttctctttctctttctttcttttcaagcaacatcagctgactagcacgcactcccatgaacctttcagccgttagctcagccgccagtcgccaggtgtcacctcaaccaccagttgtgtaaagaccgcttagattagttttggaaattaacaaataattagggtttaattatgaaattagaatatttgttatgaattatcattatttggagatttatttgaattcagaatgtattatatatgtcatatatggaattttatatttttttgcatgttttgtgcccggcaacatcggaacgtggcgtttgtgttggcctttgtgccctaaataaaactctatttcaatgtaatctttttcatttaattatcaataaagagacagaagtattttatcacttatttagtg

SEQ ID NO: 27402 - DNA, 1108 bp, Cannabis sativa
gagtgctgtataaatagggccaaaattctaaaagcatattgatggtataggtctaattttcaaattcagtaataataatagggctatttgagaaactacaataatatatgtaatggagggccataatgtcagatactttacaattggacaggccatcatattatattcattgggccccatgactgacccactcataatcaccgccgttgattactattttctcaacaaccgatttattattatttttcttcaatttttaaatcttatgttggtcttatttctttttctcttcacatattaaaatcagaaaatcaattttcatagtttcttttattatctaatctttgtactaacaacacgtttgaaggtttatgaagtaacatcatttgagccaaaacttatggcaagtgaaaataagtattatatatctataattttgtgcttgacctttggagtaactcactgcacaattgactcgtttattaaaacatatatatatagatattttctttctttctgcatggtattaatttaattgcatatatttcatttttacaaatgaatgcaacttgtaaaatgtaggtccatacctatttgtttttaaggaagaaaaaataaaagaaaaaaatttaattaataaaaaaggacttttatagaattttattatcatcctggcttatttgtaattcatagttttggaactcttccaaggtttttcttgtcaattaagtcataattttgggagagaaaaaataataataaaataagtcacactaattgtattatttaatttctcccaatcattgagggtagtagcaaaaaaagaaaggataaggtgaaagttaagagtttaaacctcagataaaaagtaaagttcaagataaagcaaattagtatagtagagtataggttcatgatattttaatttaaaataaaagtatataagataagtatcaaatttaacaaactatttgaggtgtgttagacactaaatgatgaatatctctaaattatgttggattaaaaatcctaagtgggcacatatgtataatgtatatgctattataaagtgtgatacaaaattaagtgaccaattatgttatgggta

SEQ ID NO: 27403 - DNA, 1396 bp, Cannabis sativa
  modified_base (53)..(58): a, c, t, g, unknown or other
tgtaaaaattgtataattcacataaaatacaaataatactcctagagtttaannnnnnctccagaattgagaaattataactcgaaagcccactactaataacgagatccacaaatagtttaaatccacaaatactacaaaaatattaataattagtgctaattgcctctactaatttatattataaatgcagtcattacataagcagtgacagaatcgttaccttggcgtaaatcattgagggattcattgagctcaaagagacgaggtccgttgccttggctggaacgattagtgagtttagtccacatattcgcggcaatgtcgagtaacatgatactgctcttgatgtcgagagaaacgcagtggatgatccaagacatcaccatttgattacaacaaatccaagaatgaaacataggacttgtaggcactggttgcagaagagtaccatcaatgaatccagttttgttcttggcgccaagagcaggattgaaatccctacgccattgctgaaaatttttgtcgaaaagtggaggagtgataactatgaggccgagatgatcacttgagcctacgtagtagagattgtcgtcattgggagaaggagtcagatgaggagcctcgtggatctaaggagcattgacagtaaatgctcgattgatctgttcattgatgtggtcatgatcgctaagggaagagccattagtagtggcgacgagcggagctccgagtggaggttgaaaagatgaagctccaaccggatctgtatgaaaaagatgtggaggattcaagacgtgatttctcagaggaggatcttgaagaactgggctagccacgggatcagtggctcaggtcgaatcttgaacggcggagaggaccacaggaacagtggttccgtccatcgatggagaagagacaagagcaagaaggtcagggatggagctcgagccaactaccatggaaggatcagaggttgatcctgagccgagagtgccgtgagaaccggtagtgggagcttggggaggaagaccactacgagtgcgcgccatgttcgctgacgaagaaggcgacgacgatccgagaaaggcagaaggaatgagtagatccagaaaaatggatctgttctagtcttagtcgtctgataccatcttaggaaagagggagaaaagtcttttatttaagaaagagaattgtatatttgatattacattgactggtcagctctataaatgatatatatatggtataagttgaacccttatacccgaatatgtgtaaacccaagcaagaataaacccatagccaaacaaacaaaatgagttctaagaaaaacttaattggtgtaattaagttttagttggtagaatttagttgagagagtgtgagagatgaa

SEQ ID NO: 27404 - DNA, 2311 bp, Cannabis sativa
acatattatctattaaaaaaacaatttttaataaaaaatatacaatttaattaaattcttttattgtccgaaaaataaacaaataaatagaatcacacattttaattataagtaaaaataaattaattaattattagtttttaaaaaaataacaaaaaaaaaagtaaatgagatgactcatttaattattattattaaaaactaaatgagggcatagttgtaactatttttcaaacataatttaaaaaattacacatttcactcaattaagaagtgagtgtaaaagagagtacaaaagagagtttgactagtacttaattgagtgtaaaagagagtacaaaatagagtttgactagtactcctcttaagaaataaaaggagttaaacggccacaagtacatgtgagggatttatgttggtaattgggaaataataattgcagtttagtgaagttgacaatgtttgcataaggtaattttgaacccacaaactcttgtcggcttgaagtactataccctttatcttcttctctttgtttttttgttgcccaaaagaaaatatgttgtcttttatccttgctttattagcttaatcaattttatgcttttattgctttagagtaggccatatataataactatataaactcaaagggtatataaataattagagtattattatgcattttaaagtgcattataagagttcacttcttagttaacgtaccatttttaatattaactatcaaattaaaatatattagacctatattaaatatatacccaatgataatagtacatttagttattattgtgatattgtgccttttagcatctctcaaataattatgattcattgctttttcatcgttgcacttctagagacaattcaaacttcggattcccacgtcctattatatgtatatttaattattgcatacaagtgttttattcctttggccaattccctatatacacatctatactatatagtaacaaaaattccaaaaaataaataaaaattctaattatttgttttctacttttaatagtgaagttttggcaatgattaaatgttgtatttgaaataattaaatttattatatataaaaaatagatgccatttaaattcatatgtactttttaccaattaattagtctaaactccacttgactaattatctaaaaatctttttatatataagagtaaattgtattaaaaaaaataatacgtaccacatataaaggcaaggcaacccggccacttgatatagcgcctgacttattatattaattaaattattatatatctagaccttattataaacacatacatatattattaaaatttatatgatatcatatagtcatgacaacgacttgaaatacaatggagctttcgaagtcatcgtggctttttaattggccattttcttagcatatttgagctgtgagactcccctcctagctaaaagagagtctatccagaggtgggtttcttgttccattaataataataataattaaagccatacatcatcaatggacataaccctcttcgctaatatgagtcctaaacaacaaactactagtcatcatgatcatcaatactatttcaattcaaacacctacaccaacaccaccaacgacaagcaccatgatcatcatcaacaacacatcatcatcaccaccaacaatgatcagaccctcttgctagacgatattatgcaaaccaccaaccatcttcccccgctaccagcctccacaagcctttctccggactcggctttgggggtggccgccgcggagccatggccttccgcctcaacagggaaatgggctccaaggcttctcaaggagtgtgctaaagcgatctcagataaggattctactaaaatccacaaccttctttggatgcttaacgagttggcatccccttacggcgattgtgatcagaaattggggtcttacttcttgcaagccctcttctgcaaggccacggattccggcctccgctgctacaagacactgacgtcagtggccgacaagacacgttcttttgactgtgctagaaggttaattctcaagttccaggaggtgagtccgtggaccaccttcggacacgtggcgtccaatggagcaatcttagaggccttagacggagaaccaaagcttcacataatcgacataagcaacacgctttgcactcaatggcctaccctcctcgaagccttggccacccgaaatgacgagacgccgaagctgaagctaaccgtcgtggtcaccgcagccgcctcggcagccactggcgg

SEQ ID NO: 27405 - DNA, 2716 bp, Cannabis sativa
ttttagtttgtttaaattatttaagatatgtatttgtaaataaaataaagtttgaaaatattttttgtaggaataatttaggtttttaaagtaaacataatattttttttattaggttttattaatttttttcaaaattaataaaaaaattataatttttacatttaacttttttaaaataaaaagagataaaatttattattagttaaagtttaggaataaaaatgtgaattattctttacaattatatcacaaacaacacaatatctttttcaaaataatcaaaacattagaatacatggtcatttgcaaacaatacattttgattcatcaaaaacacatatcaccaaaaacaatattttacaattatatccctcaaatttaaaagttaaattgcaaaacaaataaacccattaaaatattatttctcttagcaatcaataggtactatccagatgcaaaacttgcatttctaagtaaaaaagttatgtgctatagtaaaattctatttgtctcatttgacgtgtgtaaaacctcagagtgatgtgaggttttttacataacacccctatttagtaaaaaagaaaagaaatgtcgtgtctcagtataattaaaataaatgagaaaaatacagtatgagattgtaaattttttttttttttatataaaatggattagaaatttttactttttatttaatttgtggtaaattattaaaaaaaatataaaaaataaataaataagtttggagcatttgtagaccgctataactaactaactcgatcacatttataatatatatatatatatatatatgaataatgattttttttttcatgtattttttttttccattcttctccaagtttgaaattttaaaaattgcatattttgaaatagaaataatacttaaccatgttatgcaagagatccatgaaaagtttgcccctctaaaatcaaggttttttatatgccattattgttaaacattgttaatagtatcgttttcaacttttggtcttcaaaattaagtttataatatcgttaaatgtcgttgaacatcgtttaatctctaaaatcaaattttcataaaactatcgttattataacattattatgcatatatttctcacctctacatcaatctttttatttatggagcaatctttaagcaagtttgatgtatttttttttttctttttctatattttgatgatttttaagatgcaagcgttttaaaatgtatagaatcttaaatttgaagatatgtccgtttgagacttattttaagtgaatttaaccctaaccatgtataataaaaaatatatttttttttttcataaatataaagataaaaaaaaaaaaaaagttacaataatacaaatttataattttgtcaatttttttatgaatttgaagttttttagatggttagtatgtctgtctcttaaactttttacactatctaattgtgtattatagtatatgacctataaataatactccttgaaatataactttcagagtaatgtaattcttccatcacattttaaccctaaccatgtataataaaatatatatggtaagaaatattaaaaaaaaaaagagtaatttgcggcataaatacttaagttttatgccaagtagcagataaatacctaagtcgtatttttggcggtaaaaatacattctgtcactagtgtagaacttccgtaggtacctctctgttttctgccatataatgtgccagatggcgtgccatatcattaaaatatattccacatcactctcaccattattaataactcattgtatatgtcaaatagatatacatatggcaatatttaattggcccatgtcttttttctttttttctttttttgaaaaagatggcccatgtcatttaagcaacatagtaaaataaaattaaacataataaaataaaattaaacctaatttaataaacatactaatattcattgaacttcataaactattgcctaaacccaagaaatgtcgtacccatgccaatctgttaacatcatcatcaatcatcttcccccaatatttttctccactctcttcccccatgccaatctgttaacatcatcatctatcatctgtgaacatggaccaacatcaaacacaatccaaaactccatcactcatccatttccattacaacaaaatcagactaacaagaacaacaataagaaaacccagaaaaaaatgaaaaaattcttgaaaaaaagctgattaatggtgaaaaaagaaaactataaaaaaaattatcaagtaaaaaatccagaactggtcttatccgccgaatgacgatgttgctcagatctccgccaagacggaggtactctgtccgactttaagtagagagaaacagagagagggacaccgtggggagagagaaagagcgagggagattcagatctaggggcctttaagagtagggagcatcgtggtgaaggccattttcgccacaggcgactggagtttctccattcggctctgagcaaagagaaatcgagaaagagagtaaagaagtcgagggagaaccaacattggggttttcacaagcttgcgatcctggcggtgtgctcctcgtccgtctagaagctccacgcagcctcgaccgatgggttcccgtggtcggagaagaaggtccgttacattccccctatccgtctctatgctgcagttcata

SEQ ID NO: 27406 - DNA, 3298 bp, Cannabis sativa
cttagcaattggaatcacaaaaaatatttcaatttcaaaaagcacattagtaagattgagaaagatctagaaagggcccgctcaactcctttttgggatgatcgaactatagcaaatatcaaagacctctaatccaaacttgaggctcttttgtacaaggaggaaacttactggaaacagcgcgttaggactcaatggctggctcagggggacaagaacacaaaattttttcaccgatacgcctctcatcggaaaaagatcaacaaaattcataaactccattcgccaaatggtggcattatctctgatgaggtgggtatcactcgggagattgaatctcattttgaccaacttttctcttcctcgcaccccgctgaagaggatatgcaaagagcactgaaaggcatttcgtgttctttatccgacttggataaagctcttctgactgaagagtttgcccctgacgaaattgaaaaagcatttttttcaacttcccctggacaaagcccctggcccggacggattcaactctaacttctacaaggcaacctggtcaactgtcaggaatgacgtcctttacgcagcctcaagttttctcaatggcaacggcgatgtggctcccctgaacaccactctcatcacgctcattcctaaagtcaagcaacccacatctatttctgagtaccgacctattagcctttgcaacatagtttataaaattatctcgaagataatcgctaataggctcaaactcgtcctcaacagcttgatctcgcgcaatcagagcgcgtttctccctggtaggctcatatcggacaacatcattattgcccaggaggtagcgcactccatcaaggttaagtccagagggaaatcaggatggatggtggttaaactcgatatggccaaagcctttgacagagtggagtggccatttatagtggccatactccgaaaattccaatttcccccctgtttcattcgattgatctttgcctgtatctccacagccacgtttcaatttaatcttaatggcaaagtcgttggtaatgtcattccttctagaggtatttgccagggtgaccccctttccccttacctctttctattgtgtgcggaaggattctcctccctcctgcaccagcaagaaagaaataaaactcttgtgggttttaaagttgctagacgggcccccgcaatctctcatctcctgtttgcggatgacagttttcttttctgtcaagcttctatcagctcttgtaacaccatcaaagatgtcctggaagtgtatgagagggccaccggtcagaaggtgaatttccaaaagtcctcactctacttctccccagatgtcgagctcagagatcaaactttaatttcagattttttgcgaatcccggtccgttcctcctttgaaaaatacttgggactcccccatcacattgggcgaacgaaaaagcaattgttccattatcttcatgacaaggtctagggccaccttcacaactggaagaataaagtattttcaaaaggaggcaaagaaacccttctcaaatccgtcattcaggccatcccaacgtattctatggcttgttttcgcctccctgtagccacatgccattctcttgagtccattatggccaacttttggtggggtgtcaacgaaaataaccgccccaagactcacttgcaaagctggaaaaagctttgcaaatccaaaagggatggcgggttaggatttcgttctctggtacactttaatcaagctttgcttgcaaagcaagcctggcgcatctgaaaacaaccaaactcaacagtgttgaaaattttgtccgctaggtattaccctcattcatcttttctcgatagctctctaggacactctccatccttcgtttggcgtagcatttgctggggaaaagagctgctgcacaaaggaattatatcaaaaataggtaatgggcagaacacatccacaacccgcgatcattggataccgggcatccgtcaggttacccccatttcccccgtccctgacaaagttgaatcgttcatcactaattctatgacttgggatataaccaccttaaacagatgctacccgcctcatgtggttgagcaaattcttgctattcccctccctctttccccttctcctgatgatcagatttgggaattttcaaaatctggagcgtactcagtcagatctggttatcatcttagcctttcctctacttccccccagatattccctcttcttcctccctctcaccttggtggaaaaacctttggcatcttaatcttcctgccaaggtgaaacactttgcttttcgagccacaaactcaaccctccccaccgcaaaaaacctagcctatagaaaaatcattcactccccgggttgtgaccgctgtggaaatttagaagaatcggtgtctcacgctttgttctactgtcagagcattagaagagtttggaaaggtacacaattttatccttacatttttccttcctcttctgagattatgtttcatgatatagctgatatgatatacacctctctaactaaaaaagaagtagaattgtttctttgcactgcttggttcatttggtttaacaggaacaaagcgctaaaaggtcaagctcaagatcaggctcatgcaattctcaacctggcgcattcctacctggctgagtttaattcttctctgtcggcttcagcacccacctccagaccacaacattctatagccaccacaacttggtctcctccggcctcaggtcttctcaagctcaatgtggacgcagcagtttctaagatagacggaaaagcgggttttggcggtgttatcagaaatagtgaaggtttggtagttgcagccctggcccagccttacatcgggggaggagccgtcggtactcttgaagctaaatccctcctctctatgctcgttggtgcatcgacgaacatttcctggtccaagaggtagaaacggactgcaaagccattaccgacacactgtcccataataaggaagattttacagtttttggagaccttatttgtcaaattaaggaagctttatctctcatccctaacgcccgactctctcatgtcactcgcggtgccaactactttgctgataaattggcacatcgagctttggggttagatgaagttgcaatctggataggcgatgacccctgtgaccttattgagtttctttctctttagcgggctccctttctctctaaaaaaaaaatatatattaaactattttaattgtatatgtttattaa

SEQ ID NO: 27407 - DNA, 4118 bp, Cannabis sativa
cacaagatcttattttgagttttacacattttaatttaattaataaataataaaatgattcgctaactaattactggcaaaaatttcaataatgacaacaaaacttgactgctttaacttctaaaaacgaattaaaacaaagttgtagtgatctctctgtagcgtaattattgcgtacgtacgtacggtatatctattatatatgtatcaatatgtatgcatacatataatatgatcagtactagctactagttatcgtaactaattaataacgtacgttgcatgtatttaaaaccttatttttaatttttgaacgatatatgtgtacagcaaataatttaggggaaaacagcagtagtcggcagctatatatatatattgccaaattaaaggataattaattaaatataatattaaattaggaaggcgttaaggatgatatatatatgagatggtgatggatcggggaagaaattattaggaggccatcttttaattattcgatttgtattgtggtcctcagatcaaaaggattttactccaacttgatacaataaataaaatcctcagatgctcattagtctctctcagatagtgttatacatatcaaactttcaagagttttggtcataattttggtcataatatacaatcgctttatatatcgctttatatatatatatatatgtatgtatatataatatatatctgtgtatatgtatgtgtgctacaccatccggtcggactaaaacccacaaaaaacaagtttttaaacttttataaatatccctcctgataatcatgataagttgcatcaacattaattattgctatatgtatactcggaaatatatataattaaataaactatatatatatatatatatatattattgtatacataattttcatttgctaccgtctatatttcttcaatttcagttactatatgtttaaatcatattctagtttcaaattacttaaagggaagaagaagtgttttgtttgtcatattaattataattatataataattgggtataatatttgatctctcctttatttttaataatgaatatcttacgcctactttaggaaattcttttcaggattcatttcattatgatagagtacatttttcagattaaaatactgttacaccaattatgtttccattttattagaaccaaaaagttcattatatcgtttttttcagaacactttatatgtatttatgtttgtatatatctcacgctccatatgttttagtatgcttttttaatatggaagttataataacggattgtggagttggacactactactgatgatgataataatattttggatgatataattaagattttgtccccttcatgtatttttttttgaacatattaattcctttaattatattatattaaaataaataagtaaagaattcaaggaggtcatgttgttcgtacaaataaactcaatgaaatgatatatatgaagttttaagttccatatatatatataaatatatgacttcatgcttcacccattaaaatgtcataaatgtttttagaccccaatcaaagaattgacgggaatccttactagatgtggcgtagattgtaaggagtactcccaagaaaataatggtggtccggactagtaatagatgaggatagaaagatgtgtggtaaagccagtgagatgtgaacaaattgtgtatctgaaaaatagccttatatatataagagtgatggaataatattaacaatgtaattcctgctggaagacttatatatatatacacacacatagatatagaatagaaacgaacctgatgagggccactttcacattcatgggaccttaataagatgccataaagaatttttcatttcttatatattacgtttttcatctccctttacatatatacaaaaaggtggtccctaactatgccatattttgaatgtttctgcatctgatatatacacataaattgtagtgaaaaatatgaacttgtgcatcaataaattgactagtcgtttcattccaatattacaaattatacatgattaattggcaatctaactatttttttttctttctaaagtgaggcaattcaatatttaatacaataattaagtcaaactcagttaggaaaagaaaattcgatattcattttaatttatctctaatatttatacaacatcaacaacaataacaatatataatatcataaaacaatttagtttgctggactccacgtacccaccaacaccacactatttataaatacacaaaaaaacgctatactattacgaaaatttcaaagcaaacaaaatgataattaaaacaaaagaggaaaggaattaagaagcccactcactaacactttcctactaatatatagaaatatatgatgacaatgtacaagataatacaactcactaactaattaaaacaacctatgtatacgtacaactacgtacgtaccccggcagttagtaaaaaccatattgcccccactaaataataataaatgtaatttcatcctaattatactattcaaaaaaaaaaaaaaaagctctggtacccatctcggggaagattaatatcaaaagggaccatatacatatatgggaaaaaattgtgataatatatatatatatagagagagctataggaaggtgtggtagctggctgggtatatagctagttgatgtgtggtggtgtcggtggtgtgggatgattattagtagatgagtagtatattataggattggaattaaagggcacagaattatgtgtattggagtgattatgataatgatgaggattccagcaattgtcgtagatgtcttgtgcgattctggttgcatccgccgatgccccaagcagcccacgctgagtaaaccccactgcatacagtcccaactcccctttccacccatttggggtaccttttctaggcattccatttttctcattgaacattttcgtctcctgcatcgaaccattcatccccatcaaaatactatatacttttatattttatataccgacaatatccgatcatgactcgtgtaataaaatattatacaattaatattggaattgttgcgtagtagtagtgtacttattataataattaataaattaaaaatgccataccaatattatgtgggtgaggcaaatgatcatatcgccttatataatgcggtatttaattatcaatttacatagtttttgtgggacctaatttgcttcatttttaacatgtgatgatacattaccactgataataataattatgatatagtacattaatattcttctaaaaattaggttttgttttattttgtctttatatatcaatataatagtataattatatattaacagcctaccactaacttagtaatcaagcatattattatattcatgtataaaaataatattatatatatgcgtgtatttataccttcagccaagtcattacgttacttttgtagccagttgctaaaatgatggcatcaaaagtttctactttcccatctataaattccgcagcatggagtgataatctctttatggccttacaaacctaatatattacatacatagaatcattaattcaaattaaaaagttaataattaaatacatcttcgtgtgcttaatttgttagagttaattataatcattaattaataataccttaatctctccagttttgatcttggcgagtgttccaacatccaaaacaggagttttacctgatatggatttgagctgaagagggccaagttctggccttgttaatcccaatttggatgtgtcaccaagcaacaaacgtgacattaaaagtaaaaatcgatccacaagccacactggtaaccacttaagtaaccacatggatagtccaaaagttgagcttcctaacatctcttgaggcaatacatgcacctgcactcaattagcccattaattaattaaacatataatttattaaaagccggtattcatcatctttaattaaaataataaaaaaaaaaatctacaaaactaaagtggagatgattagcaggtccccacgctcgagtttttttttttttttttt

SEQ ID NO: 27408 - DNA, 2336 bp, Cannabis sativa
  modified_base (977)..(989): a, c, t, g, unknown or other
gaaccctaaaccccaaaacacgaacccaaatctggatccgactcaaaccctggaccccgagctcgaacccagacccgagctaggtcttaggtccggatccaagtcgaggttcgaggttcgcatcctggttcgagtcggctagggtccgagttgagatcagggttcaggtcgggatcttgggtctaagtctagcgtccacagtccgagtcaaggtccaacgcgagcccaatgttcgagtccaggttttatggtttaggtatgtgagcaaaattataagatataatatgtcagaaaaaaaaaatattttttcaaaattaaaaactacattttaatgtttttcgttttttaattttttaaaacagtctatttttaaaaatttaaccaagcagtccctattagtttttaaaaattattttttgtttttaaaaattaaaaacagtttttaagttatgaagctaaatagctcgtaagtttctttcatttatttaatttttttttaaaaaaaaatcatgcaattcaatcaactaaaataatagcatgcaatccaatcgaaacatctcccccattaatgacacgaccagaattaaaattaaaaaaacaagtcaaataatcaattgcttaatccctaaattgtttgacaaaaacataaaaaatacaatcaaatgaagaaaaaaaattcaacatcacaattaaccttaagaccatctaatattaagtttcatctgctgcttaaaagacacaacagtaaaaactgttacaataaggtagcgtttggttagagataatgaaatggaatagaaaataatcaattttcattttattcctttgtttggttgcatattaaaatattgaaatggaatgacctttctaccattttagtgaaatggctatttcattttgaaattgaaggaaaaaccattctaatgcatgataagaaaaaaatttaataacttttttattaatttttttatgcattnnnnnnnnnnnnncattccattcctattcctatttcccttctcattcctattcttatattttcatccctctcaactaaacgccacctaagtttattcaatcttgtagcttgagcactcaactattgttcaaaatacgtaactatactattaacaactccctccaatcacaaacaacttgttatttccaaccactaacaacaatttgatcaaaaaaaaaaaaaacactaacgaaacaaaaccacatcacacaaacagaactaaaacattcgtaatgtcacagaacataataaactattatagcaaaatttgttttatttttgaagatattcttgcagagcataatttggcaacattgctcaaaataatagtttagcatatgagaaatgttgcaaattcaaatacaatagaaaatagattttaaaaaaaaatgctactgaaaatagacagaacacaaagaaaaatgcaattcctacatgtatttgccttcgaaacgaaatttaatggtaaattagaatgcagtgtccgggaagaaacatgcaaataagaacaagttctgcctccgaacagttcttactaatgagaaacacaactatatcaactgaaaatacagtgcttaaatcattatcagatcacattaaaacaagtcgttgacacagaaaatagacccccctctccccttgctcatctaaaaggcattatagtttcccacattccaattggcaagctacaaggacattgggaaactgaccacctaaaagaaatttggaaggctctgtttaacatattcgcttcggccatgtagcaaacctcaatccattcttcccttcaagatcctctcggtcacttccgtgggtgttctgtgaaaatttaccagataaataacataattgtgttactcaggttaatacagcaaaagcgatcatttcaggtttaagttatacatgataattttgtcaactaaatctgaatagaactaactatttggatgatggaagatgagacagacgaaaaaatacattaatccaagcaaaaaaaaatgaacccaaaaatgtgctcaagaaccttcagatatctactttctgaagacattatctatcatggatctattctcatcaatcaataagcaaaaaagcaaatttcagcacgcagcagtagaaaagcaccaagttgtatgttacagaattttgaggaacatgctgctttgtagtaacaagtaatgaagaatgtagtttagaggggcttacacaacatagacgtggcctccccatccactcaaacaatctcggtcaactgatgataatagtgcttgtgagacaacctcaaatagctcctctggttcctgagtgaaaataaaatata

SEQ ID NO: 27409 - DNA, 3610 bp, Cannabis sativa
atttagaggaactataccacaatcactcttaatgaataagttaaactagcttattctttagaaaaagttgcaaaattaagcttttataaagtaagctaaaatttagctattttacattttttatctaaataattagtaatgaactaaatgcaaaggtaactatttagtcaactaaatatattttattattatatttattttttttatatatatatatgtaatattattgtattatattttatgaaatgaataagataaaatagttaaatgatacggagtaaagaaattaatgcatgatataatataaaaatttaaggtacaataaaaaataaagtttatataaaaatttaaggtacaatcaaaataaagttttggtgatttattttaaaagatataatagaaaagctattgtgagtgctttgagggttgcttgaatagttttaattttcattttttttatgctcaacataattatttaagacctcattcaaattttccagaaatgcaaaaaaaaaaataaataaataaaaaacaaactatcgcgaaaataaagtttaaataatttgtgacacgtgtactttttattttatatacatgtaaaataaattatttgaactttatattatgtattattttaattttttttttttatttttttgcaaaatatcatatataattatgatgtaactgtgataaaaaaaaatgttaattaagatttttacttgctaaattttaacatatataatgtactaaatatgtcttcaaatttttaaaaattgcacttaaacaattgaaattatcaaattcaaatcatacttctcactaattccttttaattttattaacaatgatcgtacttgaaactttaatatatacaaaatcatcaatcttaaattttacatcatgtttatgttttccttagtaaaatgtttaagaaaattcttaaatctaatagtttagaagatacaatacaatttgtacacgttgaaattcaaaaagactaaaattatttgaatgaccaaaacaagaaacatctaagagaaactctataaatagtttaatagtttattcattgaacaacttgtcttctcctaacactttctatactagaataaactaatcatgatgatgtctgagacagacaacaacaacaacagaaacatagtcctcttcccattcatggcacaaggccacttcaatccctttctagccttagctcataaactctcccaaaccagaaataactactttacactcactttagtcactacccaactcaatcttccacacctcaaactctctcttccacccaattcctcaattcaactcgtcggaataacttttcccggcgatggctatgaatcttatcttccttccggcgtggagaacaccgactctcttccctatcatttcatggctgatttcttacaagcttgtatttctctcaaaccccagttcagaaaactcatctccgacctatgttctcacccggataaccgtaaaaaaccgttcttgataatctccgacatgtttttcggatggtcttatgaggttgctcgcgagtttggagttttcaacgccgggttttgcggtggtggaggatttgggttcgcttgcttttactctctgtggatgaaccttcctcatcgactgagtaaaggagctgccttttccgatgaaatctgtttgccggattttccagaagctggaaagattcaggtgactcagatgtcggaattcttacgtgtggcagatgggtctgataagttttctgttgtgttaagagaacttcttcagttatggacgaaagttgatgcttttctttttaacacagttgagcaaatcgaacagagtaatgggttagcatatttccggcgaataatcggtaaagatgtgattttttctattgggcctgtcttttctccggtaacaaggtcagaaaaagcaacaattgggatcacagtagagaagtgtacacaatggcttgattcaaaaccaaaaagatcagttctttatgtgtcatttgggtcaatgaacactatatcaacatctcaaatgatggaattaggcatggcattggaagctagtggcaaaagcttcatctgggttgttaggccgccgatcgagtttgacataaatggcgagttcagagccgaagagtggctgccaaaggggttcgaggagcgaatgagggagtcgaaaagagggttgcttgtgcatcaatgggctcctcaagtgaccatcttgggtcatgaagctgtgtgtggttttctcagccattgtggttggaattcagtgttggaatcacttagttatggtgtgcctataattggttggcctttgtctgcagatcagttttataatgccaaattgttggaagagaaatttggtgtttgtattgaaattgggagaggaatgagctcctttgttggacataaagaaatggttgaaaagattaatttggttatgaatttagagacagagaaaggaggagaaatgagaaggaaagcttgggaagttggggaaatgattaggaatggtgtgagagatgagagtgagtttaagggttcttctgttatagcaatggagaaacttttgaatactgctatgatttttagtgagcagaaaagaactaagctgatctgatgagatgagatcatttcagttacaaaagtctgttgtactctatagttcacctatattgatcagttgagtttactatgtgtatcattatgaagttgtcaatgatttattgttatcattattattaaatgaacttacattttcttttacaatgagtagtaaaatctatatgtacaaaaggatataaatttaattttgtggtttaaatttctttatagtttgatggaaggttgcaccagatttctggaagggtatgtgattttggattgattttgggaggaatgtcaaaatattccaaaatcaatcctttcttttttgaatgaatggacgtctattaataagaaaagaattagatctcgtaatcattacaaaataagtctttcagaatttgagaaatagataaccgaccaaacttattgtaggtgaacgctcacttactcacattatgagcaacaaaattacaagttctgagaatacacgaaagattgattagaagacaaatcttttttaagaaaatcacatgtatatcctttcatgaaaaataaaatatatattatataatgtatcattcagtaaatttacttctaaattttgaatacattctatctcttctctattaataccaccaaacaacatgaaattctatccattactcctcaccctcctttttaaactctcaatccttcaatattttttccttcttgccaaatataatgttacttttgggctatatttttatgctattgtttaccacagtgtaatcagtattccttcgctacaagtgaggtttttatttcgatgatttttattttctaaatttatgtaggaagtagaaaaagttaatgtattagattttaacacttatttttttttctcactttttgctttttgtcctatttttagcctatactcttagggttcgtttggaacgccgtattaggtcatattgtattgtattgtattatat

SEQ ID NO: 27410 - DNA, 3875 bp, Cannabis sativa
  modified_base (3813)..(3819): a, c, t, g, unknown or other
atcagttgagccatacttcagtttagttgcttattgactagactattagctagctatttggatacaaatataaaagattgattccaagacccctctctacttcacctcttcttatatttatttatatttataggtagcttccccaataaaggtactataaactattgcacccactggccacgctgctttgaaaatttaattaataatacacatttacaagtagttgtttttttttcctaatgttattttgtgcgcaaggtttagctaatgtaaagtgtattgttataagacgtcaaacataacataataaaagtgatattattatatcatgaggattattattcgatgcctagtattatttagaggtaaatactttagtattacttagtgatattttataaaaattattgtattaaaattatataaaactatatatttgattattctaatagtaatataatatattagtactttacctaattcagttattaaacaataataaataaaattttattttaaaatcaactatttatatgttagtcaaaaattaataaacctactgcataattttcttgtatgattattctcgctagctgtcctacttttttaacattattattactttcacatctgggcattgaaaatattgttttagatctgactatgtggacacccaattcccattttgtctatttccgtcctatttgaatttttattttttttgtgctgaaaaacatgttgcatataaaaaatgaatttattttattgttttgaatgtaaagaagagattttttatacgagggtgttaacaggagaatttgtgtaaagaaaagtctttgttattcatttaaaattggaatgaaaggtcaaaataaatggggacgaagaagaaacctccaactcagtgcaactaaggtggtgaagggttggcacctttaagagatacccttaggccaacctttaggggatacctaatgcgctaacccttcaccagtcaaagtgatacttaagtttttgtgaaagatcgtatagtatacaattgtcattcatataagaacacaatccagattcatcacttgataatatcctactacaagaagagaatcaagagttagagagatttaactgaaggaaccaatttatttaatcgttttgcataaagcatgttttaggttgtttgattattatgtaaataattaatcatatatgatagcaaattagatcatgtactgttgcaaagtaaggctcttcaaaaaaattaacaaaccatcaaacctgaataaatcgccaaaccaaactgaataaaccgataaaaaatacaacccagataactttacgaaaaattcaaactgcccaatcgatatacattgggcgggttaaatattattgtaacccgcccaaataacccgaataaaccgatttatatactttttactaaaattatttataacataatatataaattacatttaatagttaaactattttacatttaaaaattgtattttatagtgtttaatttgaaatttagaatttatagttgataattttgattatatttgaatattaaagttgaaatttagaatttacgtatattttttttattctattttttgaaaaatgttgtttaatactttaatgtttattcaatccatatttgttcttttaacattaatttaaactattactattttaatcttgaaaggtatatactatacatttattttttcaaatcagttatttgaacaccaaaaactaacaataataaaaaaaaataaaaataaagatcggtttaaacgggttaacccgaccaaaccgacgaaaatcattggacgagttacacttttttttttttaattggacgggttacaattagatatatacaacccgatatttatattgggttggtaaaaatacaatataacctgaccaaactgaccgatgtacacccctatcgcaaagtagtggctgtcaaaaataatttgtgcatgttggtggctgagcaacagttcaaagatgatatatacaagataaaagatggctataagctaatgagccctaaccatactcgtctacattggtccaaagaggtttgaggtaaatttaatactttgaaatacaattttattttctggctagctgtatagaacaggcttaaaactagagattgacttccccgatacaacatagttcaaggcgatctttgtttattgtgttgtctaacataggaatcaacttctaaattattttttgattgcaaagtcagtaaggattgcttgatgaggattaaatcatgcctgaaatggaatgcaaaaataggttcccttcaacaactaacccaatggatctttagagcaaagttgagcaaatttcagaagcaatgtttatgggctagtttagctttcttggtctaccataattggaaagctagaaatggaaagatttggtcccaaaaatcaacaaaggttgatgaaatggttatgatgataaaatagtgttaaaatgaagattttatatgtatggtctaagaaagtttgtaagcaaaatatggaatggtttgaaacattataggtttataaagattcacatttgctgaaagagtgtatagatagatttttttccaggtctctttcaaatggaggcgttgaagaattgtaatgtttgattggatgaaatacaatttttttagttctcccaaaaaattagatcctagtaaaataagctccaacaactagcctcaaagccttagtaacactatttcataaattaacatgttttaaaataatttatcaggttttggatgaattcatgttaattgtttgtgatttaatgattttatgtgaaacttgtatgtatttatatgacaaataattttattatgcatcttttatgttttaaaattgttttagaaactgtatggcttgaaattaatgcatgagaaaaaattttggaaccaaaatcgggtcaaaatgggcctaaagcacaaaaaggtgctaagtggtcgagacccacacccacaagctctaggtggccaagatttcttggccaagcaactagatttgcgcgtggacgaagtaagggcacgatcgacttttctcagcgaggtgtgcatccttacacgcgcatcatgggatgcatggtcgagatttctcggccatgtctgttgcatcccgcctatgtcaccctgtacccgcacgggcatgtgtgggtattttctgggcaaaagcatgttggtgactatagtacccaggtgaacggtgaaccagtcaactagttaccagctagtcaccaatgcgacgtttttgtatttttaatttaaaaatcttttttaataaaaataaatactagaaaattataaaaaaattattgaaaattagtattttcaattttgaacctaaatatcagatctaaattactaatatttaactttttaataaattattattagtgttatcccaatttttgtcaacataacatggcatgttaacgtggacaagatcaatgccacgtggagtacaacatgtcaacaagaaggccaagtcatcgtacacaacatataagttgacgaaaagtctaaatacttaagcgggacaaagggacaatgaactggccaccttgagggttctggccggaccccctggtcggccctatggccaacataggttgaccagcctccaacaaaggaagggtcgatcagcctatatcctggtagggacttggccgaccagcttacaccatggaaggcacttggtgtgaagtcttgaccctagcagacatttttgggttttgtgtcctaaataaaacccatttcannnnnnncaaatttactaattaataaagattagaaatcacttctatgttgcatggttcacatg

SEQ ID NO: 27411 - DNA, 2125 bp, Cannabis sativa
  modified_base (269)..(271): a, c, t, g, unknown or other
gtccgggtttgggtcccggtccaactccgcaactccgagacctaggtttgggtctgggtctgggtttgggttcagggttcaggtctgggtccaaagatctaagttggggtcggagtccaaaatattaatgaagcaaaaaaactgtaaaaaaaattaaaagtgaccttttcttgtttttaaaattttgactcttaaataaaaaattgaaaaataaaaacaattttataaatatgtttttgaaaaatatttttattttttaattaaaaaannnaaaattaattaaaaaaatattaccaacaacactttaaatgtttatattttctgtaaaatttccttaaaaaaagtctcactgttttataatttgttcattccataaaaaattttcaaatctgaactccgaattaactttgaattaaaagaaatggaagaatgtgtgcacataactacaattagaaaaaaataaatagttttagagaaaataagagatgtttgttgtggaatggaatctagctgcaatgggaggcatgcagtttgagttgggtccggctaaggagacattagctgcacgtgccaaatgtgggcctgagtgagtgggccggcccaggcgccacgagactcgtgtgttgatgacaagagtgtggtatgtcataacctctgatattttcacgtggtgatcccacacttaacccccatcatttcattttcatgctcctccttccctattcttattcctcctccttacctcttacctaaccaatcctatctttacacacaaaaattataaccctttatgtatatatatgtattccactataatcaaaacaatcatttattaattactcaacaataatttaagctaaaattaaattgtttcatactgacctaaatttctccatttaaaaatcgtaggtcaccaaaaaaaaaaatcaagttaacttgccacagtgattttgagatcaggaaatatataagttgatcacaaacattttgggatcaagtacaagtactttgaagactaatgtattaatatgttaaaaaggagtagcagaataaatgttaacataagtagatatgaagaatactattattgacttctactttggaatttaactgatacgcggtgctttgtcctcatttaatttatagatattataaatacatatagaaacaatatttaatttgattgtggaactcttaatttagtaagttctattaataataataataataatttgtagttcttaataattaatacaattctacatacatcatatgttgtacagaaagctccatattagggagtagtgaaaccagctttaatgaaaaccggccatgtacggtagccttagccccacgcactaatatatttatatatatatatatataaaagatgaaacataaagacaataagataatttattaattaaatgtgaattacacgtccgtacgcattagctatatagtttttcaaaatctttcaaacaactataatatacatttaatctttttggcaatttccccttatactgcacactaaagcactgcgtgttgaaaaggtaaacaaataagaagcaaatataactatatatatataaagggtaggtatactctcttttaatttctacaaaagaatctcagtttacacatatatttatgtcgaatttatttgtctttaacagcttaaaaacttttttattttattgtattctcatcaatcatcatctcatggctttaacacattttgttctcttaataatacctttattataagtaacggcctgctggaataatatatacaataatgcacaatgtacacttatataacaggtgtattgctccgatctattttggcatcctaatcaaatttttagtttttttttttttttttaaatattcgtgtacattatagttattaaaaatattctgtaaaattttgaaaaatttataaaaatttaacacgctgaaaatagaatttaaacaaattgtagcgtgactcttttattttatacgcatctaaaatagactgtttgaacattattttctatattataagttatttcaaatttctcaaaatttgtaaatatctgaaataattataacatgcataattaaaaaaaaaaaaaaa

SEQ ID NO: 27412 - DNA, 4778 bp, Cannabis sativa
ttgtacgggtatagttgccccccaagtgactgaggagacttttgactctttatcacttgcatttcacaagtatggtttttttctgttcggttcttcgggtttgagcagacatttgtatgcatttaatggtaaatttataacttgctaataggatttacacaatctaatttaaatagaaatctttattcattcattggtcgaaacatttttgttaccgtagtaacttacataaaagctattatactaatctaatctgatcttttgctaaatttaaacaaaacaaattacatttaaaagaaattatacttttagaggtagtcatccgacctgagttctttgtcatttcacccgaacctttgggcgtggtctgccctgaaggccatttacttaagagtaaaggttcttaaattttgtacttagaatggtcatctgacctggtacttttactggtagtattttattaaatgtttcccattccaataccttggtaatagaacgagtgtcttgttatcgtcataccatcccagtttgtatgcgcctgattctagaacttcaaccacatgatatgttcctttccagtttagtcctagctcacctgtcgtgctgtctttggtgtttagaaacactctcctgaggaccatatctctcacaaaaaaaattttgtgtcttcacttgcttgttaaagtactgagctaacttttgtttatgggccaccaactttaagtttgttgcagctcgtttttcttcggtttcatcaagtgattctgataggagggcatggttagcctcttgatcataggtcaaccttttgtgggacgaaggttctaattctatgcgcagcatagcttcgtaaccataggccatagcgaatggagtctaactggttgttgttttttgaattgtgctgtaagaccttagtacttctggaagttcttccagctagttccccttagcatcttcatgtcgcttctttaaagtatctttaagtgtcttattgacgcttcgacttgaccattttcctaggggtgcgccactgcagagaaactctttaaaattccatggtttgcacagaaatcagtgagcaattgactatctaactgtgtgccattatctgggactatcttgtacgggagtctaactggcatattatttttttcaccacgaactctagcactttcttggatgtaattgttgccaatggctcagctttcgtccatttagtgaaataatccactgcaaccattgcatattgtactccccctttaaatttcggcaatttctgattagattaattccccaaatagccaatggccaaggactttgcatctgagttagtttgttgggcagtgcacggggtatcattaaaaatatttggcatttctcacatttcttaacataggcttttgaatcttcagtcatagttggccagaaatatccttgccttagtattttctttgataggcattgttgtgtggttgctatagaatccatcgtgtacctcagacaaaagtcatgcagcttcttcttgtgtaacacatccgagtagtggcatggagaatccccttctgtacattactccttctacgatgatataccgtgcatcctttctcctcatctatggagcttcatttctgttacttggaagttccccagtattgaggtaggctactattggtgtcatccagtttggagttgtgtcaatcatttcaatttcttccgcacaggtgatgatgggttcttcaaggaattggattgggatatgattagccttatcagctatattgttgcttgcaagtcgggctaaggcattagcagttatattttcttcttttagaatttgcttgagattgtagctcgtgaattgtgtaagcaggtcatgtattttgcttagataggctatcatttttcccccgagcctcgtactctccagacacatgatttactaccaactgtaagtgactgcagatctcgatgtgttcaacatgtagttctcgagcaagttttagatcgacaatgagggcttcgtactctgcttcattgttggatgctctgaacccaaatttggccgccctgtgtaggtgttgccccccaagcgtgacaagggcaatccatacaccagacagttgatctgtagccgacccatctacgtgtaattttcaggtaggtttgtcttaattgttgctcgactaaggttcttgtactggctttgggttaccttttgaaatgctttcttctttgcccgtacactcaactacaaagtttgctaaagcctgtcctttgattattgttcagggttgtaagattatctcgtattgacccaattccattacccaattgagtaaccgtccagaagcatcaagcttttgtaatatttggtgtaatggttggtcaatgactcgatgagagcttgaaaaagtaaggcctcaacttccttgttgccaagattagacagtaagtaagcttttctatcaacggatattgtccttcagcttcaacaagtcttttgctgatgtaatagacatgatgctggacattgttttcttccctcatcagcacgacactcacagcatgttctttagcagctaggtatattcctagttcttctctgtccagaggttttgaaagtacatgaggttttgcaagttgtctttttagttcttaaaaggcattctcgcattcctctgtccattcaaatttcttatttcctcgcaagatgttgaggaaagaaacacacttgtctattgagtttgaaacaaatctactgagtgcgactatctgagaagttgcgctttggacttctttggtttttgtaggcaatttcatatccaagagggcttgaattttctctggattggcttcaatacctcgggcgttcacaataaaaccaagaaacgtactcgagccaactccaaaggagcactttaagggattgagtttcatgttgtatttttcgaggactttgaagcatttttccaggtcatctatatgccccccagccttcctgaatttgacgagcatgtcatccacgtatacctccatattttgtccgatcggatctttgaacattttgtttaccaatctttggtaggtagctccagcgttctttagaccaaatggcatgaccttataacagtataaacccatatttgttgggaaacttgtatgttcttggtctggtggatgcattttgatttgattataccccaaataggcatccataaaaattaggatctcgtgcccagctgttgcatccacgagctgatctattcttggaagtggaaaatagtatttggggcacgccttgttgaggtcagtgaaatcaatacatactcgccattttttgttgggcttagatactaatatgggttagctacccaggccgagtagaaagcttcaataatgaagttgttattgtgaagcttttttacctcttcttttaatgcttgtgcccattctttatccaacagtcttcttttttgctaaactagatggaagtttggatcgaggtttagggcgtgtgaaattatagaaggatcgatactgaccatgtcttcatgtacccagacaaaaatgtctaggtttgctcttagaaattttatcaaagctgattttacttcaagtagcaaacttttgccgattttgagcttcttggtcgggaaaatttggtcgatttctatttcttccaattcttccaccagcccaacatttgtatttggttcccgaagtcggggatccacatcttcgtccccgccttgggcagctccctatttggcaatgcttttcctcctgtctgaactttagccagaggattcttccttcttggccttggtccaggcaaggttatagcattcccgtgcaacttgttgatttccttttgagcaccctaccgcattctttgttgggaacttaatgcatgaatggaaaattgatgtgacagcctttaggtcatataaggttggtcggcctaacatgacattaaaagctgatggaacatcaattatcaaaaattgtaccatcacagttatgctcctcggagcttgtccaacagtgaggggtagacgaattttccccaatggtgcaacacttcggctggagaaaccatacaccagttgggtacagaggatcagatctttgagttggagtcctatcttttcatatggtgttttgaacaagatgtttgtagaagctccattgtctatcatagtccaggccattattttattcactatcggtacttccccaactaaaggatttttgtgcgggaagcgaacgtggatagcatcttcttcagtgaaggttatagtgggttcccctacccgtggcacttttggcttcctttcttctacagccgaaactacttccttttgtccgtgctataaagttcgggcatgcctctctcgagctttgctcgaatctccagcgatgtgtgggccccaataatgacttgtaaatgctcattcactggtggttgcattagtaggtcttggttgttgtctgcttgggcggcctactgattctgattagccttgacgtacttttacacatgcgggttatttttccctatcaggaattcaatttcccacttcaggttgttgcactcatttgtgtcgtggccatagtcaccatgaaaaatggaaaaatttggcaaatcccacttgcttatatcctttttcatgggagcaggtttttcgtacgggaccacagactgggtttccatgtaatttgtctttaggttgtcagttaggacagagaaggcagtgaatttggaggcatttctg

SEQ ID NO: 27413 - DNA, 7192 bp, Cannabis sativa
aatttttttagaattaataaaaaattgtatttttttaaaagggtgcaaaatttaatattgatcaaaattcaaggaataaaaatgttaatttttaacggttaaagtatcgaatttaacagaaatgacatgattatataactgttacattttaaggaaaattttgtatattaattctaaggaaaaaatagtgtctaaagttcaggaacaaaaatactaattattctatatatatattatttaattattctatatatattattttgtgttcaattattatataagtatttatatatagagagagagaaagagagagaataaagagatagaaagtatagtacttgatgatgagcagtgcatcttttgagtagatccttgaagatgatataggaattgggtttgttctgctcccaatattcccatcttttattactacttgatacttgacaacataataatgacgggtctctcatcattactttcttcccattattattattccacatatcttctttgtctttcctgttcatgtacacaaatacatattcaaaatcaaacactacatattcctaagtattatttattgcctaaaacagaaaaccattctttttcttttcaaattacctagctttacctacgtaatgaacaacacgcgtacgtacgtacggttatgttataatctcacaatcacaattattaattaacgatatacatatataataataaagtcaaatttatcaaatagatcaaaatttaaaattaatgcaatattacaaaatatatatatatcgaaaacgtgcaatttttttattttatttttggcagaaatatacattgtatatcatctgattttgttctgactattggggaggacattgaaaaattagttaataattaaccgttcgtccaaacaaactaataattaatttatttttctaatgaggttgcataaatttatagcactgaaaattttgcgttaattaaattttataaaatttctatcttcaactttgtatccaattttttttttttttttttcacataacttcttaatatagcaaagaactaataaacttatttttttatgtcgaaaaagaaaagaaaagtaattagttttttctttgcagtaattaaaatgataattaaagagaagaattaggaaactgtgtatacaaaccattgatgtagtactccaggattggtgttggtgttggtgttggagttaatctctaggtcttcttccttgccatgatcatgattcccataactattctgataagcagggactgaaaagcttgttaagcttaagccgttattaatattgtttctttggaaataattgtgtgactgttgagacttgttcattgttgggttcaaatttgatgaggaatagaagtttgagttttggtggaagagtaccattgtcttactattctcccctgtcatagctgctcaatttaaataacctcaatcaattgatcaattattctataataataataatgaaagtcctcaaaatatatatatggaattacagcttacttgccatattaaaaaaatatatataagactttaaataaacaaataacgtataccaaagtataaatatatgcatttccatacattcttttaacctatgtatggtggcctatatgatctagctctgactttgaaaaaatatgacaccaacacatcactcatatatacgttttagagtttaagattatttctaaccgaaggagtctcacttatttatttattttgaaagtactcacttatttatttaaaaaaaaaactctaaaacgtattaagcaattctttactgtacttttggtagatttttttataccaaaaggcactttttgaaagatattttctatttcttcttcttctttttcataaccacttttcgaaattgagctagctgtttaataaattcattgaatggacaataaaacaagtgactactgttgtttctgtaattttatatatatttatatatatgtatataaataccattaatggataattaattgaataaaaattaattaaggattttatatatatatataccttgaataagttgctcatgcttcatgctcctgtacatctgtgtgatcacagcaaaaataattattataacgtacgcacgacagaactaaaccttgagatattttccaaatcaaattaaattaagaaagtaaaaaaataaaaaaatctcgaattaatcaagaatatatatagaaaatattgaaaaagatcgaaaaagaaaaaagagcatcatcgtatcatggatttgattgttgatcaattacgtacctgaagatgactcttcacgtgagatatggtaaggccctggacatccattatctgcagcaccatcttcggtgtggctcctacacatatatatatatatataaaaattaataaaaataaaaatcaattaaccttcattaataattaactatacataataattataattaagaagagtgagctataataatttactatcttctcctccaaggcgttcaacagcatgcacaaagcatcggtgaagatccggagtccaccgaagccgaggcattttcgaccgaatataaggcctcaccgccgaactactacctttcatttcagttgaattgtcaatattattcattacaattacaccagatgatgatgatgttgatgatgaagaagaagaagatgatgatgatgatgatttaattacacctgattttgaagaattgtactgttccccagtgccattttgatcaagagaagacactactgaacgacttagataactatcacccatatataatataatttctatagctctatatattctctcactgtactgtctcctccaaatagatcagagagaaattaagagatagaagaagaagaaaagagagagaaagagaaagggtccaaaagggttacaacagaaagagaataaataccaagtaagactccgtagcaaaagtttgtcttcttctgcaacttttttttttttaaaaaaaaaatcttgttttcacactcgctagggtacgaggactagggggggggtcagtttttttagtctttggagtttcgattgtgaaaaagaaaaatgaagacacagaatttcaggcctgatttttttggttcaaaaatgtcttcatgattgggggaaaaaaactatacatgtatcaaaagagtttcttctttataataatgatatatcatttttcaccaagacattctttattaagaggtctctttcaatacattctttgactatatatatatactctcttcaactattattgatatacatatatttatatggttcattaataattattcatggattctctatttattgagaatcatatatagcataggggccattcattattggtgattattctttacaaaatttgcatatattcattcaaatatcatattatattgaacaagaaaacatatgtgaaaggaataagcagatatattacttaactttcacagattttttttttttcaaataaataaataatgacataaaaatgcatgtcctcaaggaaacatgccaaatataaattcgacgttacaaaaattcaaaaaaccatatgataatattgatgatggtatcttacatgtatcccctctccttaattccagcccgaaaaagaattatatatatgactttgcatatataatatatatccagtccatttgcacacatcatatatatcatttatatgtttatatatttacgcgcggcgcgtgagtgtcaagtctggggaggtggatggatgaagtcctgcaatatactatacaaaaaaaatttacttttagccacaacaaaatttgtaattaaaagtaaaaaattgtgactaattataaattattattcctatgttatgactaaaaggtcgtggctaaaagtattagtctcaaaaattataatttgttgttactaaatgtatttttataatcacaatacttattgtgaataaaattaaattagtgacaacttgtaattaaatactatattttagtcacaagtaatatttttttgtgactaaaaatcacatttagtcagaaaaaaaattatattgtgattaaaaaattgtaactaaaaataacagtttttagtgttggtatgtttgaggtgatcatttagtgactgagtattagagtatatatataaatatatacatatagatatacgtaagcatgcaaaataagaaagcggaataaacgagaaatgctaaaaagtactacgggttctacttctagtacatttttacgcgccatatccctattagtgtaattgtatatcgggtattatataatttcgcgtaataatttttaaaaaatatcattaacaaattatagaacgctatttttaaaaagtgttgggccctaggatgccacctttaaaaagtaccaaataataacaagggaatgaatggtgtgaaaggagatagaggataaatgtggggactcggcgttcataaatggggtttgttttggtgagagagagatggagagaatggagttggagaatattgggagtggagaagcggtttcaaagtgtggggatgtgggaatattctgtgtgtgatgtgcaggtggcgtgcgtggcaagagtatatacaacatataacgttattattattagtattgtaatgtgtggatattttgtatgcattatacacagagagaggaatgaatgacgttacctactattctctcgaattttttaccaattaagccagcaaaactacttgtcttcaacccaggaaagtactcttgtttttattggctgcttattagttataatataatttatctacgaaatttcttcttcatgctcttcctctttatgccctaataataaatgaaagtatgtaacatctttatctgttacgtcaacaagggcttttatataatatgtccaggtcttccgttgttaaactttattaaaaaagagctagccggcctatccaattgccgtttatttttttacacctttgactcttttgtcatttcgaataactttctattttttgtcattatgaataaatgcctgattttactaactaaagtaaattaattttcttaaaacgtaaataaaaacagaaaaaaaaaaaaacaaaacaaaacaaaatgtttttaaacgacacgtcgtaatgttttttttttcagttgaagttaacttttgatgaggaccaagatgaataatgcgactttgatttcaggtaaatgatcatatcaatcttttcattttttttttttctgtaataataggtaagtgaaaattcgaagttgagacctcaaggtgtgaaaacaccaattatatctattgaccacagttttgtcactttttattatgaagttcaatatatttttagacattataacttgaaagctaatctttcatttgaaagaagattattttaattaacaaatattccttactcgataagaacggtttgtaataatttaagtcgagtttggtttactattactattataattttgtttattttgaattgaacattataattaatttttttatttaatataaaaataaaattgagtaattagtatattaaccaaaatgttctcattttatttgttgtcaactatacatatttgctaaagaagtaagagagaagagtggaaaagtttttatgtatagggattacaaatgttaaaagtctcaactaaacatcaaacattttaattgtaatctctaatccatttcaatcttgattataccaaagaaaacatgctaattagtttgtccggattctacgttattttaaactaaactaatattaattatggtttttaaaagattttttttttttcatttatacatttcaatttttttaaatatatttttacaaaaatttacgtagcaattaacagaataatttcacaagctgaattcatatagcaaccaccgcaacaatacaagccgtaaaataataataaaaataaaaataaaaaaatagtatctagaataattcctctttcaaaaaattcaaatacaaactaaaccaattaaatactcaaactcaactaatccaattaagaacatgatttgtatttagtaattattctaattttttttactttgataagtttacaatacataaaaaataattattaaaacaatatcaattcaacatcagtattctacttttctcaaatatcaaaattccatccaaaatatatatagaagtatatataaaagaattgtgcaaaatagtttggcttggatagctaacaaaaattgtaaaatcgtgactaaactaaaaaattgtacatgatccgaattgaccaaaacataacctagattcctttaaattgtttggtctaaatttattgaggtttccagccacaaattgggaatgatatcaacaaccatcctaatttgtatatatgtatcttttaacatgagactttctttctttccatattaaattataaatctagtatgtatgtataccaaaaaaacatattgaggtaattataaatcggtttaaattggttcaatttgaaaacattacagattacacccagaccagggaagggaaaaagaattatgtagatgatttaggacaactccataaaaccaaaaccaactttgctcattaataagccgtcgtctcgcatctaaagcatctcatttaggctctagcttaaaacactcttgtcgtttcttgcaatttacatgtcgtttgattatttatttatgcacacatttttgctgcaggaacattttgcttgtggaaaacgaagggtgtcttctatctatttcagcaatttagaggaatttaatataggttaaagaatacaggcaggcaaaatacaagtgcaactgaaatgaaaccattttagtactttactactacatggtattagtacatacaccaaatactcaaaagagccttgaaaaagaagagaagtgatatatcccattcagcagatatagatagaaactcatttgagtccgtgtgtctacctcttaatttactagagtagaacagaacaggtaaccccatacaatacaataaaaggaagaagaatagaaaactatggcatggaatggaagctcaagcggagcttctcatctcaaatgaattaatttcacaacacaagtcccttgccattgtcactctatcgtgacaaa

SEQ ID NO: 27414 - DNA, 3845 bp, Cannabis sativa
tggtggctcttactcgggatgtcattaccattaccagggaagagtttcaggaattgtttaatgccaagtattataacgaggcagtcagaagtgcaaagagaaaagaattgactcagctgacttagaaataaaatatgactgttattgagtatacaacccagttaaagaggttggctaggttggccttgggaattgtgccaatcgacttcagtaagaaagaaaagtatctggatgggttgaatcccaaaatcaaacacgacctgatgatcacaactgatgataacaccacgtatgctgatatggtgggaaaagcacagcgagctaagggcgcagttttgtgcatcaaggagtcctgagggacacaagttgttggtggagccactactcctcctacctctggttatgttaggggtagtagtggcttgaccactaatcaaaagagaaaggcaccatctgcacattgtggctcaaatcagaataagaggtttcgagggaaccaaggtcctagaaaccgtcaaggtggttccgaaaactgatacacttaccaggaatgtcccaatcgtaagaagcatcatttgggtgagtgtaaagggcaaggatgtttctagtgtggtttgtttggacactacaagagagattacccacaactcaagaaagaagaacagaagacagcagcaaagcccgctccaacaagggtttttgctcttactcaggctgatgcagaagctagtccttcagttgttataggtcagctctcagtcaataactcttatttctgtgtgttatttgattctgaggaaactcattcatatgtggaggccagaattttcgataaattgggcagaccgtttgatagttatgataaagggtttggaaccctactgcctagcaaagaattagttatctccaaaaggtgggttaggtctatgccgatcaaaattgaggatagggagttgagtgctgatttagtagaattggacttagcggattttgatatcatatttggaatggatttcttgtccaaatattctgctagcattgattgtaagcagataatggtgatcttccaaccaaaggcgaggagccatttgtgtttgtgggatcagttttaggatctccgattccagtaatctcggtattaaaagctaaaaaaattttataagatggatgcctaggtttttggcagtggtattggataccacacggccggaatcaatttggccataggaaatcagagtggtttgggaatttttagatgtgtttctcgatgaacttctgggtttaccaccacagcaagaaatagattttgttattgatttagcacctggagcagttttagtttctaaagcaccttatagaatggctctggtagagcttaacgaattgaagattcagctcaagggatggttgacctagcattttcacgacctagtttgtcaccctggggagctcccgtgttgtttgttaagaagaaagacagatccctacgtatgtgcattgactaccgagagctaaataaattgactatcatgactaagtatcctttacctaggatcgacaacatgttcgatcagcttcaggggaaaacggtcttttctaagattgatctctaattgggctatcatcaattgagaattcgagaggagtacattccaaagagtactttccgcactaggtatgggcattatgaatttttggttatgtcttttggactaaccaacactccagtaatgaatatggtattcaaggatttcctcgatatttgttttagtatttattgacaacatccttgtgtactctacatcagaagcagagcatgagcaacacctctggatggttccacagcgattatgagaacataaaatgtatgccaagtttaaaaagtgtgaattttggctatccaaggtgtcttttcttggacacattgtcagtaaggaagggatcaaggttgatccagggaagattgaatctgtcagggattggccgagaccaaaaacagttatagaagtcagaagttttctgggtttagctagttagtatcgtcagtttgttgagggattttgtaagaattagcagtttctatggatagacaagtgtgaagcaagcttttacgaactaaaacagcagttgattatagctttggtgttagcgttaccatctgataaagtttattgtaatacatccagacatagtctgggatgtgttttgatgcaagctaatagggttatcatttatgtgtcccgccagttaaaggagtatgaacagtggagtatgaagagtgatacccaactcacaatttaaaacttgccatggtagtttttactttgaagattcggtggcattatctctacggagaaaagtgtgagatttacaccaatcacaaaagcctcaaatatttttttactcaaaaagatttgaatatgaggcagaggtagtggttggaattggtcaaggactatgattgtaaaatcctttaccatcccgagaaagctgatgtggtggcagatgccctgagcaaaaagggtcccgggtaagtatctagcatgatcatgattttacccctgcaagcatacgacatggtcagataagatattgagtttgttgtaggcaaacttaataatttgacattacaatctgatctattagacggaattaaagctgctcaattaactgatccagaattagtaaagatccgagaagaggttttagctagtcaagctaaagactttcagtgtcaggtaatgggatgatgttgtataaaactagggtttgtgttccaagcaatgtggaacttagaaatgagattctcaaggaagctcataccactccttattcattgcatcctatcaataccaaaatgtatcaggatttaaaacccttctactggtggtgcgaaaggaagaaggatgtggtagaatttttatcccggtgtttgacttgttagcagattaaggttgaacaccagagactttctgggttattgcaacctctgactcttcctgaatggaaatgggaagatgtcaccatggattttgtggttgggttacctaaaaccacggggatgttcaattcaattgggttatggtggattgatttactaagtttgcacattttctactagtgaaaacaacctttactgtggatcaatatgcagatctatatgttaaagaaatagtgaggttacatggggctccgaagtccattatattggataaggatccaaagtttacctcaaaattttggcaaagtctccagtgagctatgggtactaaattgaagtttagtaaaacttttcatcctcaaattgatgggcagtccaagagggcaattcagatacttgaggatatgttgcgagcctatgtgataaattttgaaggctcctagagcaagtacctattactgatataattctcatacaacaacagctatcaagtactatagggatggctccctatgagatgttatatggtaggaaatgcagatctccaattcactgggatgaaattggagaaaggaaatatttaggtcctaaattagtgcaacggaccaataaggctatagaaaagatcaaggccagaatgcttgcctcttagaataggcgaaagagttatgcatatccgaagtgtagaaatcaagaattttaggtaggagatcatgtattcctatgagtgtctctgatgagggggattaaacgtttcaagaaaaaggtcaagttacgccctaagtttataaggcctttcaaaattctcaaaaaggttggattggtagcttaccgtctagccttacctccagctttttcaacagaccataatgttgggttttgtgccctaaataaaacccattac

SEQ ID NO: 27415 - DNA, 1611 bp, Cannabis sativa
cgtcaaatttaactagttttattaggcttttttttttttttgttaggtcttatccttaattctataaatacattattttatcatataattgtatatctttattaatttattgatatgctcctgttttacatatctaagaatgaagacttggtgttagtattgcattagtcttcattatttttcaattatcaatgtagatgaaaagatcatgtatcttttctatatattcaattactcataatctaaattatatgtaaaatattattgtggtcttttataaaaaaaattaacaacaccaacttgaccaccaaattgagatgagatcaaatgtctctcagaaaaagaagttcgtaatggctgagattatttttgaaaataataaatctaccgtatttagttggaagtaatgaaatgaaaaaaaatataaaagaaataattttcatcctattttttttatttagttgcatattaaagtatttgaatattattttaatagaatgatctttctactatttcggtagaatgattattttattttaaaataataaaaaaaaaccatttcaatgcatgatgagaattatgcattttaaatttattttaatctattccattcttatttctattcttatgtttttattccttccaaccgaacgccatataagtttcttttttttttcctagcgaaagaaatatatatgtaaagaaaaaatagtttcttgatataaataaattatagagggaattgagccgaaaaaattgggataaattgagaaatactgttttttttttttgtaaccattaatcaaaaatacattcatattgtattttattaaaatgtacccacttttgtgagtgagtcgcctaatatacactcacactctctttaagtctagcacataatttatattaacttaacgggtataataggaataccatctataaaagtgagtatctcttaaagaatatagaaataaaagtaaaaattaaaacaagttaaataaagtgagtataccatcaatccttttttttttctttgtttgttttttacattttttttttttttacacaaagtacttttttttttcttttttactttgggaatagggattaaaacttagtacctcctctttacgagtagaagtgtgaaactaaccactaagttatgcctatgaccacatataaaatactgtttttgtaaaatttgtacacttttacgttaatagtttttttatattttacggtgttctataaaaataacaaaaaaactacatgaaagtaatagaaaaataacatataaataatatacaaataatgaaactaacaataaaataacaaaagtacagcatataaataacataaaagtattaaaaaattatattttctgtaaacaaatttttaaattaaaatatttaaaatttcgtataatcatatttttgtaatttttgtgtttttctgaaataatctattttttcttgctaactaagtcaagcccactatttatttacgcaataaaataaaataaaaataaagaccattaatcaaaagaaatttttacatgaaaaatcacttttgcacaatttattacctaaatactcctacacgcctatatct

SEQ ID NO: 27416 - DNA, 2649 bp, Cannabis sativa
  modified_base (2500)..(2505): a, c, t, g, unknown or other
ctaggacggctagtggaagaacttttaatattttatgaaatatttttaggatctcgaaacatgtaattttggttgtaaagttaaagttattacaagtttttattttaattctattattgtttaaagattaaagttcccacgcttttttgtatagttatcccgtttaggggattaggggtcttaatcacctagggtagcgtgcctaattgtagggcgttacagaaaaggcatatcaagtcaccattcagaaaccaattacttattgtagtatccccttgggatctcagaatgggtcgaaagagtatgtaattgatcataccacacaaaattttatcggtcaatccaatccaaggccacaagttcaaattgtgggccaaacaatagacgggcagatcttaccagatcgccccttatgaggaagtaattagctaaacaatcatagtctaatagaggtatcaggccaacctctcagccaagctgttcagaatcaaaggccccttggcagattggtgttcaattaactcgagatcgtccagccaaacaactatgtcccaggtctagttcgaatagattgtaatgtggcacaggtcggtcaataggctggccaagttcatccacttatgcaaagcataaatagattagcttaaaaaagcattgtacaaagcttaactggcccaaaactcatagatcttgaacttggtcgggcaagaggatcacccttctcacccgaaattaatgctcttgacctgccccttaagttcaaaatgccagtatagaagatgtatacaggcgaagaagatcctttatttcagttgaaatactttgagatgcaaatggacttgcaaggggtgagaggtaatgtacggtgcaaaatacattagtagagggcacccagcaatagtattttaaactacctctagggaagtccagttcatggatttctttctcatctgaattccacgcacacatttcctcctctcttcagcttccctctcatttggaagacctggtagaagtgaaaaaaataccataagaacctttaacagcttacattagtaagttcatgactgaagcaacaaagtgaaggggctgactgaagaaggaaggttggccgcaatactgggaggtatcaaacctgtaatgccctaagattaagaaaatagagtagcaaatcctaactaatcaaatgtgtattattatggaattatattaatatataatttataaaaagtgaattaatttgatatatgacatgttaagacgtagttggtgagctaggggcatttttgtaattttgacccgagaagggtaaaactatgaatttaatttaattgtgtgattattgactatattattatatagtatgcatgttttgtcctttttcaggtgtgttttgacaagtcggcgcggtatagtcacaactgggtatttcgagccgaatcgggttcgaggccgaaatacaattttgggataatttattggcattttatttatgagtgattaacctgaaaattatttgaatatgcgatatgtgaagttaaatgaaataattgcccttgaaagtttgtgtatgtgagatatggccctaagggcattttggtaattttgcatatcttaattatttacaacaaaagataatttagaatgaaattaaaggatattttctggttctttctccccgaaaccgaccccctctctctgtataatctttgtttcaattattgaatttgtgaggagttgcttggtttcaagcttggatttggtggcttttgtgctagagtttaaaaaagatttgaggtagctcttcttactgagttctatttgaaattaattttgagattttgatgattgaaaagcatgaaaatgtgttgtgttgctcttgaatgcatgtggatagaattggtgttaattttgatgtgtttggcttgattgtatggcctagaagtggaatgtgtttttgatgatttatagatgagattttaaggtgtttttcatgtgtgaatcaaaattttaccttatgttttgctgctgaaatttgaggttgaaagcatgcttgaatttcaagttcttaagtatgggtttttggtgagttatgctcaagtattgagctttactttgaatgttgattaaatctgaatttaaggtgtttgtatgctgaattttgagccttaatgtatgtttcaactctctgtatatttattgacaactgtaatttatggtttgagagtttgattaggttttgggcttgaattggtgtgtttatgcatgtaaattcgaagctgaaattttctgggttgaacccaagggccgcggcccagctccttgggcgtcgcggccagtcccttgtttttggacagattcgaatgcaattttcgaatactcataactttgtgatccagactccatttctagagttctatatatggttggaaagctcgtttcgagctctatgtgaatatatgtgatttgaatgccaattttatattatgtgaaagttgannnnnngattaaccctatacttgtaaatcctaaaatttgtgactaggattaccgacacttggtcaggagcaccagggaatttagaatctctacgtttgcgggacatcaggtaagatagtagtttgtatgtagagttaagcacagtggcac

SEQ ID NO: 27417 - DNA, 1764 bp, Cannabis sativa
atgttatgtgttaggtgcaaatccccctttatctgtattggatggctttgttcgaagggtttggaaaggagcaatagacaaagttggaatgctagcctatggtgtgtttttggttcgtttcgattcaattaagacaagagacagaatactaaatggaggctatgtgtttttcaacaaacgacctgtgataatgaaggcatgggaccctaataccaatttcaagaaggaagatatcacaatagtgcccatttggattcaggttaaagagctagaactaaaatattgggggtgaaaaatcattgtttaaaatagttggtcaattggggacccctctacaagttgatgaagcaactaaagaaaggaacaaattatcctttccaagagtgcttattgaagtttctatccatcaagactttcctgaacaaatttcttttgaagatgagtatggttcaaatgttcttctctcaattacatatgaatggaaaccattaatatgcaaacattgtaaagggctgggccacttgacagaagaatgcagaaaaaaggaagaaaaaaaccagcaatgggttgtgtaatatcccagaaaatatagtgatattttaattggacatattttttgaatatgtgattaagtggatattacagtaggataataatcctacttaaactaattatgagttgattagggaaatataaataaataaagtgtaacttattaattacggaagttatgttggaatatgtgggtatcgtagataccataattcgaataaaatatttttgggcctagcaattggggaacttgacggggagattggaaatgttacgacaataaaagatgaattgaattggattttataccggactagtttagagatttgggttgtcagtttggcggattaactagaattacttaaatgctcttaagatttttaatggttttttattagaaaagggcaatatggtattttcttatgctaatttattttgtcctttagtgtaaattaggttgggttctatttgattatattaggtaaaatgctgaaaaaattttagagtaataagttaggttataaattaagaaatcacaaggcttcatctccctctccctcttttcctcgagcattttgaaccagcaaaacctagggggaaattcttcacctttcaccttgaatttgagcagagtttgtacccaagttcaacctaggagcattggaggtaagttctttacttttgagattgagaattttcaagtttcaagttgattttgggttagggacttgggatttcgtggctatagaattaactagttagacggtgtgtttttagacctgttttgaagtgtgttgaagtttgtattgagtgatttctgctgttttttagtttggattgagttaaatgaaatgaaatgagtttttttcacttgagtatgtgatttttgaattaagagttaagattttgtaattgatgcttgggatgcattatattgatggtgttgtattgttttggagcttttgggttgctttggtggtgtttagattgattttggaggaagaaaattcaaaatttgcagccctgccagaatgggtcgaccgattggttctggtgtaacagaaccggtcgaccggtttgcttcagggggaaattttcagtttttcctcagggcatgttttagggctcggggtgattttcgtgtctaatatagattgtttagaagttataaaacctattttggagctaatggaagatagggtttaccgatta

SEQ ID NO: 27418 - DNA, 2484 bp, Cannabis sativa
gagttggtcggctaagaaacaacatgttgtagcaagatcaagtactgaaagtgagtttagagcattggctaatgctacagctgagctcaagtggattcgatctctgttacacgaacttcaggtgtctatagttcagattccagttatatgggtggataatcaaagtgccactgccttggtagccaaccctgtttttcacgcacgctctaaacacatagagatcgatcttcattttgtcagggaccaaattttagacaaacacatttcagttcgttatgttccttccttggatcaagcagctgatgttctgaccaaggctttgtcaacagaaagatttctatacttaaaatccaaactaaaaatggtgtcaacaccatttactttgaggggggatgtcagtatagttgagtgagttagttagttgttctaactaactttgtaacagttttcttagtctgttaattcttgtttttatttctgttgttttcttacacttgtatataaatacagtcagtaataacaagagaactcaagttctgggtttactcattttgatacactctgttctctctctctctctctctctctctctcgttttgttactctgtttctttaaagtttcatactctgaaactctacagatagagagagtggtaatgaaaaaaaatggatttgcatttgtattgtagcgatactatcgcgtccatacattgagaaacacgtatttttattatgtatttatgtatgtagtatacatttataccatgactgtgaaactgaactttgatttttggtatcatatcatattaattttaaattggagagttaccgtggaaattaagaagcctagaattttgaaggttttaatatattaaaaggtaacataaagaaaagtagtttgcatgtgtttggcttggcttgccaaaaggaagagaatagctacagttccagggagtgcactgctctgctctgtgtcacggtcacgggctcaccttctcagacaagtggtcttggcttacactctgctctccaaagtgcaatgcattgcttttctacaactgcctaagttaccacacaagagtaatagtttcacccaattttaaatgcaatctatccattaatgctaattctcttacaagaccttttttttttgagaaagaatccctttaccactttaaaacgttgtttctttctttcttgtgtacatatattaagtatgaggttatgttccttatttcagccaaatccaaacccttttgtgtacgtatacagaaaaagagaagagattaaaatacagtatcataatattaacgagttgaacttctgaaatcagatcatttgagtttgtatagtcctttatgaatagttgaactcttttcttttcttttctttttaatttccttcatatatgaaaaagggatagtgacacaaattttaggggttgtttagtacatcgtactgtaatgtattgtattgtatgatattgtgttgaattgtattatattagtattatttaatacaatattatgttcggtattaacttcaattaacgagttgtttaaatcatactatatttaccataaacatgaccccaaccctaaccccgaacctagatcccatccccaaaccctgaccctagttaagggttggggtccaaatctaagttcaggttcaagtgctagtctgggtctgggatccaaggtccagatccaagtttgggttccgaggtcagatacgaggttgaatccagggccggtagcaaggtcgaggtccaagtatggggttaggtctctagtttgagtttaaggtgggtctagagtccgggtctaggtcggggtccgaatatagggtcgggtctcaggtctaatgaacacccctaaagcataacattttagaatgtaataattttatgttggagaaatatagagaatacactatacgatagtttataatttttttttagttaattttgttattagtttttaagttcttatattattaaagtgggttataaaatttagtatatttagttaagtatttatttttatactttttctcaatattataatacacattattatgattttttgcttctttagataatttattttatctttaatatcatgtatttttttttaacaaaaaagatacttttattcaaaattactaacaaaatacaaacacaaacaaagggcagcaagaaacaaccctaccacagcaaccacctaccaactattcagaacattaagaaggtaattgtcaaatatgcttttcctgctcctactaacatccaacactctaaccttgtctgcttttttaatattaacactcacagccttagttgttttacataggggtgcacacgggtcgggtttttgggtggttgggttcggattttcgggctttgggtcttggaaatgcacaaccgaacctcgtttttgggtatcgggtcaggctttttcgggttgggcgtagtcgggttcg

SEQ ID NO: 27419 - DNA, 2159 bp, Cannabis sativa
ttacatcccatattttatttttgtcaatgttacatttattttgtataccgctataaataatatttatactgaatttttttaaaaaatttcttttacattgacttgccacttctagcacggttttttattttttttctttatcataatgatcacacgttaccatcatttggtatttcttcatttcatttttcttatattttttcatcatcaccttcattcttaaactcttcatctctccccctgttcattttcttcttcgtgttcttttttattttctttttaattttttttgtgtttacaaatctatacagttgtttggactttagctctaaagaagttcttgatgagagagagagaggtagaaagcttaatctttatttattaatcccaccttatatctcatacttaatttttatttatttaaaaatttacttttttttattgatatacatatactagaagaaagctacgtgcgaaacacgtataattagttttatgttagatactttctactttatttaaaaataatacaatagataattgaagaaaaaatattattagttattgttgaaattatttttgatatatattcaattaatgtaaataatggtgttgcaaattaaaaataaatattgaatgcaatattatacagtgtatatcacaccattatcaattaagacttgcctttttgaaaagattaataaaattgtattgaaatattgatgcaggctctcacacatagaccatgttccataatgggataaaatagataaggacagttcttccattctctatccattcatatgtataacaaaaattgggagaaggaaacaaaatccttattctttgtttactctttctcaatcatttttagttacgattattttcattacaattaataaatattaaacgtaccaacatacaagggatataataataattttgaacaagataagttgtaaaaccataaaatgactaaaattaagccacgtctcaaaaacccaattctaatactacaatcacattaaaatccacctgcaattgaaaaaaaaaagcattgccaattcagaaatgaatttacacaaaagcttaaaaataataattaaatgcaaattaacacttgtttagagcttaatcccctaattcattgcttcaaacaaatagatatgtcatatgcctccatttagaaagaaaaaaataaaaaaatctgtaataatattcaactaaattacttgatcatacaaaagtgaattttagtcgcggccttatttataacttggtaagaaattatgatcatttgaaaaggaaaaaagacgaacaatacatacaccataatttcatgccttaacacagcgtaaactacaatgaatctgaatcagaaatcaacgccattaaaagttacagatagtgaactcaaggagagagagaaaatgagacttgtgtgtaaaaatatgaatcagaagagaaaatgaagcaaagttcatcttcttcccgcctgtttaatttcaatgtacaaaaatagaaacggaaaaggaaatgttaattgggcctgttgattttagataactaatctgttggtaagcaagtcagttatttaattaaaattaatgattagaagagaactgagaataagttcccataataatgaaattcgttagattcatctcagaaaaaggaaatgttaatgaaattcatgttgaaataagagagctaggaagtataaacagacttacactaataaagatcttaacttgatcttataagaaaaggaagccctgaaatcgaatcaagtacagatctcgtgcagattttcatagcctgaaatcatatctatccaacgtcgtaagatcgctgattcgatatgaaacaacaaccaaaatgtagatcgaaacgaaatctgatcgaattagatgaaagaaagcaacaaaaaccagtcatgcataccaaatctgagatttgaagagaaagaaagcaaagagaagatatatatataccagatctaacgaatggaatcacaattttatctcttttattaagaaatcgaaatcgcaattttcattctcatcaacaaacttaacatttcaggagaattagtttcatcatcgttacaattttcggggaaatagcttacaatcgtaaagtttttttttttttttttt

SEQ ID NO: 27420 - DNA, 1770 bp, Cannabis sativa
atctcggagttgagtagtcccgagtcatagcagtcgacttgggagggggtccttagccctgcgcccaggttgactccgggaactctggaatgggtgttaggatttcgataagtcatttccaactcactatctttcagtatactaagccatgaagacatggagcaaccaagtccaggcctcgggagctgaaaatacatgaaccagcacctcataaatcaacttgggcacctatggtttcacccaatgcccaagttgacaaccccaactaggatttcaatttctgaggccgtcttagtgtgaatggttcaaactttgcattgggacatgaactaaatataccacgaacctacttgaggtatcagaattagatttgaaaaactttcatttttaagcaccagggcacccgagtgcccaggttaacaatttgtcaatctaggccacttccaagcatcagatcaaaaatcctactcatgcatcttctttgtcttcatcaaaaatagggaaacaagtactttcgagaaagagacaacccatcttgcgtgccaaaacaagggaccaacgcccaggttgccattttgtcaacctgggccaattccaaggagttttcagaaaattatttcaggcatattctctatttttagcaaagattaagattcaactatttcgagggatcaaacagaacttctatgtggcccgaaattagacccagcgctcacgttgacacttaaaaatgggtccagcgcctaggttgacatattgtcaacttgggctatttccagtcagtttttctaaaaaagtattttgggaatctttcccatcatcagaaataataaagatacaagtaaacttggggagaaaaatacaatcctaagggcatcaaaattgagcccagcgcccaggttgacaatcaacctggtatgctggtttcgatcactcaattgacaactctactcaaagcattctctctaaaatggtcaaaaacaaggtaggagacctcatcctcaagttcaagaaccttgtaagtggcaaaatgacatcccgaaagctccaaaataagcacccaacacattgataaaatggcatggtgtgctgggttctgcttatctaattctgatttctgcctcgaccgttcatctagattttcataataattgaaagctgtgaagtcaaaatagtcaaattcacaacttcgtatttttacttttccgacaaggtgatttactcaaaaatcaaatagtttcagtctcccaattctgcagaacaacaacatctctgagaactagtgactagcttcgtcagaacacttgatgtcaaaatatcacgtaggcataaaaaaatacatccccgacacgtttttccactcaccaacatccaggcttacatcacatgtcaacttgtgcacttggcccagaaaagcctttagtaaaatggtcataactcactcaatattgatctgattagcctgattcaacttgcattttgaatctatttcaatgatctatcaagtcatgtctcacacttcaattataattctgaagttatcgacttcaaattttaccccaagggagttagaatttaagttgcaacttacttggagcgggtcccgccaaggcaactcaaactccaaaaattgacaaccaacctcagaagttaatttttaccgttagatcatcatgtacggtaaaaaatatcataaatatattttttttcatattttgattatttcattcccatttaataggacctcctccacctataaaaggagagctc

SEQ ID NO: 27421 - DNA, 1864 bp, Cannabis sativa
gaattgcccctttcattataaataggcgcatattttctttggtttctctttttaccatctttgagcttttcaaattcctttgctttcaaactccgaaatagagcttttttctcagagcccaaactaaaaaattccaaactttcctcccatattcttattggtaaatgaatgatagcttcgattatctcataaattgccttctacaaattcaaacacattgtttcccaaacttaccgacccttgatcttaacacaacctacccctagtaaaataaaggggttcgatgttcaatcgggttttgactgagtcatcaactgggtgctaggtttccaagtcacttccaaccactattcctcttcttcaaattgcatcacaagtatgttttccaaaacttgttaacatttctgattctatgctaggataaaagttgtttattcaagctatgttctgaatctatttttctaccattagagcatcaccaatacacctcatcttgaggatgtatttatcgataggagtggatcctttctttgttgattgaagcatgcctcggagttgcagaactcttgcacaagaagtgtttgagaaaagttaaagcacaatattctaaaattctgtagatgaagcacatctcgggacatgacccatcatgcaccttcagagatcgagttaaatagccaggtcagaagaaattgatctaagcgcagcaattcagctagctctgggttgggaatggttcttaattcatcagtcgaatcattgatggtgggaggaggtcttgtgcgtgatctaatgagaaaacctttcagctgatgtgcacgaattgtggagagaacttgagatctccagtagaagaagttgtttcaatctaatcacagagtaagagacacaatgtgatttggaataacttgaatcgtaggagctagagaagcttgcatggtggcagacgatgatccttcaagtctatgactagaagcagaagaagatgccatggaagaaagcttaagaagaagattcatacaaagaaaggagaaaaaaataagcctagaagctctgatatcaagttgagaataagataagaaaatgagcttgtaactacaaagacataatttatacagataaagcgtacaaacacttataacaaaattattttataagaggacagctctgaaagaataataactcttcctaaacacacaacaaactaagagaaaagaataactaatttaagcttagatatataaataaaaaaaattataaattagaagaagagaaattaaatgaatgtcatcatatatatatatacacacaaatataatatctaaatataaatttgttgtccagtttaaacttaaagcatgaacttaatacgaatattagtgtaataagaagtttatttcttttcgttactataatttatttataatattttatgattgggatattttgatttgaatgatatataaagaccctcttcacactagtttatttcttattattataaaaatgtggtgtttgtgtgataattttaatgacaataatgtccttatattttatatgctatcactcatatatttatacccttatatctttttttatgtacaattgtcaatatgattggtcagtcaactatcatttactttttttttttatatatatttagctgaaattacttttatatcttattttttccacttatttctttttataaaaataaaaaaataatataatattatgcatagtattaattagtgttagttatatctcatatagtgcttttttattttattttacttttatattttttatcacatgtaattaattattctctaattaccacaattattaattattttcgtcattt

SEQ ID NO: 27422 - DNA, 2787 bp, Cannabis sativa
  modified_base (477)..(477): a, c, t, g, unknown or other
tttctaaatattggggtccaaaataattaaattcataaataataataaaataatagaaattagtgctaattgccttttctaatccaatttactaatgcggtcgctacagccttgacccagccaaaagtatggtcgacgaggacgtcaagccccgtaaaggggtgattatgacagttagtagtcctgtgatccataagggaaaatatcgggtaagttgtgtaatcccacatggcctggagaaggtcaagtggaatgattttgagactatgtaggcatgacactacacagttgaagaaagtttaaatggattgattgctactacctatatcaacaagatgcatcttcttttttagtagcccatcatgaaagaactctatagttaaacgtgcttcacctcagttagtagtcccgtgatccgtaagggaaaatattgagtaagttgtgtaattccacatggcctggagaaggtcaagtggnatgattctgagactgtgtaggcataagactacacagttgaagaaagtttaaatggattcactgttactacctatatcaacaagatgcatcttcttttttagtaacccatcatgaaagaactccataactaattagcgtgcttcacctagctcttgggaagttttcccaaaaggcgtgcgaatgaggacaaagtacgttgaagatactcgtgttggtttatagggttagtctttattctaggaagcagctagggtaacgtatataagagcatcatttttgtaggtgtaagggcccaatagaagcttgaagtatggacattacaggatttcggttgtgtttacaatttggtagagtatttatacgttgcctcccctcaccctttgagtgaatacatatttatgggaatatgatggtgcttactcaatgctatcttaatgtgaagttacaagtagtgggtggttaatacccatgtttcacgtacaattgaatatttagataaaaataaataactatcttatatttaaaatacaaatatccttgtattacgactaactacaagatacttatattacgaccatctacaagatccttgtattacgatcgggtacaagatctttgtattacgaccaactacaaaatctttgtattacgaccagctacaggatctttgtattacaatcaactacaagatctttgtattacgaccagctacaagatcaaaatctttgtattacgaccagctacaagatccttattgcgagatgttgaatatttgttgaaagaacatcccgaggacagtagtaatatctaagtcgtcaaactaagtggccatacctacccaattacaatggtctgaatttgcgtcctacatcagcagccgaaaaagaggtgttagtgtgtctttaattcttcatcacaaaacaaacaattagcctcagttataataccgaacacgctaacctggtgaattgttgctttgtgatacacaatctatctcaaatgaaattattagtacttaatatatgaaattaacttgcccttaatagtacttagtagtaacttattagttctaatttatctataatcaaaaagtcaatatttttatgtataattattataataattatgtataaattattgttaactgtatatataattcccgaggtgtacatatgaaacatgagattaaactttttcttgacattttttctttattgaggcaaacatgtacatgtgacattgttaagtttaaagagaacataatatgataactaatcactaatattttgtcttgtattcctaaaattggcccccctaaactcactttattgtcctttaattaaatccttaaggcaaagcatgttttttcctataaagaaaaaaaatatgtcatatatatataaattaaaaaaaaatccatagctaatttgtattatatgaaaattttgaaaaatgacataataattaatcatttataagtatgatttgaatttggccattcaatcatcataagtaggacccctcttttctttaattaattctatatatatttattgcaacccattaattcaacactacttggattattattattggataatatatgcttattagttaaaagtttccattagtattaattgattattcatttttaatatgtaaaatcatcaaattaaccccaaaaagtgatctattataatattaatttaaaaattaaagaaaaaaaaaaaaaaaaaaacatatgatcaacaaagctataatctttgcaattggatttaattccctactttttagtagaaaaataatattatggaaaaaaagtatttgcatgcaagcaaaaactttttattaatttttgttaaaaaaaaataaaaaaactttttattaataatgccgttgacttcatatctctcaacggttatgattaagcgtgtgttgtgtcaaggagacaaaattataacctcttttgctaaataaagatcattttttttaagtgatgacatatatatatacataaagattaattttttaaaaaaaaaaataaagaaaatatatagggaaattttataaagtttgcatctttgtaatgaataagtttgtgggtctctttataaccctctacttctgacacatacccacccacaaaaaaaaaaaaataaataaataaataaataaagccaaaaaagaaaaagaaaaaaaaccttataattaacattgttgactaacaaatgaacaacaatatgaatatgttgtaagaaattaaagtaaaacaactcacacaatcattgataattacatgtaactttttta

SEQ ID NO: 27423 - DNA, 2836 bp, Cannabis sativa
aaataaaaaagtatataaataaacgtatttataccgagctcggagagagagagagagaggaggtggtgggtggttggaggtgatccgagagagtgagaatttgagagagagagagtgtgagttgagcaaaaaagaattaaatgaatctgctgtgaaaattttggggttttatatcaagggttcgaatccccaataattttaaccgtcgcctataatctaccgttggggatgctattttaaaattttaatgttttaatttagtagcaattttaaactgtcgcccatattcaacaactatttaaaatcgataggaattcttaactatagacgtcggttaaacactcactaaattttattggcagcggtccttgaaaaaaaaaaatctaatccataagaatagcgctttttgtagtagtgatatatattttatttatttttttaaaaaaaattactataatacaatgcaatattattgtgcaccaaacatagtataatttaactcaatttattaatatattttaatactaaacataatattgtataaaataatattgtacaatgcaatactatacaatacagtgtactaaacacacccttcattaatattttagtattttattggaaatgctctcatttattctaaataaatagaataagaaagtcatttggagtgctctcctaatcaagagtaaaaaagttcgaaaactagggttacaaccaaaataaaagagattcattccataaaaactttgagatctaacgtgagaataaaagagagtaaaaggtcatatagttatatatatatatatatatatgcattttatattttttttttaagaaaaagagttacatatgatatctttttagattattattgttgaaatgaaggtgatggatgaaagcatgcaaaagagaaaaaagaaaggtaggaaggcacgtgggatcgaagctctctttctctatataacccattttaaaaaaaaaaatgataggtaggtgggaaggcttctctctttcacttgaaatgacgttcttcctttcataattcaagtgctttagaccttgtttgctaacataataatattattaagaaaattgaggctaaaaaactaagtgagttgagaaaagttgtaagattggatacatatgatctttactcttgagttattcctacttttaaagaagtgagctctattggccatggaagtagagagagatgagcaagaaatgggaaaattggttgaatgaggaagaatatgggttgcgaataagttatattcgcaatcctataacgacaatatagtcgtgataatattattttacgccataatattgtcgttgcataaaatattatcccccatgaagcaaaactatcgtcactaaatttttacgataatattgaattaaaggatattatcatatttgtatctaaactctctctactcaagggttaataagaggagaaaaattaaagtttcacgtttctaaatctataactattggaggttgtctttttctctggtcaggcccgttggctttccttgggcttaggtgtggcttggtcgggattgtattttgcaactgcaatttgatctttcatattgcgattagtcttgtttctatgacatggttttgagtgttttagtatcgtctgatatagttttgagcgtttttgtcttgtttttgtaacaaagttttgagtgttttagtcttgtctatgtgacatagttttgtttgttttttttattattggttcttctttgttctttgatggctcatcatcaactcattgttagtgaatgagaataacaagttctttccaactaaaggggttattagtagtgaagttatgtactttacacaatagttcagtgctcaagctacgaggttgaataatgaacctcctacaacaatttctattgttgtgtcttctaagcgatggatgaaacagaaaataggtgttcttaaggttaattgtgatgctgcaatatttttcatctaattttattttaatttttttgtcaaataatttaagaattaggcggttgattatttgactcacttttctaattctatatctggtcgtgtctccaacgaggagatatcttgattagattacatgctattattttagttgattgtcattaataaaattcattaaaaaaaaaaaactatcatcactatatatggatacgcaatgacaacattttcattgaagtttaagttgaaaaaataaaataaaaatgagaaaattaacaagatttttgttttattaattgaatcattagaaaaatatttgtttaattcatctataactagctataacagtcttgttgctataggttgttaaaatcaaaatcttaaaacatcttttgagttttgttaaattttggatgtaaaattatccaaaattttaactttctatagtgatgacatgtcgtcactaacaacttatttggaaaaaatttaaacaaaaataatatattttaaaaaaatattttggtactatgtataatctccaaaaatcttggacacctataatgacacatatatgttttaaaatttatttatttaatttatcatctttcacaagaatctcatcactcgaatatgtgtccctctcttgttggtaattttgatcatgaacaccctttctgcattcatctattccccatattcttattctcttctgaaactcaaaccttttggcagctattatatttatttatttctttcttcattaatttgtaatgaaaattattattccattattattttggatcatataggactagtatatatataagatggtgcctcctattattattattattat

SEQ ID NO: 27424 - DNA, 3702 bp, Cannabis sativa
taacatcatgaatatcacccataattatccaagtatacagaacgaatagttttgattgttacaatgagaaacaaaacattcatggattgatttggggatgagttggtgaagcactatatcttcacataatccaacactgcatacgtatgggcttacaacacaaacacttcttagttactcgaagctagctatttatacaaacatgactgagaaaaaaaaaaagaaaactagaatttcaatggccacacaaaataaacaacttcactttgtcctgtttcctctaatggcacaaggccacatgattccgatggtcgacatagcaagaatgttagcaaaacgtggtgccaagatcaccatagtcactacaccaggaaatgcagcacgttttgaaaatgttcttgatcgagccattgaaattgggcttagtatccatctaatcaaagttaattttccttcaaaagaagcgggattacccgaaggatgtgagaatttcgacatgatgccttctctacattgtgcctctaaactcttacacgcagcctcaatgatgcaacagccagttgaggaaaaatttaaagaacttaagctgaggccaagttgcataattgctgacatgtctttgacatggactgctagtatagctagaaagttcaatattccaaagatatctttccatggtggatgttgcttctgcattttgtgtgtgcataatatacgtagttctaaggttcttgacaaaataacttctgaaacagaacgatttgttgtcccttacctggccgaacggattgaaatgaccaaagctcaggtacattttgcatcagtaaattcagaactaaaggaggtgcatgacagaattatggatgctgacaaaaagtcttatggaacaattataaatagttttgaagagttggagcctgcatttgtcaaggactacaagaatgtgaaaaatggtaaagtttggtgtattggtcctgtttcctcatgcaacaacaatgaattggacaaggctcaaagaggtaaaaagtcttctgttgatgaacatgatcagtttctcaagtggcttgatttgtggaaaccagtctctgtagtctatgcttgcctaggaagcttatgcaatttacaacttccacatttaatagaacttgggctaggattggaagcttcaaacaaaccatttatttgggtcattagaggtgggactagtatttcagaagaagtagagaaatggataaaggaagatggatttgaagaaaggactaagggaagaggcttggtcatccggggttgggctccacaagtaataatattatctcacccttctgttggagtgttcttaactcattgtggatggaattcaactcttgaaggaatatctgcaggggttcccttggttacctggccattgtttgctgaccagtttcttaatgagaaactggttgtaaaagttttgaagatagctgtaactttggggttggaagagccaatgaaatggggagaggaggagaaagttggggtgaaggttaagagggaaactcttaagagtgttttagaggaagtgttgaatgaagaagaagaaaacaaggagagaagggaaagagctagaaagcttggggagatggcaaagagagttgttgatgaaggtggatcttcacacctcaatatgacattgtttttagatgatattgcacaacaagaaggcagtaatcagctgcaagagtaagagagtaagaaaagagttagaaagcttggggggatgaactaaagatatagcatttgaagacattttgcaacataccagtcagtagtattaatcaacaaacaacaataagaggaggaaaatatgaggagatcaatcatcactgccaaatttaagataacataagaagtgaatcaaaatgccttgtataaatattgtattacatattatatctaactaatattttattgaatctagtatcttctctttataatggtcttggttctcttttagataatacttccactttgctgtctaattttggtgaggcatccctaattcgtgtatgttggtcagccaataaaacagcttatgaattagttgtgcacgcacttagggtaaataatgagtttgaatagagattttatcatcttatctttacaatgtactaaactttattgcttttcaatgaaatttcgttcactgttaaaaaaaactaatataattatgatacatggtttaatttatttttgtaaagtttgttacacaccaaaactaacggggcaacatataagaaatcgttaatatcaatatgttattaacttttttagggggctatttacaaaactatttgaaaaaaaaaatagaaaatttacataaatatgacattaaatttaatgccactgatattttttaaccaaataaactaaatatatgggtatataaataaaaaatgccataaaattatcaaaaaaaaaaaagaattttcttttctagtccacacttggtaatagcattgatttttttaaagagaaattgcaactttgtttgagaataagcttaacccattacaatagataaaagatcaacaggagcattactcttattgaaaatacgatctgcatacaaacaaaagctatgagctagacaatgcgaagctttatttacagattgtttagcaaaacataattggctaaaagtaatgaggggaacagtgacctacaatcaagcacaatttgaccaaacggagaaggtatatcgaaagactccagactacctgaacgacaaccatggaatcagtttctatttaatttctaatttctaagtttatatcgactgatcttttctattatttatcgaattttgatatgctctaaattttgatgaaggtgatttttcatgtataaataaatgtaaatttatagatactagaattttattgattttattgtcgttagctccacagtcttgaagaagtaaaaacccacaactgaaaaaatttcactatacacactctattatggtaaactttgatcattatgtgttaagaaaaggcaaaaattaaactttgtgttcactcaagcaaaggtatctttgtttctttcatcttattttttgtgtgtaatgatggcatttatttttttcataattattttaggatttttttattttggttatttgttgtgatctcatatcagaaatggtgttacattacataaatcttttagtttgggtttcttgtcaagctctagctgattagaatcagtaaaaaatgaatacaaaatcaaaaataaaactcaaataatataacaaccatgacaacaaacatatacttaatcaagttaaaaaataaaatcagtttctagactctttgtgtaatgccctataatccttaggaacgtcacgtgtatgtgtttataaactattttataataataaactagacgtttatataaactgtgattaataaaaattttaccaactaatttaaatcataaaatctatgacatagtccctttttacgattggggatcccctatctaaattattataagacatgccattataatattattacaaaatacatttaaaagttcagaacatttgaaatacagttcctgacaactcgacaccacttgccgaataagctgaaatgtacattttctcgaaaaagattcctgactcatggttgtctaaacatctctacctattacctgcaccac

SEQ ID NO: 27425 - DNA, 2246 bp, Cannabis sativa
acggttcctgatgcaaataactctatttaatatttataatattttcacaaaaaaaaattatttttataataaacttattttaatctcttatgagtactgtagtacatgcctttactagcatatataagtataaatatatatatatcgaccaaattaattaaaatgatcgaacatataccatatattattcaagagaaatgctaaagggcatcagtagtgcctagcaccctcttatatgtcaatatcgctattagttcaactaagtatcgggtcccacataatttaatataatagcttttagggggtatcgctaactaatcgcaacgcaacatgtcgagaagtgctaagcactactggtgcctaatagcaatgctcattattcaactaactacatgcattaattgtagtttagagaaaataattaagaatttttgcattaattgtagttaattggtcaagagaatgattgttcatattacgcgcgaatgtaattaagcttcagaatatgtatattatattgattgatagaaacaacaaggaaaaagaccataacaacaaatatataacacatatataatacaaaagtccaaataataagaggtgctctaagtcaaagtcatcgacgtcgtagataagtttgaggctttgagtgagttattgtcaatatttactatacgtagtaatgaccaaactttagttctagggaatattacaattaagagcacacattattcttgtacgtattcttaatttaaaatgaacaaagtcactcctaacttctttatcgtacgtgcaagtccaaagtcaataaaaccagcgtgccctagctaattaaggatgcttataagtacaaaaataataacacgtctatgcataatattaattcagtcttaacatctattaaattattccacttgttatatcagtgggtttttcatttgtaatgtcgaccgaataattcgttgaagttcggtatatttgaaagagatcgctgacagtgatacccgtctttaaaataaaatcacaatgttatagctctagcttccaaactattatgttgctatattgccccaatttttctctttatttggtaattgatttaattttatatataacacacacaaaattaaacgctagctagtgctttgactcgaaatgatattattgtaatttgatgatcaaattaattatatatataaaagtagtttcagcatcaattaaatcttaattagagactaattcattgaacccaaagaaccagaaaaataattatcttatctatttttccttataacattgtaaaatttcgttaacgcgtgcgtatagcatgtgaattaatgtatatgtaaagtcattattattgatagataagatgcatcacaatcgagtaaattcaactcgttaaacaaaattttcaaagaaatatatgaaacagcaattgagatgtatgtttttgtacttctctacctagccaatggactaatttcggtagacacgtctaaagaggaattagtcagtcggccatggttatttcgagcaagctccattgccaaacattctttaagtccattcacgacctcactcatgtttggcctttttcttggtgttggagatacacaagccattcctatttcaacagctttccatgcagagttattatcaaagcctccctgcagccttggatcaacaatacttgtaattgcaccgttatcgattgtagagctaacccatcggcttatgtgaatcctttcatcatcagtactctcatttattttaattatggccggttgatttgtgattatctctaacaaaacaaccccataactataaatgtcactcgtctcatttaatctatttgttatgtgatacctaaaaaaaaattaagattcttgttcagtgtatagtttttaaacatatatatcatctttcttttcttcaactgaatatatatatatataaaataaaaacttacgcaggatcaaggtatccaggagtaccagcaacaactgtagaaacatgagtgcctgtatcagtggggaaaacccttgagagaccaaaatcagcaagtttcgcttgaaaattctcagtcaacaagatatttgttgtcttcacatctcgatggactataggtggcttacaaccaaagtgcatgtactccaaccctacattttttaaaatttactgtcaatcacacacagaaaaaaaaagatattttttaattaaggtggaaattaaaaaaaaaaaaa

SEQ ID NO: 27426 - DNA, 3146 bp, Cannabis sativa
gaaaaaatggctgaactaattgctgctgatgtagccatatttctcttagagaagcttggtaccactgcttacaaacaaatatgcttggctagaggcttgaaaggcaatatagaaaagcttagagaagacattcgtaagatcgaaggcttcctcatagatgccatagagaatcaagtgaagaaggatgatgtaattgactggctcacacggcttaaaaatgtgtttcttgatgctgaggatgtattagatgaattcgaatgtgaaaaacagcgaagaaaatttgtggaagagcatggcagtcctagtagaaaggtacggcgttttgtttcgcgctctaatcctcttttcttcagtctttaccttggtcatagtattgagtacataaccaagagtttagataaactttatgctgatcgtcaaaagttgggtcttaatgaaaaagtagaaggaatatatagaagtgtgaaggagtggaaagatgctggctcgtttgttgtttcttcgaaagttattggtagagatgatgaacagagaaagatagttgattgtttgattgatcatgttcatgttcatgatcacaaactttctgttattcatatttatggaatgccaggcatagggaagactgcacttgccaagcttgtttctcaagacgaaagagtgaatcgttattttcagcttaagatttgggtgtcagtttccaaagaattggaggttcacaaactccttgaaatgatgctcgattacgtcacgaagaaaaagaacaagaattcagcgaaagatcatttgattgctgaacttcaagggtatataaagcagaagagatttttgttgattctggacaatgtttgggatgaggatgaggaaaaatgggaggagttgagtggttatttaagaggaggttgtaaaggaagtaaaattgttataaccacacgtaatgaacaactcaggattcggtgtatgaaaccagatttttctcacaaagtggaaggcctttcgccggaatattctttgtccttgtttcttcaacatgcatgtgttgagggagtacgagacataaatcttcgacagaggcttatcgaaattggtaaggaaattgtactcaaccagtgtgaaggggttcctctagtactggaaaatttagggaacctattgtactcagattcgaatgagcaaagttggaatcgaattaaagaaagtaagatatgggaattacaaggtctcatgactaaagtttctgctacacttcttctaagttatcatgatttgtcattcgacttaaagaggtgttttctttgttgttcacttttcgaaaggaggaaggaaatttgtagtttggaactgattcagctttggatggcacatggagttcttccaattgatgaaagcaaatgtttagaagatattggacatgaagtttttaataagcttcgtttgaaatctttcttcaaaaatgtaatcaaccatggatggtattatacattccatatggatgatgtcatccatcagtttgcattatctgttgcgaaaaatgagtacctcatgctgaaaacatctgttgatgaatcagaagttccaaacacacttcgacatctagcaatcaggccagatggaattccaaccgatcgagaacttgacaacgatgatgatgatgatagctgccatggagttgaagttcccttcaccaagatgaaaagtgttcgaaccattattttcccaggactatcatcgaaaccttcaatcaatttcttcttcaacaaacagctgatcaagaattatgtcaacctccgaatgttagacctgagtaaatcatcttttgaaacgttgcctagttacatcggtggaatgaagcgtttaaggagcctcaacctgtcatggaattgtaaactcaccaaacttcctgattccatctgcaagctgcaaagtctgcaatctttacagcttcaagggtgtaccgagcttgaaggtcttccaaagaacattaagaatctaagggaaaatctcatatttctttcaataactaccaaagaagaactctttgatcatgacaatggaatccaatacttgacttctcttcgaacactaatgattgatgagtgccacaagctgcagttgttatccgataaagtaatagaatcccttacagcattgaagactcttgtgattagtaactgcgagaagcttttgttttatgaaaaaccaaagatcagtcctaccataagacttcaaagactgaaactctccaacttaccaaaagcaaagatttttccttcatggattgaaggatgtaaacagagtttacaatacttgtggctctctggctgttctaacttatcaataacagaattgcagctacagtggctatcaaagagaaagtcttttatggaaattcagatcacagactgcccacagcttctgtcattattacctgatgaaatgcatggtgacgacattgttgtaagaatatttggtacttcgactgaggatcaaaaggctatgaattgtcaatttcgtcaacagattgagcagcagcagatcatggttaggtaaccccaaataatttttctttcatatataaaatattatttcctgtaaccacatttatatacagtcatgtaatatgtttattcttatttcctgcttatcagcgagaagtcattagaagaaactagtacagattctggactgagtgaaaaaatttggactgaggatgagagttttaagcttattcagactatgttagatttatacaagagcagaaaactcaaagctgaagagattaatgccaacccagctgagcatttggaagctatcaagagatcattggtaggaaagttgcctcagttatcaaacattcctacagaacacatcgagtctgaaataaagtttttaaagaaacgtttcgaaattgtccatgaaatattaaatggacaatgcagtaatgaatttacatggaactcgtgtaaaaagatggtcactgcagaagagatagtgtgggatgtatacatccaggtaattgtgtatttaacatagcacatgatatagtataggctaattaagatttttgccctccgaactttgatatgtataaaattatgcctcctaaatttttaaggtcgttcaaaattctccctgaattattgaga

SEQ ID NO: 27427 - DNA, 4786 bp, Cannabis sativa
aattttaaatttttaaaacacataaaaaaataataatgaaaaaattattaattttttttcaccttttccttttatttcaaaatagattattcattctaccaaaataataaaaataaaaatattattctaaaaataacattctaatactttaaaatgcaatcaaacaaaaaaaataatgaaatgacaattgtttccattctattctattacatcacaccaaaggccatctaagttattagaagagttttaccgttagaagattttgtgcgacaaaaatcctccaaataacagcaataacaggaaatgcgttactgttgcatagtattcatttttaaatagtgtgctgatataatacacatatctgtatatttagtgctaataaaattataaaatggcttttcaatagctttcattagttgaaaaaaaaaaaaaaaaaacatcttactgcaactaaatccgtagcttaagaccacgtcaacgaaccgttcagaaaatttaaagagtgcgaaaaaattggaaataatctgtcaaaaaataaaagaaaacctctataaactcaatagttgaggcgaaaacaatttgaaagagtggtctcatctcccaccattctaatgtcttttatcaattattcatccctattactagatagtgccctcatctccctccaatctacctaggataaaaggatactacttattctggcttgctcaagtggaatgactgatgatttactaaacactttgcctcattaacagaaatacagtacaagtttatagcaaaagccaacatatctagatcaagagtataggaaattggtttagatgttgacctggatgaggcttaacaatcccaaacctcaactcatttttttagtattgaactaaatgctatttaatctaactgatgctataaactataaacgacatcagcacaaactaatcagaatgaataactgagacccgttgggaaaattaattttgatcaaaaaagtgaagagaaaacaattattttatttgctaaaatggagtattcattcctgcaaatatctaaaagtgataagacaaatagtctatctgggaaagaaaaggccatacaacacgcattgtggtttccctttcttggtttcaggttcagcaatcaagtggacatcctagcgcaacacagcaatcaagtgtcttgcaagtcggctgtcaaatgctttcgttgaaattcaagacacgccaagaatgtttaccagcacccgccaaaaagaaatggcttggagctctgaaagccaaaaggaaaataaaacacatatggcttcagaagatttgaaaataaaaaactgcatacatacagatagatgtttatataaactacaaataggttgcataccttcaccacaggtaagaggagcatgcttccccgcgctacaaaagattcttctctttctttcggcattatccatggcaaaataaacgcccacaaaaaatttatccaaaaccagtgcacttcttcatcattcttcaaggatgacagaagcttcctacaaaaccgagaatggtagagtggaccagtgcgtgtttccatctcattaacaaatccatccactccagtccacctcggttctctatgcctgcactctgccagttaaaaatgggaaaccctagcagcatgtactttaagcttagctcccaccaggcagagtgcaggcatggcccctgcccctcatcggggccgggctaatccaaaacaggcatcgtattgttgacgcgactacaaaaataaacgtacaaatgatttaaactctaagaccgtacattactataatagttcacatgagtttaaaagttaaaatatctaactaggatatcagttatcagttatgtcaacaaaaaaaaaaaagaagaagaagatagaatcagttgaaaaacatccatatcaaagaatacagttgaaaaagcccattgatgacactcaattcatgatgaatatggaaagttaacttaatcttatcagttaccataactatacccttgtttgaggcaatgaaaattaattgaaacaaaaaataataaactatttccatatttaaacttatgatcatttagtctttctaaagacataatttccatttccttgcatcatcccttctccaaatttcccatttccatttaactgtgagttaatgagtgtactgtgaatccgaaagaataaacagaaaattcagtgtggcaagtttcaatattaggtccctagttttgttaccaacatgacatacaatacatagtacatactaaacaacaatcttttcttaaaaagaaaaaagtgaaacatttatatgcagagaccgacaacaaaaaatcatcacaaagtaggtatgagatagttttaacattctctttggacaaagcatgctagatctgtctgtaaccactgaaagctaaaactttacagcgtgtagataaactatcaggtttgttatcctattcctctggagattctaacacacaacaaataccgagcttatgtttccaaataaacaggttagcctcagttctgtttatctgtatgcctataggatgtgatcatctccatcaagaaacaaagcaatacccgcacagcactatcatccaacatcatatgctagtcttagcagaaagggaatgcaaacaaggagactgtcaaaattaacttaagactcacctttgaatacaaactaagtaaaaaaattacaatttcttttcaacaaataattaaggtcccttatgataagcataaacatcccaccataaaagatactgaaaagattccatacctgtgaaaaaggtagatgaacttcatgaggatggataaaaggtaatccaggacgctgacaagaaaattgggaagtatgcagatacaagccagacgtggagtgtgcaccaacatgattaggattaaatggtgcaaacatggtttcaagaagagcataaccgattcccccaggcgctgatgcaggagaccatggcccaggtagatgttgaggatgaggatgaacctgatgttcagcagaaatctgaggtccgtgagtattacccagctgagggaattctgtgttgtagtttactgcaggggtgtacataggctggatggtgtatgatcctccattaaacccgaacccgggatcaaatctttgcatatacctgtaaaatattattatattacattccagtaggtttaaaaatactaacacccacatcataataaataaacgtgccaaaagactttgggaaatgattaataagaggtatctcactctttacaataaacacattcaaagatgggattttaaaaacaaaaaaacacgataaaaatgagaaaaacactaatagtacagaaatgtgttttgatgcatcaatgaaagacctttattggaaagaagattgttcattatgatgagttactgagaaaatatgaaagaaatggaactaatagaaacaaagcaagtaaagcttagtctaagacacgattgcctttgaatatatttaagagaacagaaatttgttccatactaaactaacaaatgcaagattctctatcaaccttttggttgctaacgtatcctcgataataaattctaccaacacaaaaatatgtaggcagtgtatagtagcttacctgtcatagttcctgtcatagtctggatccttgctgtcaatatcacgatcccgaaatatagctaccctattatttggtttgtacctaacaattggttccttctctgctctatttctaactgttctaccactacttatcgacggatcaatcagaactctacagggaggtccagaagttatatcagcaaagcccggtccaggtttttcttcagtctttgagatcccaaagttaccatgttggggtgtatcttgcagtcttaattcattatccaatcttccacttgtaccaccgcttggatcaccactagaaaatattctagcacgagccctgttatactcctctttcctctcctcgacgcttttagcactgtttgactttaacgagtttgaattcccaaaattgccattctctgaccccctctgcggcctctgcttaattgcaaccttgacaatgcttgaatcttctgacggtaaatttacaggaatgtcagcaaggcgaatcacaggagctccacagtcagttgttttacgaacaataattctggaaccagagccatcaggcaaactattatctaacaaaaccattgaatgaagtgaataatgttgtgccacacggtgtgcagccaaccgcaagtaagaagtaggcaactgctgaaactctaattgctgctgagtaggatcacgtataaacttctccacatcttgctccatccttaaaactgtttagaaaaaattaaatactcaattagaatgcttaaagcaaaaacaaccacagaaataattacacaaataataataacaaataacaaaattgaactactggatcagagaggtggtagcatgagatatctaaaatcactttcattgaattgatcatggtggtgacaacaaagctaaaaatagtgagaatatgtagggtaaatcaatgcccatggccattgaagtacaaaaattaacagatacagcataaatgtccacagaactcaactaataaaataaacgtaaacaacttaaagtaaacgtagtgaagttcgaatcttgattacgcccaccagtatacatacctttacagacacatacatatcacatcatatcacatacactatatagatatatgtatctagaattgtacatatatatatatatat

SEQ ID NO: 27428 - DNA, 992 bp, Cannabis sativa
aaattgccacctctattatggagcttatcgacctcatagatcgtagcatgtagcgttccatgtagcacaatatgcgccattaattcacagttctgaccactctacacaaacaattcaaagaaaataatgagaatccgatctcaaatgagaaaacccataattaaaaaagagtaactaaccgtgtgttgagagagatctgatgatgagaatgagaagtatggatgagagtgagatccaagccaagctatataatataaagttcgtactgtaaagtcaataaattattaaatagaaaccaaagcacaaaaccagagaccacagaaagagagagaaagagtgatccgctattatagctcttacaatttcattcccctttttcgcggacactattcaaccaatcccttcatttcttaccatttttttttcttaaaaaaaaaataaaaaatccttaccattttttttttcataaagttaccattttttctcttattattatgtttttagtatatgttttataaaataattaaggtataagtgtaatggaataatagtggtaataattaaggtaggttttgattgtaatagaattagtaatggaatggtattatgataattgatttatttttggaaagtaatgagaatgagaggtttattgacaaaaatttcctttagttaatttttttttttaattttatttgcttataaaataagtatttttaacatagttattttgaaaatattctttgaaacttatttagtatttttactctagaattattttatctatttttttaaaatatttctagtactaaaatgtaagattttaaatgtactaaaatataccaatacaccacctaagttaattttatagttttttttttttatattcgatatatattataaattttttttgatataataatcaaaattataattaaccatgcagcaatttataatacaccttctacaactaatatctcatatattattat

SEQ ID NO: 27429 - DNA, 3624 bp, Cannabis sativa
  modified_base (2407)..(2408): a, c, t, g, unknown or other
gaaaaacatctaaaaattcccgaaccaccttgatatcctctggccgaatggtatctgaccgagtgataactaatcagattgtaaagggttttattttaggcgcaaaacccaacagtaatatacccctttatcattctagaagctggtgcactcctagtcttccacatgcgttttgatctagctatatctagagtacacatccataaaggacaatagttcgaacctagaggtggcagccaccatttgatcaattttgtgtaataagaagaaatctttttggaaggttttgtttggatccataaagtcaatgcatattttccatgtcccatttagtttaggcacaagaactgggttagctaaccgttcttggtagtacacgtctctgatggtgttcgatagaattttatccaccttctgctccaaggtttctaactttagtagatcaagaggataccttttttgttgtagtagaggcatatccttgttaacatttaggacatgagtgattacatgtgggctgattccagtcatgtctccatgacaccacacaaatacattagttgatactttgatggtgcttatgattttgtttcttttgttaagaccaatgcctattatcctgatttttgcccacctgacatggtagtgcttatgtggaaaaaattagcgccacgtggtagtaaaacacaccaacaagaaggcttagtaagtacctcagcaaatagggacccccgcactcaaatgggcatcaagtgatagaccagcttcctcatagaagctggccggccacccttggccccctctggccaaccaacgtctggacagaaccatggcttgctaccctactcctggcaggtttttggccagccaagagaaggcatgtaggattctctatgtaattctacacgtggactgtgtgattgggctacaaattgggccctagaagccaaatgtaatagctgaataatatctacgttaaaggaaatttttttctttcgtaattaactaattagataaataaatatctagggtttaaagttataaattagggtttaggcttcctatataaaggccttaacactaacctagaaaacctaagtcattaaacctgatactaacctccaagctctaagtctaagtttgataactctcttcctcattccatgtcacacaccatagaagttttctcatcactttagatttgccaacctcgatttctactttatatccataagggtgctatatcagatcccacctatagtgatctggatagcattaaccctcagtataaatacaactaagatggtagtaggtcattacccgctatctaagggggccaaacctgtataacaattctatgcgtgctttacttttcattctaattgtgtaacacatgtcaaacatcagatctataagaccctgccatcatttgattaatttttacggtcagcagtttggtgctttcattgagagtagtggatgtcgtatttgatcaaacgccatggttaacacaagagaaacccgggtcgcactatctccatcttttggtctccctcaagacccgcaaactgcaaatccgaatgctcagtttccagtaacaaccagaattcctatgaacactgcagatgtggtcaatcctatcaccacaacaagcaccacaagtctagccactatagctggcaaaaccgatacaagcatcctggtggatttgaatagcatgcccttatctccgagggaagacccaccattggcgtaatgccctatcctatagggaggccgtgtgtgtgattttataagctagtttagtactaataaagtgatcaattattaaaaatctgtgataatataaaaaacttcactaatataatatactaaaaacaaacatcataatgacactcaaattgtgtttcggtgatccctattgtaaaaattttacaaaaaggctaaatacaatgacaagtcaaaacacaaaatcaaaataaacaatagttatagcccaaaacaacttctggcgacttgacacgcaacctggtagggtcaatatgcacattgctaaggaagactatcatctcatggttaatctagctttctttttcctttacatgcaccacatatcaccccttatcacaaggacttagcaagaaaagtaatagcaaaaatcatataatttattatttgaatattatcatttatactcaaacaatcagaatcaaccaatcacgcattactcataagctgaaacccaaatcactactgcatctatcacgaataaacatcactgtaaaaatatttggtaatcgaataccattataccaataataaaaatcatattcatttaataatataaattatatatatgtttttcataaagtaaccatctttgttacatcatgttgcctaatcaggnnagtcgatgctttaatctgataatcctttattccattgcctaatcaggcaagcccgtgccatagcctagcacccatatattgcataaccccatcgcctaattaggtgagcccatactgaaacctggcacccatgtattgcatcacctaatcagaggagcctgtgccaaaacctgtcacccatgtattacatcacctaatcagacaagctcgggccctataacatgctatgcagtacaatatacttttctaacctttgatctagattgatgcatgtcagccaacccaagtggagaaacctcccagatgatctggccctatgtcacaacaacagtaaactaataagtgttgcccacaatctcctttggcgaggaagatgcagcaccggtcagcatcccacataatgatcctatggtcattactgtggatttgggaatatgatcttggctagatgtatggtggatgatggagcctcctccaacattctttttaaatcaacatatgaaaagatggggctccaactcaccggcctagcgccttgcagccaagtgatgtatggcttttttggccaagacattgcacctatagggtatatcaaattacccctcatagtgggagaaaatccaatcacaagaacactaatggtacagttctttattattgagttccctcgactttcaatgccatgattggtcgaccagccctcaataatccgatggcggtgacgtctatctaccacttatgctttaaattccaaacaaggcaaggagtggcatatgtgaggggagaccaatagtctggccgtcactattacaaccttgccttatttaaggccaaaaaggagaagatgctcgctagaagtccagaagatgagccctacaaggggcaatgaagtctagcccaaggcggggacacaaacataaatcctcactttcgggatccatcaggaagctttagacatgtagaagagttggaagaattggaaaatgatcctgcagtcacagagcacgttgtgagtgcaatttcagagcatgttgtgagtgcagtctcagagcacgctgtgagtgttgtcctcacaagagaagaaggcggtgtacaccaccccatatactacatcagcaaaaggatcattgacgcaaaaagatggtaccaactcatggagaagctgacctacatcttgctcttggcttccagaaagctgaggccctacttccaggca

SEQ ID NO: 27430 - DNA, 2470 bp, Cannabis sativa
ctcctacctactgataaaagtatctttatttttttttacgtaaatgatattttggtttcattgttttacaaaaattattgataagaccttctattttgttaaatgacaaaataagccttgtattttttaaaataatactacataatattctgaattgatttttttgtaaaatgaaggagttggagctgcatggaacactgccaatgtccaacctggttcaactgtagcaatttttggtttgggagctgtgggacttgcagtaagaattaattaattaatttactatacatatattatcactacaacaaaaactgtcgtcaggagcgatttttttggttccagaaaacctcttaatttgttccaaaagattatttggcacgactagtcattcctgatattttattcctaataactcgtgcctgaaaatcaatattaggaataaaatatagtaacgttcatgatgcaaaaatatttggaacgaaaataaattgttcctaaaagtaaaagtcattccaaaatattttcgcacttgatgagagttttgtcgtttctaataatcatttaattattttttttttataaaaaagaaattatttggaacatctttgttaattcgcgcctgataccaccactattaagaatgaaattctgtcgtttctgatactgtcgcgcttgaaatccttatttattgtagtgtattataattttattcataaaatgatattattaatcttaaatttacatagcattttaatcatattaatgaaaattggtgtagattagtgaaggggcaagagcaagaggagcatccaaaataataggggttgatgtgaatcctactaaatttagcaaaggtagtgttttaatttaatatatttcaatgtcacaaaattaaacattattctagtataattacaaaaatattattggaaatatgaaataatattcatgatgtgtgcatattataaattagattagtgttattgtattcattataattataatatatctttgtaaatttttaaaatattctaaatgatttacaatgtccaaaatatatttaaaaaattttaaacacgcgtggtaaactaaaatatcaaagatttcgttttcagtactgtagattattcaaaaaaaattaaaaatttacaaaaaataatactataattataacaaatagctctataaattattagataaaatgtttgtagagtcattattgtataagtatttttaatatttatataaataaattgtaatttttttctactataatgtgtacaatataggtgaagcaatggggatgacggatttcgtaaacccaattgagttggaaaagcctctgcatgaggtttttatattcttcttctcttttaagagtatttagaaactgaattttacttattttattttttttcctcacaaaaaatttcaacttctaagcacaacttaaattatttaactaattttttttttattaatttcaatttgttaatcgaatggctaattgattacatatttcatcgtaaaattaattaataaaataataaattatattaattgatttattatgtgtattattgcagaaaattagagagattagtggaggaggagtggactttagctttgaatgtgctggaaacttggatgttctccgggaggcttacttgtctactcatgaggtacctataattcattattattactctaattattatttcatcttttttttcgagaaagaaatctgattcgaatttgaaacttttttttttacgagaagatgttctaagatgttatcttaggatgcacataatacatatctaaaatataacatgttgttatttgtgtaatttaataacgttgtaagatgtgtataaatagggatggggaatgactgtggttttggggattcatccaagtccaagaatgctaccaattcatccaatggaactatttgatggtagaggaatttgtgcttctatctttggaggcttcaaagccaagacccaactccctatttttgcccaacaatgcatccatggggttagtactttgtactcactcactctatatacattttatattgtcaatattaattaaatatttacaaagatgaaaataataatttggtggttgatttggttttgtttattattattattaattaggaggtgaatttggatgaatttataacacacgaacttcctttcgagaagataaacgaagcatttcagctactcattcaaggcaaatctctcagatgccttttgcatttctgatcacattttttctctattcaaatcaaccttatatttatatatttattattcatgtcatgtgtatataattaggagctaaagtctccattaatatatgtataaatatctaattaaataatcatcctaagaggtggagtttaaaatttgtgtaattatgcatattggtgtataaaaatcactgaaaattattg

SEQ ID NO: 27431 - DNA, 2088 bp, Cannabis sativa
  modified_base (39)..(56): a, c, t, g, unknown or other
agtaaattttaattattcacgattttcaataacctcgtnnnnnnnnnnnnnnnnnnacagtacgtaaatcacgctaacacgcctatgctcgttagggtgttacaatctagatgcctaaagtgaccggtttcacttcttgaatcactgttttgggtgtttccacccactcttagtcctcgtcggtcaaagattgacctctgtgcacctcactccccttggggagaaagtgatgtactctggctggccatgggtcttgttggaggttggctggccagtggggtgctattgagctagagatccctggctgaacccccatgccgctggttgctaagatttggttgttctcgccgtttgacctttgacaaaaggtttgtcctccctctagcaggggaagatcagtcctagttcctaaagagctcggcaatagtattccttgaagtggatccctaaagagatcctgacctcttctttcggttctctgattgaaccgtcttattagatcgctggcctcccggttgcggcgatctaattttgcttggtgagatggaaggatgtcctcctagtcatccatctatcttaggaatttgcatctctactgagcgaaagcattgtaatcagcagcgcatggttcttcatttaggcccgcacgaccttcagcttccctgagtctggccaactcaaggtcttctcctaggtgtaggtgaggctcacccactcccaggcctgtctctccagcataaaattggagtcgaggtccagttgttgttccagggcgttatcgcccctgggtccttcctttagtgggaggcgccaatggtgggcctactcttggaggcgtgggcctaccattttgattaactggggtgctcatatcagtttggccaactgtagtagccagacttgtagcgtctgttgtggggacgggattcaccacatctgcgatattcatggggattccagttgtgactggaacctgagtgcctggatctgcgatctatgggtcttgaggaagacctgaagatgcagatggtgtgacatgagtccttcttgtgttcaccatggcatttgatcagatcatgaaatccacgctctcaatgaaagcaccaaacttttgacctcaaaaagtgatcaactgacagcagggtcgtacatatatgatgcttgccaggtatttgcataaattagaatgaaaagtaatagacaataagatttgttatagaggtttggccctcttgtgatagcgagtaacgacctactccccttttagttgtatttataccgtgggaattactatccagattgctataggtgggttgtgatctgctatagtacccttaggattacaaggtatgaatcaatactgacaacactcaagtgttgagaagtaccagggtaggcatgtgagagagaggaagtaaggaagagagagagagagagagtttatcagacacttagagtttagaagtaggtttctagcttagaggcaacttagctttttagctaaggttaaggcctttatataggagacctaaaaccctaggtttacaattcaaatcctttagtattcgtatagtttgttaaatatttacaaaagaccaaagtgcctttgattctagatattattcagccattctgttgggcttttaaagttcaattcgcagcccatagctgttgtccatgtgtagaagtgtccaggaaagcctgcagggcactccttagctggccaggcccctgtggaggccaggttggccggccatggtactgtcccaaggttggccgaccatagagccagccaggggtggccggctagctcctaagaaagagctagtctatcacttgatgcgcatttgagtgatggggtctttgtttgttaagatgttgacttagccttccttttagtgagctgtactgccacatggcactagttcgtccacgtaagcatgccacgccataaggataaaaattgggataccagggactattaccataattttttgagattaaggacttatctgcattaaagtaaactttttagggacttatgtctcctcccccccttaaaaaaagaaaattacttcatatactatt

SEQ ID NO: 27432 - DNA, 2167 bp, Cannabis sativa
gatcaacctcctacggtggaaatcactttacgaccaatgcacgtcgcccaaattccttccccacattcttcaccttcaacacgtaagttttttttttacgtttctggaatcttgacatgtgtttagattttgggtcggataaattttctttgcatgatagtttatttagccgattatgattttcttttttatgcttgcttgtctgccataaaaagtaacgagtaggatttaagtctttggtgcaattttgaacatttcttagaaacatggaattttatctatatataatacctatagtcactgttaggttctctgaaattctgtctccattagtatctttctggttgagtagcaaacttcagcaaaatacattcaagtatggctaaatttaattcctctattcgagatccttatggttcaagatgacatatcttatgaattttcaattaattatttgtattcctgatctgatcttcctggagcaatgttccttgaggatcttgcttcaagatgtagggttcggtggggatctctctaactagtgttaggggagaagtctctagtacccttgctatcttctttagtgtggttatttaagttcttggcttttcttcttgttattttctagtttctttcatggttgaaggtgctcaaactgaagaggtggagattattgagcaagaggaagttgaagctctataagtagtgaataatttatctccatgggagatggatcaacacacaaacaaattcaaaaattacgaggcactttgagcatacgaggaagattgaggcctcaagaatattcctgacctattctaaaacaagcttttagtcttggatgaatttccatgtagatgtgcgaatgccttcggtgcttggagctaggcccatacaaaaatgggagctcatcttccacttagaagttactttgcacatttctgtgagcacgtaggcattgcccctttccaactaatcccccaagtttgtaaatttttggcgggttggttcattctttgcagagccaagaaggtggaagttctgtccccgaaagaaattctttacttttaccaagtaaagtcaaatctcgtgcggaagaataagagcaaaattgcttttttactagctcaagaaacgatgcaggacattaatttgtccaactagcactgtaaaatacatgcataacttccgggactactagttctttaccactggcttcctgttgaaaagtgtttcaaccctgtcattggatttcagcattgcgagtaagtaacgccacatttttcctttccatagtttgttcaatcttttagttaaatatctgattaggatttcttctttccgttttaagacaagattgcttgtccaataactactcccttcttgcttgagagagatgcttcttacaaaggatttccttaagaagacttaataatggagaacttagtcactatagccaacttaggcaagctagcctgatttctcctcactagagcattgaagcctgccacgtctgtgatacccatatcgaccctcccgaagttagagaagtcattgcagagatagtcgcatatgaggcaaagaaatccatcaagaaagataagtgatagctggaaattgggcttggctacatttggagcctacaaatgaagatatggatatagaagtccgtatcaaagcagtcattttggatggaggtaactagatgccagcacatctggaagaggtaactctcccttccatattttttgcactacatgtttggaagacttaggtcatgttgattaaggaggctttgattcatactttttggaactagacaaccatatataccctacgattcattattacgatatggtagatgaaatagttgaaagcccaaactattttcttctgccttcccgatgtgttagagtagacctgttcatcttgatgaagtatccggggttcttttagtacgacaacttcttagtgttggttttatggtattaaatcaagtatgcagcgaaagaattcatatatctgatcatcattgtacgatagtcccaacggatctccagatgtataaatattaaatcaaaatataaattatagaaaaggaatatatatctctagatgactatcaaggtaaaacttctcgtaagttgaatcattttggttgattaga

SEQ ID NO: 27433 - DNA, 2534 bp, Cannabis sativa
acacgaaagcctcctatatatatatatacaataatacatttattattataattattattaattaattcacgtaattaataatataattaattagatacttacaccaacttcaaattccaaacagggaatccagttgttcttgagaaggtattcaatttcctttaacaattgctcagtagtcaaaggtggaaggtatgaaagtgtctcgaacttcttcaagtttcttggtggccatacctatatttatacaacattttattaatcaattcacccaaatttagagacagattaaaaatttttacaattgtaacgcttataattttagtgtaattgtatgtgtaacagtctttatcaacaatttttttttttttatcttttaaaatacattataaaaacatttattgatttttcaatacattacaccatataaggaataattttctatttttaaataataataataataaaaataaaaaaaatagttttaggtcaatttagtctcatttagctaaaatttggctcactttctataaatgaaagatccaaaaatcttacaattataacgcttatagttttagtgtaatatatgtgacagtctttatcaacaattttttttctttattttttaaaatacattactaatttttttttcaatacatcacaccatatatggagtaattttctatttttaaataataacaataataataaaatagttttaggttaatttaatcacatttagctaaaatttggctcacattctataaatgaaagtcaattaactaataaggtaaagtagtaccttcatgcattgaactcttccaccattgctggccaaagttgtgatatcattgttggatttttgagtcactgggaatgcagcacttgacttgagcccagagaaaggagccaccatgctggcttgtaccggtgtggagcggccgaccgaggcgacggtggcggcggaagatacaattgaggaagccatttatattgtaccctttgcttaactactttactatgtaaataagagaatatagatttgttttgctatgctctaataagctttgttcctcctttatttatagaccaactactcctgttttgcccttcttttcaatccaacagctttgattttgtgttctaaaaggatgggtgtcttttgaccgttggatcatgtttagtgccaaattcgaatcttattgaccacacacatatacgtactgcaaaaaaaatagccgtcttatgcttcattggtaatgacacgtggcattctctagtgtaatcttatcccacagcctaagtagttgagtttgcatgaagggttttgagtgaatatccaatccaagcaattgtatttttctgatatgattttaattgtgacttgtgaattaacctatatcattgataatttccacgtcattttttaatttatcagcttaatttccaccttgcatatatgtctacttgctatatgtaaattatatatatttttattgcttaatattaacacatataaatatttgtattctttcatagacagttaaatatgtctttgtcaattacagaccatggaatttcatgagttattacaaccataggttttctacatgcgccaaaaaaagtagtaaaatatcatattaattttagagaaaattagctcagtatacacattttttaaattatttattttctaaccactgagagtcactgactctcttcttcttctattttttttttaaaccctcttactcaattgtttattaacactatttgacttgcttttctatttatttacattttattttttcacaataaaataacatttacatgtctctctcattttcttaattttaattttattttattttttaaaaactttataaagtttttctgatttcattaataattatttgagttcaaaaattatactaattgtaatctacttttaaagataattattttgatatgcaaaaaatatattttttcgccaagactaataaagatgaccgaaataacaataactttgttagttttttttttttcttttcctatttaattaatcaaattttaaaatcaacaagagtaaatatgctaattaattttaatatgttagtaaaatatattttgttattcatatagtattctaaatacacctgaaaaagtacttcagggtatataacattttaatttcttttctattcactttttttaaaaaataagcaatcaaactttgacataaaaaaaaatctaatataccaattttaataacgtaaaatgtttgaaattaaaagtaattttatagtttattttataatttgttaacgaaaaagaattaacaaataacttaaacaaaatataatatgtcaactaatttttttttttttttttgagaaaacctaaacctttattaaataacaactaagtacaaagaattcaggctacaaaggaaggtaaagaaccattccatatatactcattgtctaatcctagacctgcccgagcacacgcatgagcaattttattgagctcac

SEQ ID NO: 27434 - DNA, 3111 bp, Cannabis sativa
atattaaatatactataaaataaaaatgaaaacaaaagtattttgacggctatttttaattaattttaataaagagaaacgagacatttgtattaaatgaattgagtgataaattaataattaatttgattggaattaacgcgccgttttagaggttgaggagaccaacactgaaaatttaaaaaagaaagaaaaaaactgttaatgggcaggaaaaaggtgaagccctacagtctgactctgacctgtcccccactctctttacaaatgcacaaccccacgctccggattccacgcgccccctccctaatttcaatgcacttcttttagcctattctcctttcaaatccgaaccccaaaaatattaaaaattaaaaaaaaaaaattaatagatgcttccacaatgcaatacattaatttagaatttttttttattttacctttttctcacaattataaaatttaacatgctaaaaatattggaagagacatacttgactctttaactatttgaagactagtttttatattttaaattattttaaatttattcaaattttattaaaatatcttaaataattataaaaactatggaataaaaagaaatgttgctatttattaatagtatctagtattttctaagtgtgttattttgtgatcgactagcgatactctctaaaaactattatattaaactatatgagattcgatacttaattctaccaataacgatagtaatacataagagggtgctagacactactagtgccttttagcatttctcactaagagtttcgatttaaatctcatttttatcgtgttaaatttttttgaaaatcttaaaattatcagtggtatccaacaccttttgtaggcgacactttataattgtttagtaaagttattttttaaaactatacaaaactcaatacttaattctactaatactatataatactaaaaaataactagatatcagaagtatcttttagcatttgtcaaaaataaattataattaacaattctcttaaaaattctaaaacagatatgaatgtagggacacgattttatcccgtaatgtactttcacggagtgtattttgtgatgtacgacagtcgttagatggtggagttatttgatctgagagctagggttgatctagagataagtagggttaaaaaatagtaacgtgctctgagacctatctaatatacctgagacataatgtaccacggaaaacattccgtaaaagtaaatcacgagacaaaaacaaaatttgcaaaattaattaataagaaaaaaaagcaaaaacctcgtaaatataaattctcactctctctttttctctctcttcaccaaaacactttccctccttttccacctcttccacttctctctctaaaaaattctcatcattttcgctcaaacactccattggaatgtggtgattttttgtttactgctttgcttcttctgcaaaactatgctaccgagctttgttacaatggaatttttcctcatttttctgcttattattgcatgaggtataatactatactacacttccttttgttcttttctttgcttaaaacattatgactactgttatgattactaggttttctttgttaacatatggttatggtagcttcttcctttaatttttgctgaaatttttggttcttttgctttgtaggtttatcttgagacaatcttttttattttttttgctaatttttgttttatgggttatttttagaaatgtatttatgtgatattgtgtttgtcttgttttgcatattgtctatttttctttctattatctttattgtagttcagaggggtagtatgaaagtgggtgaggtattcaattgaataaatggacatctttaaggggtttttgagttgccttattaggaactaagtgacccaactgagtagtcttcttaaaattaaggtgtattagataaattaggaaagttgaaaaatgactaattgtactaatctgtggtataatgggatttggaaaacactggagctatcttaggaatgatggttttactttattgcatagatagggtttaagtctctactttatggaacatggttttgctgttaaatttagaattgagtgtgaactatgcaaatgactgtaaatataattaggaaaaactagcaaattagctgactaaagacaattctttcaagtggtcatagggcatagcatgatggtactacaaattgggtgttttattcactgccccctttgaaataatttttagtttggatgaaggattttttgttctgtaatatatgaagtgttaaagagtgttgttgctcattattgtctttgtgttttgctagaatagaatcaaactaccaagtttttgaagttttattttcactttaaggtactttttgtcgtcgaattttcgtgctgaaaacttgtattatgtcagggagattgcgctggatatttccttgagaatttttgatcacctgtaaagaatccaaacaattgcaagtatgttctcgtgtaagccttatgaggtatgtatagtttacaattacatacgagttatgaacggtgttattttttgttcttctaagctcttctccatgtcaaatttaatagatcattttaagcgattttccctttttggttgttatttcctttttcaattattaaagttttttgcccactggcttggttgtgacagtttacattgctttgctgtaggttgactctgatatgcccatttttgcggatgaacctgtgggtttggagcattttttggtagaacctcttcgtaaagaggattgggttggtgatcttcttgatttggatgcattccaaattgagaaatgcttcaatatggaagatatatcaggcacttttgattatgatcagaatcagataaaacttgatgctggtatggtacttttttttctctcattagttcacacgctaactttagtacttagaatagttaataagataattttcttctatgacaaatctttggtttttctgtgtcagttgtacagtgtgtaacatttatataagttattgttaacaaatccctttttcatatccttctctgattaaag

SEQ ID NO: 27435 - DNA, 4575 bp, Cannabis sativa
taaccgttaactattaattatgaattgcagccgaaccattacgctgtaaacggtctagattgaccaaaccaccaaaaacggtttcccctacggtctacagtagtttggattattgtggtctggatttaaactgcgattttccaatttatatgaatagccctaatttatgttgtttaatatttaataaaatatattttaatacatttctataatcatactttaaaaaaatatatatttccatttagtagagaaaatttgttgtcatgacaaactaataattctctccattttttctttctctcctcttttccccttactaaacaatctcaaattttagttctatctatttttctctcatttcatttatttcctcccacatttctcctctatcaaacataataagaataatcttttaacttttctgaaaaaagaacttttaaaaaataaaaaatatggatttttattagtattttagaaggggaaaaaaagagtgagagagatctcactagagcacatagttaaatgcattgacaattagctaatgtgactaaagaatgagtaaagcatcagcctctctactataaaagtgatagttacccataagagaactattataaaacaacatgggctactcttaagaatatcataattaacaattttaatcagaacaagaatatcattaacaaccatgaagtgtccattaattctgttcttaaggtaggtgattgcatttagacaacctgacttcaacacaatagtatgataactaaaccgcaacaccatagacatcgccttcaactcaaaaaagtatgtgcttaggcacgacattaaaaaatatggactgaagcacgacatgacacgaaaaaatataaatttaaacacgacacacgacacgaaaaaatatgagcttaagcacgatatgacacgaacaaatatgagtttaagcacgacaggacacaaaaaaatatgagcttaggcacgacaagcccgaaagcacgacacaacccatattttttttataacataacacgacacaacccatattttttacagtccaacacagcaactacgctcctagggagaacagcaacaatttacaattttataatataactttttggcgcaaatattttagatactttagttggtaaaattataatttaagtacttaaaacactataaatgtaatcgttcaggtattttagctaaatatactctttaactttttctatacataatataatgttttgtatcttctcatttgtaatctaagtagccgaaatttcaaatgaaaaaattacacgggtaactaaagaataagaggaaacattgattcatcaagctgaggattttttaatttggtaaaaaaaaatttaaaccatttcttgattatttgtgcatgttatcttgcgcaatgttaatcaagctgaggaattaatagagttttgagtgcagttgcagccttgtgaaatggtaatgagaatttgagaatgctaaacttcatacttgcagaggttttcgaagcccatgtattcgtgtcttgcaatatttcgaataatgtttgaaattccaaccccacccaatgtgattgcactgacaaaaattgtaaaggctaaaatgaagatgatcaaagatgtccttccagacaaaataattaactttcttaaaacatgttgtcctatgagtgccgcaacagtagccacaccaacaaaatacgaagcataaggtattgggaaccgttttagaaggtaatactccacaacagacatagatgatgagaacgtcattgcaaatgtggctgtcgcactcgacacctacacacaagtaaccaattagtttgtaactgatttatatagtggaaaattttattatacactcttttaaaagtggtgcaccgaagcatctaaaaaaacattttagtctatttttcatgttcatgtatattataattatttaaaacattctgccaaattttaagaaattcgaagaaaataaatttacactctgaaaataaggttcaaaatttatttatggtcatgtatattataaattgtttgaacattgttttcttgtaaatcgatagggtgtgactcggtgcaccgatttttgcaccctatttataatagcataattatcattatataataattaagtaaacactcacctgagggggaattcccatctccaaaaacataggacccataataaaccctccaccaagcccaagcaaaccaccaactactcctgcaagtactccacaagcacaatagagaacaagttgatgaacacgccaatttgttccctcatcaccctttgatgcaataattctacgtcctttgtataaaccaactgcctcatacattgataccccaacagaaattgggatctgcattaagttgatgacccaatatcccatcgaacaagtagatgtatatttcttgccaatttgtaatccaaggaatgatacccaaacaaaaactaaaagtccaaattccttccaatacacattctcaacaactctgacctcttctactttatcatcattatttggtccaatagctagagctgtgtactctgcatcatcaccaccattgttataattagcagcttctctcttctttatggtttcctttttccatgtttcaacacccttgaaaaatgcctttgtagatgttcctgtgaagagaatgataagcaaaacagtgaccatccaatcagcaaagatcacattgaaagcaacaccaatgctaattcctaacatgagcatgggttgaatgagcaatgccaaatcataatcaataataggcatatcaagtgttggatgccttaacttaaggttatagtaaactgttgagacagatgaacccatgatcatgcattttgatatagctgttgcagattttgcatcaaagccaattataaggctaagcataggaacgaaaatcccaccaccgccaactccgcctacgcttccgaaagctgcaccgcaaaatccaattacagagcccataacaattcgccacccaaattccatgtcgggccacatatggtgatatccagatgatgatgatttgtttgactgccataataaattcactgttctaaataaaaagttggattcagagttttcagttccaatgttattattgttattattagaccttgaaataacctccattgtcgttcctctttctgccgaaacaaacacgaaagctaatacgagattaaatatcatcatcaacattgatttcgacatcgatctcaaaccccgctttactccagccatgtccattgtgatctgaatttcgattttggaaagaaaataggcgagaaaatttgaatgatgactgttggttttttttgtttgttagatcatatttactgactgtattacattcgcgtaatatatatagtttttttttatggaaatatcaactttcattatctttttttttaatgatttatttatatagtttttaatgatttatatagttgttgatatcctatctttttcttttcctaaggaaaagattattttcctcattttttattttaataaatctctcttgaattaattaatagtctattatttaaaaagatatatatatatatatatatatattaatatctaccaaactaaaccctaattaaacctttattaaccaaaaaaaaaaccctaattaaacaaacctccgtagtccgtagtctttttcttattatccctaattaaactaactttatagtaacttacacatgcatatttgaattaatgaaccaatattccaaattaattattttatttttaataataaaataaaaatatccattaattttcttccttgaaattcaatcacctttctaattttagaatacataataaaggtaataatattaattagttaaaacaatcaattttttttaacagtttaaaacaatcaattttatatctatacaaaatcaagaaaagataaacatattaatagcatttcaatttatcgtttataattaaggagttttttcttaagacgggttttcaagattaagtgttgatggattggtttgctttggatttttttatttttttttttaattaaactaatgatagtggtttttgaaaattcaaaactaatttagacaaattaaatgttcaaaacaaatcaaataaatctacttaagaaattcatttagttggaaactataatttgtatttcataaatattctattttttttactaaattcttttactttttacagcttaaactaggtaaatgacaatgaaaatagatattctcaaaattatatatattaaattattatcaatattatgtttaagattgtttcaaaatataaatattcaataaaaaatcatatatatattgaatatatatataaaaaatagatggtttggtttagtttgaattacagacaagaattttaaaatcgtgatccgattagaaaattgaaaacggtttgaattaatcaaaccattgacgctgtttacccaaattttgacgacgatgacgtgtcaagaatagcaccgcgtggcacaaaaataccgagactaaattaatgaa

SEQ ID NO: 27436 - DNA, 1690 bp, Cannabis sativa
cttggttcgtggacaatggagcaagtaacattgtgacaattgatgaaaagaacatgctgcagaaacaggagtatggtggtaaggaaaacttaatcattaatgattgtattaaactgcatatctctcatcttggttatggtaaattgaaaaccaataccctttctacacccttgctactaaataatttgcttcttgtccctaatattgcaaaaaaattattaagtgtttcaagtttgaaatttgataatggtgtgtttgttgaatttcaccctgattgttgttttgtgaaggaaaacatcacaaagaagctgttgttggaaggagtgcttagggatggtcgctatcaattcactaacaaactagcccttagtcaaaatcactctcagtttttccctagtgtttcgagtctgtctaaatcaagtgatgttaacacaaccaatgttcatcattccaagaatgatttgtggcatagacgtctaggcaatccatccactagagttcttaagcttgtctatgagtcaaacaatgtaaaaattccaaagaatgaaatagaaaatttctatgaagcttgtgagtttggcaaatctcatgcattaccctctaaattgtcttcttatagagcctctaattaaggtgctggaattaatccacactgatctgtgggagcctgcccgagttgcatcaaacactaatttcagatttgacatacattttattgatgattttagtaggttcacatggctatattctttaaaacaaaaatcagatacactaaatgccttcactgatttcaaagcctttgttgaaaatcaattctatactaaaatcaaaaacataaaatgtgattggggtggagagtatcaagtgtttgagaaactagtgagaaccaatggaattcacttttagcactcatgtcctcacacttccgctcaaaatgggagagatgaaagaaaacataggaacatagttgagatggggttaacactccttgctcaagctagtatgctactcaaattttgggttgatgcttttcaaaactcagtgtacctaattaataggctgccaacacctattttacacaacaaaacaccttttgagacactatactacagaaaaccagattataaacatattaaaacttttggagctacatgttatccttgcatacgatcatatcaaaaccataaatttcaagttcactcactaagctgtatgaattcgggatacaatgattcttataagggctacaaatgtttgagtacaacaggataagtttacatatcgaattgttgtttttaatgaaaacatgtttccctttcagtctagttttctaaacactcaagctctagaaaaataacttgtcattcacaatgaatcctggtcacaactccctaatacccacttcaagcatttgagctatgcaccccaaaatacaaactctcatgtaccatctcaagcttctcatgattcaactcctacaacagcaacttcaccaaattaggtaaatgacacaagctcaccacattcaagctttaactcacttgatcatggattaataacactagaaaatgtcttagttggtcatagtacagatgagtatcatatacaacaagtacatccaagtgaaggctccataaatgcagaccttgagttttcgaattcaagtacagaagctccaacaaatgagaat

SEQ ID NO: 27437 - DNA, 2461 bp, Cannabis sativa
agagttaatgaaatcaaatacatcttaatgagggtaataaatttattcaatgagttagtgccacgtgattaaaattaatttgtgtgattttttttactctttaattaatgatgatgatgatgatggtggtggtggtggtagaaatttggagtgataagatttgaaaatatcgaaaatgcccctgaccctcatcatcatgatatattctgtcttataaaaatgattattaattacatataacatttttaaattagacccaaaagaatttatgagtgtgtatatatcttcatcatgtgactaatatggtttgtcatcactatatttattgatattctctggtttccaaagcaaattgaaactaggctatcatgaccacacgatccttccttccaaattaatactcttcattatacaacttcaacattaataataacagtactaggttactagtccataacattatttacatatatatatatagttaaaagaaaagacatttccaaaaatctaacataaaatattttttatatgtatatcagtatatccatcgattcaaaattttctatacatataaatatgtaattggacaagtagaatatttaaaatttttaacaaatacaatccatctagcgactcatttaattaatttggatccaaacacaatctaattaattagagttgaatgtttaatttttgtggcagtcaattgtgaacgaattagttggtttgatcgactatttattgtttttgatctattatttgttgcaacttcttcaaagttaatattgataaaatgagatagtatgattggtatactaatctttggatatataaagtgcaactttcgcacttgaaatagggttataagggatattcatttttatgtgaataagtgaggatacacacttaacctactaaatgcgcactgtccgaccgtgccactgactgatgtggtgtgacacactttattttttagagaaaatttatttattaaattattatttttatttaattaattaaaaatttttaaacactttaaattaattggtaaaaaaaaacatgttcaccttattttcagcatcgttcccacgatctcaattaatgttcccacgatcaatgaatttcttttcgttattaccttctgtgcattctctatataatgcatcagaaccaacgagaaaaatacatatttttcacacagaaaaaaaaatgatttacaattattatttacgattatattatatatatagtctgagcagtagttttttagtgtggtattccgacagttctctatcgtgtattagagctccgatacagtggtatttcgacaaggctgttttcgactgcttgcacatgcttaggcagtaccgccaacgtctttaaagagagcaacttaatttgcgactcaatccaaaattttcattagcaattattatatacgtatatcattgataatctttttacacaaaataaatatttttgtttttccttgagagtggttttgtagtttgtactttgtagtaaagaagtctttgtaaaatatatattatctccctagatatttttttttcattctttatgcgttattctttttcttgtcatgtttacagtcaataaattaaattagtaatttgtcaaaaaaaaaattcaaaaaaaattaaattaagaaattaatgtatagtacttcattggttttggaaatacatttattatacataatagtaactttccgacaaaatcatattattattttgaaaaggacttttttctttcttctttttttaagtgaaatttgagatatctgttatgattaatttttcactcaacaattatatagctggagttgaaaaccagccgatgaattgatgattccaacagtttaaaataatttacatatgaaaactatttggcctttatatttaacattatttgctcagtttctactcaaaaaattgatatgcagctttccacgattgataaggtcggaattattttccacgattttgatgagagattgagtaatcctaatgaaattatttaatcacaaaaaaaatgtataggaaggaatggaatgcttattccaatgattaattaatcgttgttgtcagcagaatgagttgccgtgaatttgaaaaagaacacaaccactttgtagacttttgtttccttattacataccgtttatcattatatatattttatagggtctcctattttataaacgtgcggtttgttttaataaattccatggaatgtgggattttaagtaaagaaaaaaaaaaacaaaaggaaaaactctagtacttggagactacccaatttttttaatgtattcctcgtaattaagaagaattaaacacttgttattaatactagatgagagttacgtggcgagccacgtaaatattagtttaatataagttttagtggtttttgtttaagaatccagtaactgagcaac

SEQ ID NO: 27438 - DNA, 1283 bp, Cannabis sativa
acatcactatataaggcttccattctcatgtaaacgttaattcaatttcaataaaccaattcattttttattctgcaatatggtatcagagcgaaaaagtaaagctttccctcgatcttgatccttccctcttcttcttcttgtcgtgtttcttcttccatcaactatcttcttaagctttggattatggtccttgcttgatcaactcccctgttcttgcttagtggtcaacgcttcctaccttattcactcgagttttatcaatggctactgatgatcaagctacaacacacggagtagataacaatagcgcgctttcagtaagtggaaatccttcaaattatctaatcgtgcaaagccatctgaaccaacaaatcgtgcaacaacagataacagttttcttcttataaaatattttatcaatcaaagttgcaaagggggagattattaattctattttggcatattcaattgacaaaataattttattttgtttctatatatttcaactgcattgttgtgtaatttaacatgtatatcttttattgatttattctaccaaaggcgtattaagtgtcaatcttttctaaattaggaaagttacatacaactggtaagttttaatagagaaataattctttcattttctttattggcccagtcgtgtttcttattatatcatgatcctatatgagtttcttaattggtctgatcaaatcttgtgtgaagaaaaatcgaaataagactttctttttctataaaagaaaaaatcgcacttactgttcacgaatttatatgtacaaaagtagaaatttttgggctgattgaagatactttatagggaagtttcttgtgagttgtggtctttttcaaaccgtgtatgagttatctataatgtgtatattgattagaaatatacgttatagcagctaggttttgcatctcttttatatctttgtatctcactttgtaagaaagagaatttttgttgtgtagaggagagggtgttcgtctttttctctgtgtttatgtattttgtattgtcttgagtctgtaattaagtgtacaaaagaagaagaacaaacagttctatctttgggagaaggttccacaagctttcaggagatagctcttcaagtcttgcctcaggagaatgcaagaactttcaaagagatcgaaggaagttcgaacacttgaagttccagtaaaattcaattagaaggtggaatacatcaagcttgcgacatacaataagagatattctatttatgcataagtcaatt

SEQ ID NO: 27439 - DNA, 952 bp, Cannabis sativa
aaaagatatcctccatcagcaactcttatagatgatgcatgaacccttttcctttttgtttgaggttgacccaaattcgtttattccttttaaaatatatgttcattttctctttttcaggatcacttgtatgaacacgtcgatcgaataaaaatagatttcttactaaaatataaataaattaaaaaaaatagaaagaaaaatgaagttttgttactcatttatatatgtagtgaatattttctttaccaaatcatagctggtgacagccaaaagtgtacaaatttttggtaataaaattcttattcttttctctcccaataataaaagggtgatgatcatgtgataacaacatggaatatgaaatttatttggatacctttattatataattatctcttgaaaaaatctactttcacctgctcttgtactgatatgtaatctgggttaatttcctggaatgcgctattctcttacagttacctccaagattattacctattcttgttgtagagtttgaaccacttgttaacttgttatttatatttatatttaaaatattaaatagaagaaaagaatacttttattttccccttctacgctttcgtcatactagaaatttccaacttccaagagttatatgtctcacgttaatgatccttatctcttccttttcttgtgaattatgattcttagaaattttcctagaaaggaaatccaactcagcaagtgtttgggatatatgcttagtaaatatagaaatcaaatgtacaatttaagactcaaccaaaataaaaaatattgaattaaactgaaaaagaaaccttatctgaatcaatggttgaatacatgaactattatttattttacttcaaaagctactaatactactgcatcatctagagctacctaacatgatttatattttacttgaaaagcttctaatactaat

SEQ ID NO: 27440 - DNA, 1087 bp, Cannabis sativa
gtttagtgttattataatgaggttgttattgttgtgcattgtgtagatgggcagtggtgaaggatgaaattgtgttcacaagaatgaataaatacttgtcagtgaacacaatgggagtttcacacgaatctcaactaagagctttacatcttatgaaagtaattattgatcaagcaaaagaaggagagacaatatttgattttgggtataaaacgatgagaaatcgttgggaaaaattgaatgaaatcgtgtcggtttcgaaacgcttttctcttcaaaaattagaatctcagtactgtaatttcttccacaaaattaggggaccttcaccaggtaagatatatgagacactttctcttctatgatcataagcattaataatattcatcatgcatcaaaatgtaaaagtatagtgcatggttagtagggctgatcttgagttgtattaggtcttaagaaaagtaaaatgttttgatccttattataaaaatagatggtatttttaaaaaatactaaaataaatatatatttttaaaaagaactttttattcatttgagtctctaagttgggtgagttctaagcatggacctagtctgtcttagcatagggctgaccctaatggttagtagtagtatagcatttattcatacatttttttctaggtgaaaattagttgaggaaattacattgtatacctactttacttttcttttgatctttacctctatttttattttttttaagatatattcactattatagatgatgtccctattataccccttaagttaatgtaaaatatatgctaaacttaagtggaagatgggggtatatttggcaactcactcacaaaagtaagtatatttcaataaaatataatataaaggtatttttgattaatggacacaaaaataaagtatttttcaacttatcccaaattagtttatatatatatatataagcatagattaattaagagcatttttacatggtttttgagttctagtactctagcaaatgccctttatagttaagaaaaaaaatgctctttatatattacttttactctagttttaaggcatgagt

SEQ ID NO: 27441 - DNA, 7086 bp, Cannabis sativa
  modified_base (2092)..(2098): a, c, t, g, unknown or other
tgtgtttatttacattgttttagacattcatatttaggattttaaataacatacatggtagtaaatctagatcctggtaaaacatactccaacaagaacatcacgaggttttggccaagcaatgtactgactcgtagtctgaggtcttcagagttaaaaaggaagccaaggagcagtagaagagtctcaagactgaccttcaaaatgcccaaaaaagatccaagagcttgaagaagcaagtaaggctatccaggctgaggctgatagaaagctggaggaggccaaagccgaggctaacaaaaaactcgaggaggccaaggctgatgccaaaactagggtcaacacaatcatcaggcgatccatctatcgagcttggtttgccaatcttgagatggatttaagttttctggaagacaaggctggggagatgctagcttactacgaacaaacgaaagaggaggaagccgacaatgtagaagatgaagttgatgaagaagaagaagaggacccaactaagtctccaataatgtagacttagttgtatatctattttttgtttttttttatttagtaaaatggccataaggtcgagacaatagttgccctttgtggcattttgtaaaaacttttgatatgttggatggtcaacatagcttatttatatatttttactttatgcctcgtatcttactttttgagttatacatgtttgtttattgctttttaatttgcaacttaaacgtttcttgatttagtttaaaatactttttttgattacacgagtagttaataatctaccatgttttttgccagtagtttttagtttgccatgttatacgcgagcagtttataatctactacaatttttaaagcaaacttaaaatattttgaataattcactttaggaactattttgaatattctttgattgctcatatgaatagttaatcctctattcatattttagcttaagtattatttttcaaggcacaattgtgtctcctttataatacatgccagaacaatatgagtcattacgcattcagctcgcatatagcttccttgttgttatatgagaatatctcacttacaacagctattttgatttttcctttttaaagaaaagatttttcaatttcttgactttaatttgtcaaaagacaattttaatcaagtatccttcactttgtggaaaaaaattttaatttttaggtttgcaatacagtatatatttctaggtgggctctagttattataccatatatatgcccccaagtaattttaaaggaaataaactttttaattacttgaacaaattttaattttattcataataatcattaatcattacagagataaatacaacatttacacattaaatttactgataataaagtcgtaaatgttcactattccagtggttctttattagcgagctgttcagccaagctaatttgtaagccccagttcctacgataataagatatggacctcctcagtttgggttaaatacttttgcaattggatcttgtgtatttgcaaatacatttcttaacaccaaatctccaactttaaaaagcctttttcgaactcttttgttaaaatatcttgctattcggtgttgatagactgcattggttatctgcgactcattacatatttcttcaagtagatccaaggacatatttaaaagttcttggttttcctcttgattataaaattcatgcatgtgggtcgcaatgctaacttctattggtaacatgaaaatggagtgtctcctatcgctgttttctctgtagttctatgggcccaaagcacctgtggtagctcgtctacccatcttcttttagcagcatctaacttcttcttaatagtatcttttaagtttttattaacaacttctacttgtccgtttgcttgatatctcgatactgatgagaagcttttaataattttattcctttcacagaactcagtgaataattcaccatcaaactgagttccattgtcagttactattttgattagaatgccaaacctacaaataatgttcttgacaacaaaatcgagaacttttttgcaagttatggannnnnnnggttcagcctctgtccattttgtgaagaattcgactgccacaattgcatattttgttccaccaaaccctgtagataatgccccaatcagatcaatcccccatattactaatgggtatggcgaggtcatcattctcaactcagttagtggtacgtaaggtatatgtgaaaacatttggcatttgtcgcatttcttaataaattcatgtgtgtctttgttgattgttggccagtaatatccttgacgaataatcttcttggatagactttgcctacctgcatggtccccacagaagccttcatggatttctctgattatttcatttgcttctactggtaacacacattgtaatagaggcatggaataacccctcctgtataatttgccctcaaccattgtatagcgaggtattgaatacaagagtttgtgtgcctcagtttcgtctgtaggaagttctccatttattagatacttgacaatttgtgtcatccatgttggtgaagtatctatcatttcgatttcttcctcttcacaaatacttgggtcatctaagatttcaaccggtactaaatttaatttgtcaagatcaaattgagacgctagctttgctagtgcatctgcattagagttttgttctcttgggatttgttcgattttaaaataatcaaattttttcaagttcttccgaaccttctctaaatattttacaatttttaagcctttcgcttggtattcgcccaagacttgatttacaattagctatgaatcactatagcatgtaagatttttgacctttagtgcttcaactattcttaaacctgccaacaagacctcatactttgtctcgttatttaaggtatcaaactagaatctcaatgcgtagtggaatttgaagttattaggcgatatcattatgattcctaccccgagccattctcgtttgaagccacatcaacatataatttccattttctgcttcgcgttcaacatctgggtcttcttctgaatttattccttcaatcagaaagtcagccaaagcttgccctttgattgacactcttgggtggtaagttacgtgaaattgccccaactcagtcgaccactttatcaatcttcttgaggcatcaagttttgataaaacttacccgagtggttaatttgttaggactttaattggatgtgcctagaaatatggccgcaatttgcgagatgcatgaattaggcataattcaagtttttcaagaggtgggtacctcgattctgcccccactaaccttttactgacatagtaaataggttgatggtgcttaccctcttctcgcactaaagccgcactaatgacatgctctaagacaaccagataaaggtataaagtttctctagttttggtttggccaaaactaggggtgttgacaggtgattctttatgcctttaaaagcttcctcacattcttctatccattcgaatttcttgtttcctcgtaacatattgaagaacataaggcttttatctgttgactttgaaatgaacctgttgagttctgccattctccttgtcaaagcctgaacttcttttggctttattggtgaaggcatctcaattaaggcctttattttttttgggttggctttaattcctctcgcaattactatgaagcctagaaattttcctgaggaaacaccaaaggaacatttctttggattaagcttcatattatactttcaaagtatgtcaaagcattccgtgagatcctttatgtgatctttactttttatcgactttactagcatatcatcgacgtagacttccatgtttcacctgatttggttctcgaacataccatttaccagtcgttggtacgttgctccagcacttttaatccaaatggcatgactttataacaataaagtcccatatttgttacaaagctcgtatgctcttgattagggacatgcctctttatctggttatatccagaatatgcatccataaaattcattagctcgtgtcctactgttgcattcactaactagtctattttgggtaataggaaacaatctttaggacaggctttattcaagtttgagaaatccatacaagtcctccaagtgtcatttagttttgagacaagaactggatttgaaatccatgagggataaaaggcctcgcatatgaagtcattagtcaacaatttgtcaaccgcttctttaagtgccccttgtctctcggaatctaatgaccatcgtttttgtcatcttgttggatagttggggtcaatgctaattgatgacaaattacattaggatttattcctatcaattctgagtggctccaggcaaattgatcctggtttacctttagaaaatcaattaattgctattttagttcttcctccaaatttttccaatgtaaacacattttgtgggattatttggatctaaaataacttcttccaactcctcaataggtttgagttggttattttaatcttggattttaggatacaaatcttcttcttccctctcgccttcttcaattcagattaccatcaattgatgattagctctcctgttttaaagttctattcgataacactcttgagccgataattggtcacctcggactactcttactcctgcttcggttgggaactttagggacaagtgtttgattgaacttactgccctcagtccaattagcactgggtgacccatcaataaattatatactgatggaagatcaacaactaagaactcctgcatttgtgttgttgaaaagggtggctctcctacaattaatgggagctcgatgatgcctaagctggtgacactgtcgcctgtaaatccacacaagctcaccatgcatggtttcaattttgcatcctctaaccctatttttttcaatgtgtccttgtaaagaatgttgactgaactcccattgtctaccaatacccttttcacccttttattggcgagttagactgtaatgacaaggggatcaatatgtgggtattatacatgttttgtatattcctccgagaagataattggaggttcattcgatttgcctttttcagtggtttttggagcaaacgtcaattgtccattcttttatttcatttatatacctttttgggcattcttactatttccagcaaggtgtcgaaatgacctagatatccccgccctcaatagggggaggttgcattctctggttattcgggttgttagccaggttaggtttgtttccttgatgtctcacatacagcctgaagtatcctcgcgagattaggctttctatctcatccttcagttgttgacattccttagtggtatgccctatatctttgtggaatcgacaatattttgtcgaatctcgcttatgtctcgcatgtctcatgggctcaggtttacaaaatacaaccctattttcattagcgaggaatatgttctcgtgagtttcattcaacttagtatataccgaataaatcaatacatacttttcatgctttttctgtttctttttattcttcgatgattcttttgagtcatcttttctttttatgtttgaaccactaggactatccactttagttgaaattgtgcctgctgttgccatactggtgctgggtttgcttcccaagcttgtttttaatagcttcatttcgtttcttgcttcctcttttcgcacaaaaacttgtgctttttcattgaattcattaatgttcctcacagggcgaccttagagatcatcccataattcacctccagccatggataactcagtctaataaatgcctaagtctcctttggatcccaattccaataggatccccatgcttcactagcccatactaatcaattacttcttcgtggaatagtatcaagaaaattacttgattttcttctattatattatcctctgaagtgtggtgagttgaatactgtcatttaggtttctgactttggcagcggctgtgctaaagcgacttagataagccttaagtgacttgcctggttgttgctttatattggttaaggatgatgcttcaagtcgtcagtctcttgcagcttgaaattgtttattaaactccctggacaactgttcctaggatgttatggaataatgggtaaatttgtcgaaccagctgcgtgcaactcctgttaaagaggttgggaataaaatgcaacgcaaattatttatgacattgttggctcgcatgatagtgttaaagttattcatgtgagcgactgggtctgtggtcccatcgtattgtgaaacatgtgggttcttaaatccctgaggaaactcagaatttaagatatcggaatggaattgctctgtttcttcatcagagtcgtagcctggtaattttccatgttctccatcctgatattttttgaatttatcctccagttcaattattcgtagttggatggggttcacttaccgttgattttcattttgattaagttgatggcacaaattaggtaccttttggtttagacgctcgcgaagatcaggctatcttcgatttaagtgctcccaaagatctggctgccttcactcataattacttacagatcttgtctccgagtaactctcggattgataacttcgtgatttaataatgctttcttagtgagcaaaataatgccaagatctacctccttcttacgtatgtctactagaccgactatgccctcgagacctcaattggcctgagcttgaacttacctcatctcgcactggctttcttctcttaaagagattagatacatgtcctctattataatacgtgtatacattgtctctatcagatcaagatggtcgtgagggtgtctcgggggaattctgcttgtccttggttgatttctagggtttctctcattattgtaaggaattccctggttccttagtcgaggctgccttgcctcttcattcttgcgagattcttttggcatatcagtttgttcattcccttggtt

SEQ ID NO: 27442 - DNA, 1862 bp, Cannabis sativa
acttttgcactgttgaaattattttgcaaaggtttttgaaaaggtttacagtttacactgttgaaaaggtttttcttttttttttttgaaaagcttacaacataggtgaaaatagcataaggaatttcttctatccgacaaatgtttcatccaactctaaaatatcaggaaaaaaaataaaaaacaataaatatataggactaaatttgagaaacaagataagtccgttgatattgaattcaaagcatcaaagactcttaatgcatctgtttcaatatgtgtaatatgcaaaatgctcctgcagcgctcaattgaagctatgaaaaagggctttatcttccattttatctgaacggaaatatcgttatactagcttagagagagcagcaatcacatggccttgatgatctcaaacaatagcatccacacctagatggttcttgaagcacagtccaacacaacacctatattaagtttcattttcaaataatagtgtttagagtatatattttttaattcacagtaaaatgtgagatttatatttattaagtctttaacgacgcgatgatatgattttgtaaatgaattaatgttatattaaaatcttttaaaaaaataataaatttcatttttcaaataatagtgtttagagtatgtgtacttattttttagtatataagtttaaatctaaattttatttaattataaataagatcttttatttgtaaaataataccttaattcaacaatttgaaatcttcttttatgaatacagtcagaaaatacaaactaattttgggtattttgttgatcaatttgaaataagggtacaaacttttaccaatttacaaataaatagttatgtttataattattcaaaactcaaagtccgaattgttatgtggagaaaataaagaaatccaaattaatataaactctagtttttctttcataagtttatttttaataattatgttcaaatatttgtgatttattgcattgaatgttaactttcaactattgttcaaaataaaaagggataaaaaatattttggagttttgcaaaaattaccaattaaattattacttttgttaaataacaaaataaaccctatattttttaaaataataaaaataagaccctgattttatataaataaaatcttaaataccgtaaaatatttaaaattcacaaccatatctttattttttatatatatatatttttaaaataataccaaaataaaatccgggttataattattccaaataacaaaaacataaatgctataggaataaaagtaacattcctgctatttttcattgaactgttaagttaaggtagactagtacttttttcattatgattgaatctctttatggaaaatgggcaaagaagtccacttatatatattctttcttcttcttcttcttctttcataaggaactacttttacattactattattaccactctgagcttgttcatactgcaatgacaaacacttgtaaagtatataggaattaaatgaaggaaaagaaaatacataataaaatagatataaacctttttattattattatttctaattgttctttttggtcttttaacggtcaaaagagaaaagaagtcttttgccacaatacaaaagtgtgttactactatgactatatatctagctagtataccattcattgcagctaaacaaagactaggtaaagtgaaattaataccctttttgctcttggctaatataattgtagtaaaagtgtagttttactcttcaatttatgtgaaaccaccactatattttaagtgaaattttattaccccataaaatattgaaaataattaacttaaa

SEQ ID NO: 27443 - DNA, 1174 bp, Cannabis sativa
tcttttttaatctctttaaaaataagaattcaagcttttttttttaccaaaaagtgggcaatggtgattgattgcataataatgtgggataggtgggatccataatagcattttaatgaaaaaagacaagcttatttaccaaaagtgggcaatggtgattgatttactttttttaatctttaattaaaaaaatattatgtgcgatccttattgactaagctaaatctttttttgcacaaaattatgttatttcttaaaacacaataacaataataattagtgtaaatcaaataaccgataatccaccgacttaggctatcataaatatatttgatcttggcattgatttcccttcagtgcctcaccacaccaactctctcactctctctctctctctctctctctctcggaatcctctcctctccgacgccatgtctctggaggttgctgttaaggctgcagttggtgctcctgatgttcttggagactgtacgatcaatttccttgattaatgtttttttgggttttgtattttgttttgattttctttaatgtttttttggttttgtactttgttttggtatattcaggtccatttagccaaagggttcttctaactttggaggagaagaaagttccttaccagaggcacctcatcaatctcagtgaaaaaccccaatggtaatttgaaaactccataattacaaaacatttgggttttgtgaaatgagggttttttgagacatgggtttgtgttttctttgatgatttgtaggtttttgcaagtgaatcccgaagggaaggtgcctgtggtgaagtttgatgggaaatgggtatctgattctgatgttattgttgggattcttgaggagaaataccctcaaccttctctcattactccatcagaatttacctctgtgtatgttttgttcctcttctttgttttaaaatttcaaattagctgcttttttttttcttcatattattttgtgtgagtggaaaattcaaagttgagaccttttatttgctgtggaagttataaacactgtttacttggaaaaagttggtttggataaagggtttatgtttgaatagtatttgtttcatgagtaatttgcggcaaaaccccctcaactatcaatttacttacaaaaaaccatccaacctcatattt

SEQ ID NO: 27444 - DNA, 2418 bp, Cannabis sativa
acctcatttagattagcttggaataagataagaatagactctttgtggagagaccaatcctctcgaaatattgggaatttggagagacgagcctcttgaaagctcgatattataacttcgtgactgtttttcagaataaaagatcatttgagaaattcattaatggtatttattttgggaaataactgatagaatatttctactttaggattattctatcagagtattttgttatgtgcaattattttatttgtaactgtctgtgccatccagtatccacatttataaactgaattgtatgagttaacccttctgtaccatgtcattgtttttctgttaagcttgattcttttacaagatttatcttttgctgggtactaaacctgccatttgtgatttaagtttaacaggggatattgatttatgtattcattgtagtggcactggtgctttggcaatttttcttcgaaaattgcttcatcttgaaatcacaacttcagattatgctgatcaggaaattgaagacaatatagctcataactgcaaggaaaatgggataatacctgctcttcctcatgttaaacgtgagcttttttttcctttttcaatttcttttttatgttccctgcctaattgtttgattttgcggttacctatattattgtcttcaatttcatgggtgtacaagctgtgtacttcggctgttttcggattattcggtttggtttcatttattcacatggttggtcgcaaactctgtttgcgcatattaatgatgtcaaggatcatattactatagagtaccattaccttatatgatcatattagagatccatggtgtattattaccttgtggttttgcttctagattggcatttggtgaaacatattttgcataatcattaaaagggatgctgttttcacttatttgggtcattcctatcatacaatatattttaggttatgatatcaaaggatggtacttgcaaattgaactcttatatttctctctttaaattagtaatgcatggagaaatttattacttccagagcatgacagttgcctaagtttgtagatacatggggtgacagttttccaatttctgagccggagtgggacctcatcatcgctagcgatatcttattgtgtaagcttctactctgccagcttctatcagttgattgattttcggtttcaataatctgaggctaataaactatgtagtttgagtgatctgattttatttctctttctattgctggcttattttagatgtaaaacagtatccaaacttgataaaaactctctcctttctcctcaactcgtacaaatctaaagacgatggagtggttcctcaaacaaagaaagaggagaatggttgctatatgcttgcaaatcttacaacttattagtttgcataaatttcacaactaaacataacaccatttgatgtttcttttatgcctctcaggaatgtgcataggattgcctaagccggcatttctaatgagctggagacgcagaattggaaaggaagacgagtcactcttcttcagtggctgcaatgatgctggtcttgatgtgaagcatatcggatcacgagtctattgtatcaaggttagagaaacaactacaattaacatctaaatagtagagtttcttcacattttggattaggagaggactagaagaagtgagttaagctttgaagtatgttctaagcaagcatgtgttgcaatctctttcctgttgagtgtcaaagactcaaagctgctttacaggtttatgtaagttttgtaatatcatccaatcaatagctaagaaaaatgtcttaccccttttttattttgattttgaactaatcaatagttttcaatttcgattctgaaacattggttgagcatttcttgaacaacaaatggagttgtactttaccaatccaatgttgtaatttctttttttatacacagtaattgagctcagctgttggagatgctctaagggtgagtatattctaccatattttttcttaagatattgcggattgtagtaatgatatgtgtacttaaatattataaattgataacgtggtatttttttaaagcagtgggtcctaatatagataaataacattcattaaaaaagggaaaataaaaaattgcacatatcattactaatggggtagaggatggaattttctttgtgaaaattgtagtaccggtactaaattatgtttatgattatttattgactaaaattttcggtaattaattaaatatttgtctaattgttattagagtgagtttcagagtagagattattacatgattcacgtgttaaaaaatttagtttataaattatttgtatttatgttgaaggttacgataatggtagaaaagtgttttggcttgacctaa

SEQ ID NO: 27445 - DNA, 5093 bp, Cannabis sativa
  modified_base (3705)..(3707): a, c, t, g, unknown or other
tttccaaattaaattcaacactaaaccaaacaattgaacgttactcttctttaggagtagaatttgttggagcagtttgactggcagcccaaatacccaataacaatcttattaatttagaaggcaataggttagaggtaacaaaatatggaatagaaactttttatttagttgcattttaaaaatactaaaataatttcattctattcttatttttgtgtgtatcaccaccttgttattactttttggtaagtttaagtgaagtagctaaggaccagttggttgctaacaaaattggctaatgtttgaatttgaaaatagttaaatttgatgggaaattcaactgcagttgtcatatggactagaaagaaatatagttgtctgttggtgcaaaaccttatgatacaagaagagcatatttcaacaaaatgaaatgaacagttatgtgacctgcaatgagcgggcccgcgcagccgctttctcgagtgctttgagtctgttagcctccattcgggctttctgttcttctgtgatctcattttctttggagttactagcattgtctttgggaacttggtttggtaattcttttgcagaaactatctcatggtgtaagttctgggaaggttcctacaaatagataacaaggaacaaaacaatcattatgtcataatcgaaaagaaattactcccaatcaaaaaccaagcataagatattacatatggaagtttcactaatcatgtcagcttcacatgaatcacatctcaagtaagacatttattgaaaaacaaaaaagtaatgttcaagatattcaagatcctatctttatatggaaagtaccaagtagttttattcagtaaaagcagagcactcacaagcactttctgacataattatgaagcaactaaaataaaaagacaatttcaataattttacagaagaaaatatacgtacttcaacagcattatcaaaaatatcccgaaacatgtcctcctgtatactgtcatcatcatggttctttgaagtggatgcttccttttgatgctgtacctcttcatgattcatagcttctacagatattggaagaatcagtcagcattcaactagggaaccctcaatattatttgttccatatctaacatgttgataaattttaagtatatcaggtaacaaaaaaagcaagtgaaatctaagttcagatggatccagtttaggtttgaatgtttggagtttcgctatcatgtatctatgcttgttcaaaatgctaagtttcattttgaggcatatgcacctcgaggcgaggtggtaaaaaaaatttgaggctatgcctcagctgctgtcattgcggcatacgcctcacactcatgaggcagacttgaggcgcatgaggtgcacgcctcaacagtgggcagtttttttgtgctagggctgttgttttgtgggctgatttgggccttttctaaagcttttctaatagctgttttcagacttttaaatgactctaatggctttagtttgggtcttttaaacagatttctaatagaaaagataggaaattatagccctaaaaccataaccctctcatacggcttctctcatctctctccttctcagtcgaattcctccctcctcagtcctcatcaacctcatgcgtatatgtcctctttaaatgtttagagcttttaccattttttgtttgaaaatgaaccttctatgaatttagtgtatgattttaagacttaacaagtaactttcatgaattttatgactttgttatgaaattatgtgttgtttgttctaaattttatgagttttatgatattttatgaagtttttcttcctattgttgaggcgtatgtcttgatacgcctcgtgggactaagggaaaacgcctcagtacccaattccgttttccaaaaattttggggcggctaatggtttagattggtgctactacagaatcaaagcatgactgttaaaaaagaccatttggagatgtaataagttaattttatttctgaaaaagtaacctgactcaaaaaagagaaagctgaatggagaagaaaagggtcatctaccatgcaagaaagaaaaacatacataatttaagctaataggaactctcaaaatatcagccaagcacactcacaaacaacaccagaaaactctctttatttctcaaaccctagcctcaattagagaagccaattcaagatagcgaaatctcccaagagtctaaaactaactactttgccactgaaaaccaattgcttatactcaagctaactactaactacttgaggctagctcaagtggccatagaagagtgtgtgtgtgttggaggttctgggttcgagttccaggttattcaatgtaatatataaacgcttagatcaaaaaaaaaaaaaaaactaactactgctctaaaagaaacataacaacctacaatacaactccaacagaacataaccactaacacactaagctaaaaacaacttagatttagttagttatccctcttctcacataagtgaacctcattggagatctatcataagctcaacgttctatctgtttaataaaaaagctgaaaaaatttaaggccagattttagatcccaaaaaatgcaaaggattcacaaattaaatcagctttattactcttgtcaataacgataaacaagtaattaataaattcatattcacttagctgagagaaaatggaatttcatgagagaaatcttgctcaagtattgccatcatacattgcaaggtataatatgttcgtttttaaatgccgggctagatgataaaaaaaatataaaatacattcttgattccatcaaatacatacaagcaataatcttggtatcaataattctgaaatcaataatcagtaggtactggaatcataaatctaatttttaattattttaggagtaactttacaaagttatactcctactaacctaccatcttggaatttttattagtgatcttatattatgtgagaattcaaaggcgctagtttactaggtgagctaaatatatatgactagctatgaactgctatgaattcatcaactaatttactctcttattcttttctatttctctcttcccctcttttcctcactgtttccccttttcatttttcatgtctagcattatgaagtgttccatattatgagaaggataaaagaataccttccgtatcatgctgagcttctttgtcaactggcggttcgtgcaattttgctgggtcacctccatttgcaactctctctcttaattctctaagacatgtctacttgacaaaagagaattattgtgtgagcacacacagacaaataaataaataaaagctaaatgaaaggtaagtagcacgtaaaaggatatcctagaacggattatgatgcatgaaaggaaaatttataccatccacagtatctaaaaggagaagctgctatacagatagataaaaggttttatttactataatggtacataaacaaataaggtttcaggtaaaactaaaatgtttaaatcaaaacaaaattgggtaaagaagtttcttaaaaaatgttacagaagcacatttacaaatttcaatcaattaaattgcaggatttaataccattctcagccacctaaattgcagaatataactatcattagccctttgctttatttatttatttatttnnnttatttatttattttttttatttattatttttttttctttctattttaggctaaattgtttagcttcctggcctgtagaaaagtgaacatttgaatatccagtccaacaataatatagagaaggaagaaaaactcaagcctattttccagacaagtccacagaagaaatcaaccccaaacctcaggttgataagtactatatcatagtaactagagagcattgaagattaaacgagagagctcagattatgacttgcaatcattaaaagcagaagcaactaaataagtgaagatggaatttaaattctctgtgagccttgaaaatgagttttgagaacacattaaacacgctctgaaaaaaaaaacaaatgaatcgtgtaaccaaatagggaaaatattaagacttcatcacctttacatgtttcgtagttgcaacttgttccaccttattaacgaactgatcaaatggaaaatagggaatcaaacgagagtgccaatcactatacatcccaattaggctccccaaatcaccaacctgcaatacagaatcaacaacaagaagattcaggcattcagcaactaaaattcaaatcagacagttaccttattccttttacttcaacggagaaatttaaattatttaaaaacaaagtctaccacagtctattaggtttgattatcaaatgaagtgctagcttaggcaggccttggattccaagactgatcaaactcaactcaaaaggtcactctttcactcaatttaaatgaaattaaacgaactaaaaatctatctgaatgagtttgcatgctaatggaggctatctcaagttaggtgggcgagtgtgtcaatcactaatgttcaaaataaaagtgacgatcaaaacttgctacttacgtatgatcaaacaaactaaacctaaaatttaagattcaagattaaagacaactgcttgaacagtaataaagcatataagtttcaatgaaaacccaatttcaaatagcgtgaaattgaaagaggggaaaacctcgtgaccgcgtccgcgatacttaaaggagcgagggaagtgacgaaggacatagccgagaccatcgtcggaaagaaatagctgaggggtgagcttgggccttgtcctcggagccgaaaccttcttgggtttggccgcaggtttgtcggtgaatcccgttctaaaagcagcaggtccagagccagagccagagccagatccagaagtgaagggggttttggatttggaagaaggaggaagatcgggatttgaattgttggaagaaggggctgagggacagtcgcgggaccagtgaccaggtcggccgcacttgtagcaacccgtcggagctgccgtatccttctccattttcagattgtat

SEQ ID NO: 27446 - DNA, 3040 bp, Cannabis sativa
tttttatatataactgttctctcttttttgaaaaaggaagacctgtattgcagaaaaatgaaaacaatagagtacatgttacaggttacaagcaaagttttgatctttccaaaaaacttcctgaactagtcctaatgcaaacttagcaaggttatgagcatcttcattgtgctccctagatatgtgaacaaatttaacattaggaatacaagagaggaagtttttgatatccttagcaaatctgtttaaaagaatattgtgagatgcatcattactaatgtagtccaccagcattttgcaatccgaaactatgagatccggctgtatgtttcgatgatagcaccacgagagagcatgacagagtgcatgagcctccattaataaaggcgattgaattcctgtccatggagttgctaccgagaggaccatgtcgctgctgttattgaataacgccataccgaagcctgtcttatttgattctgtgttttgggcagcatcaacagctaacattaaaccaaatgaggggtgatctttagtagtagcaccagctgagcaaaaggaatgagcccctgttgggagggtacacctgttatgttgatgaaatagatccaaataatcataagttgactgtaccaagagaccaggggccgtgtgtttctgatgatggagatattcatttcttccatgccaaagcttccaaagcaaacacaagaaaagttggtagtcccgatccgtgaaagttgaagcagccatatacattatttccctgcaagttagttccatatattttaaaataaaagatgagaaatgagttaatttccataccttctggacagttgggcatctgaaaatggcatgctctagggactcagtgtggtaataacagcgacagcaatgtggtgaagaaattatcttccttttgtgcatgttgcagctagtgggaaggacatcgtaaaaggctcgccaaatgaagtgtttgacttttgaaggaaggttctgagtccacaactgtttccaccagttttggttgatcaaaccatcagaagttgagggctcatctttatgcaacaaggcatgagctttgtggtagccagagttgacagaataattaccatgtggtgtgtaagaccagtagcaggtatctgaatactgggagggtagtataggaatagactcaatggcttggctaatgtcaatggggaaaatggttctgatacggttggtatcccattggtgggaagaggtcataagatcagacacagtagagcaaccatctgagaggtgtttgagataagaaatctttccataaccagggatccaagcatcattaaaaattgaagtgtttgtaccattacctattgactttctgagccctgagataagcaattcctttccccaggagatactgacccaaacaaaagaaggtctacgacctttgctagcctcaagaaaagtgttttgcgggaaataacgagctttaagcagggtggctacaagggaatgaggtgcctgaagaacgccaagcttgcttagccaacatcgcttgattaaaagccttcattgaacggaatccaagtccgccgtggaacttagagcgactgagaaaggaccatttcttccaatgaatcttcctgttactttctgatccccccaccaaaatctagccatcatggattcaagctttgagtggaaggaaacaggtagtttaaaacaggacatggcgtaagaagggattgcctgcaccacagctttcaaaagtatttctttcccacctttcgagaagtgctttgagttccatttattcaaatgtgaccaagcacgatctgtaaggtaattgaagatttcttttttagttctcccaaaggtttggggaagccccaggtacttctcgaaggaattccgaaccggaatacccaagatagaggtgatatggtttttgatgttctcctccgtattaggcgagaagaagagagatgatttattgtaatttaccatctgacctgaagcagaactgtaatcctgcaggacattctttatggtgtttgcggagtttgacgaggcaggactgaaaagcaggctgtcatccgcaaagaaaaggtgggatatgattggagcagtgcgagctatttttaaaccaagcccctgggtacgggagttgttgggtagtgtcttctgagatattagagaagaaagaccttcggagcagaggagaaagaggtagggggaaagggggtcaccttggcgtatacccctagatgggataactttgccaaggatctgctgattgatagaaaaggagaaagatactgtcgaaatgcaagccatcaccagattgataaaacgatcagggaaattgaatctggtcatgacttgtctaatgaatctccattcaacgcaatcaaaggcctttgccatatccagtttaatggccatccagccatgtcgcccagattttcgatgagataaagcatggtagacttcctgaccaattataatgttatctgatattaggcgatcaggaagaaaagcgctttgggcgggagatataatacgactcaggatgggcttaagccggttgacaaggactctagaaatgattttataaaaggtcgagcaaagactgatgggacgataatcggttacttgttgaggatgggaatgtttggggataagaacgataacagtgtggttaatggtcgctatgttcgcatccccattcagaaagctttttgcagccagagtcacatcctttccaacaatgccccaatttttttggaaaaaagaaccattaaacccatcagagccaggggccttgtcactggctaattgaaaggtagcttttttgatctcggagtcagtgtatgggcaactgagggagttaatctcaggttcagtcaggtgatttttgatgccagagagaacacgatttatggtttcctcgttaggattctgactggtaaaaagttgatcaaaatactgttcaatcgtgctcacaagagcttgattatcagtggctgttgatccatcgggatttaacaaa

SEQ ID NO: 27447 - DNA, 1963 bp, Cannabis sativa
atctttttacaaactttggaaccatattctatcttctttcttagttttcttaggcatgaacatagtaactcttagtttgatacattgctttatttcctcaacaattctattgactgtacactcttcctttctccaaatcactaagttccttgctgtccaaatcttgtaaaccagagcagcacatgctgcatccagcacaagttttttaaacttgctggtttttgacctgcctatccaccgaattagctgtgggagactgctgctaataacagaccagccgagccacattttgatctcctgcaggcagttttgagacacagaacagtggaaaaataaatgctcacttgactcaatacctgaatgacatagacagcagctctcttcaagatgtaacccaattttgatgagtctatcctttgttttcaatctattgtgcatagccagccacaatatgaaacaatgtttaggagtgttcaatcgagcccatacctcattactctagttggtcttgatgccatccgatgaaaaccatttgtatccttcagcgattgaatactgctgacttgtgaactgctggatgttggtgagttctttcagctggttttaactttttttttcttgtaaaaaaagtcatatttttgaggacgttctgtaaaaactcagtgtaatttctattaaatatatttatttttctctaatttaaataattatactttatttatagattattagatggtttaaaagtaattaacccttgatttttttttataaatgttataatataaattttatttaagagcttattctgtaaatataaaagtaaattacttaattataattataaattaaaatttagaagagagtagtacctctcacataacatatagagtactactagtacttctattaagtattatggtatctacgcaattatgaggtgatgtcttttgaatggtttgatattttttataattattattaaaataaaataaatattactatataataaattatattaatagtaatacgacactttataactaacattaattttaatgttagttaccatttaattaggtttggtagccaccaatcaattacatgtcaattactaattttatttgtctaaacaaaaaatatatatactaaattacaagaaattggatttttttttgtttttttttttttgtactttttgtgcggataaaagtcttgtttgcgccgataactagatttggtgcataacttttttcttttcatataatagagatgaaaataagtaatgaaaagctaaaatataattcatttagcggaacatgtgctttaatggtatgacaaaaggattttcgaaaaaagcaaaagcacatggtaaaaaatgtagtggcttgggcaccaaaaaaaacatattgtcccataaattagttggggtgtgttcgtgtctcattgtggttggaattcgttgttcgagattattgtcgggggagtgcctatgatttgtaggctattttttggtggggatatttgtaacaaaaccttcttaacatttacaattgttacacatatgaccttaataaaaaaaatgacaacaaaaatatcttatcttacgattttgttgcagtggtgtattttttggtcatcaagtatcaactcagaaacacgtaaactaaaaaaatatgtcaccgcgtatttccgaactgacacttaatgggcttaattaacaaaaaaattgtatgattacaacaaaatcgtaaaataagtagttttgctgctactttttttattagagttatatgtgtaataattataaatgttaaaagagtttaagcgcaaatatctattttttagtgactataggctgaatagtgaataggaggatgataaaggatgtgtgggaatttgggataaaaaatgaggttggagtactcacaaaataaggaatggaatgttgtttggatgtggtctt

SEQ ID NO: 27448 - DNA, 2362 bp, Cannabis sativa
atatatatatatatatcttttgtaagtgggaatgtgtagccttttcatgagtccctcaatgttttcagagtataacattgagtttcatatcactttacccaatctcttttaacaaattctcacactacttcaaactcaaacattttggttgaatgtaataaaatgaaatagaatgaaaaataaataatttttattttttttttgtttgattgtattttaaagtgtttgaatgtcattccaataaaatgacttttttattatttttgtagaataactaatctattttaaaatagaaggaaaaattatttccatgtaaaatgataaaaaaaattaatagttttattatcatttttttttatacattttaaatataattctatttcattgctatttctacttccatttttattcttatttctaaccaaatgccaagaattttgaaaattctttgaagagcacaagaaagctacctaaaagctttttatgatcattttgtataatagtggttttttttttccataaatctttacaaaaatacttcatacctattactttgtaaaaaattataaaaagaaaaatactattctgtaaaataattttaaagaaaaattatcaataaaattaatattttgtaaaataatattttagaaaaactatctagtttcacatactattattatatattaaaatatacattactttgaggcttcatatactactactatgtattatgaaaacattcatgaatgtgctatatacctactttgaggcctcatctcttttagatcaagaagaagaaaacttcattaatcaatacaccaaatacaaacagttacacttctaaaagagaagctacaaaacacaagctccaactaattacatatcaatctttgaagtaactttttctcctccctagaactttctctatcttttatcaacataagtctatatttcacatcacttttaattttgctcactatgcaataaacagagtttgagtaataagaaaacaaacaagtgtttcggttgctccaaaaatgatagatcgcggctgcccaaattagcactcttatcctgtcaatcaagactggccttgtgttgcccagccaaaccatccagctttcaaagagcttggaccaaccttcaaagcctagccaaagaaagatagaggacaacacctgttgagacaaaatgcacttgaaaaataagtggcagtggttctcgggttcaatgtcacagactacacaattcttgtttggaatagggatgttcattcggcaaagcagatcccttgttaacagcttagcttgagctgcttgccaaagctgaaaagcatgctttggaatattgactccacaccagcagccggaaacacaacttggtgcaacatgctacaatatatcttgctgactttgaatttctcaccacctgctgcaatgatatcagctttgttataggttgtacgcagcctacaaagctttctccaataccaacttgtatccatgctcatcttataggaccaaaaatcactccctttgagataaaccgagttaatccatttaacccaaagcaagtcttttttgttcatcaagtcccaaataaatctagctaaagaagctttgttccatccttaaacccaagaccaccataggctttaggaaggcaaaccctctcccaacttatcaaatgaactctagatctatcaaccttcaaaccccaaaggaagccctgaaaaagtttctcaatttcctttatcacactttgagggagaagaaacactctcatccaataattccttaggtcaatcaaagttgattggattaattgaacccgaccagcatagaataagtgtttattagcctaagagtgaagctttagtttcattttcttcaaaatcaaaccaaaatcatcaagtctccacttagttggtcttagagggatcccaagacacgtgagagggaactctccaatagttaggtttatcttttgagcaagaggtatcggctgagagactcctccaaagtaaacttgagatttgacaaagttgatcgagagacccgaggacttgctaaactcatcaagcaagaccttgatagcatggagagaaccctcatttcctttacaaaatattactaaatcatctgcgaaacaaaaattagtgagttttattttttactactactattattaaaacataatgaataagctatatatttactttgaagcctcatcctactactactatatattatgaaaacatacatgaatgtgctatatgttaataaatactatataatgagcctgcactaataatcaataataaatcatgttcatataaatcaagatcaaacatttaatttta

SEQ ID NO: 27449 - DNA, 3353 bp, Cannabis sativa
ttctatgaaactcaatgagaatacatttttctttattttttgttttgcaggtgtatagagaggaaagtattgttaaagaaaagatctaagtgtattgaattagttaaactcactttgacttaaagaaaggtcaaaaattaagttgtaagaaaattatgaatgacattaatagtgaaacatcatcatcatcatcatcatcatcaacatcatcaaagcaaccatggaacatttatggaagctcacaagatctaactccaaatccaatttcaactcaatctcaatcatctacatggaaaagctttggaacatcaatgaatgcaatttcatttggttttgtggccacagctattttgatttctatgtttcttattatggcaatttttgagcatttattcaagccaacttcttctttttcttctcctcaagatatcaacaacaacatccacaacaacaacaactcttcttctcttgaatcgggcacatttcaaaaactcggaaattcccataatgtaagtcttctcgattcgaaatgttgtttgaataatggtcgagcatgtggtttgattcagtttggtttgtgtggttttgtattagaaataatataaattcgcacgaaatatgatttgaaattaatttagtagcaccgaaataaagtgtgaaatttgtaaaataattagggtgaatttagattaagtgtctcttgttataattatggttaatttgatttgtgtggttttgtattagaaataatacaaaattcacaccaaatatagttggaaactaatttagtagcaccaaaataaagtgtgaaatttgttaaagaaatttgataaacttacattaagtgacccttaagattagagcctcttgttataaaaattaaagttgcttaatgtaaaattttaagattagaaatgatggtcgagcatgtggtttgctttattcggttttgtattaaaaaaataattaacttgcactaaataattttcaaaattaatttttcgaaagtgtgaaatttataaaataattttattaaatttagattaaggttatttatgaaatttttttgattgtttagcaaataatttggttttcaaaaaattaatttgtattaaatgtttctaaaaaaaagaatataatatgattattcaacttttaaaacaaatcaatgtagagtttgtttttatgagtacattttatatatgatattttataattacttagatatatgttataaaagtttatttaatatctgatatttaattacactaataataatataatatgataaattttttaacaatacttaattacactaattaagttacactaataataatttttgataatttttttaatattattatatatatattaatggtatattttgtttaatgacaggtgtcaacatcatatgcatctgatttctcagtagtaatgccaggtcatcaatatcctactcatattgctcaaccagctcctctcccatgctcaagagaaggaatttattggccaccccattgaccataatttaattaatataatttatatttatatatatatattgtaatattgataatttaatataatataatttgcattctcttcttcatattcataagaggtagtttgtatatttatgaagccatctactcttttgttatatatcatctttattatgatttataatataatatatcttagactaaatttacatgaaaattttgtatattcaatttggaatattttattggaagaaatattaattgactttggagtaagaagaggatccaaataaattggagccaattcaacatatttttttatgagaaattttatttataaaatttgtaagtgtatctattttaataatttttatataaatatttaattatattgttttttaattcttttatttcaactcatatttttaaaaaatgtatctataaaaaataaatatttaaaatattattacaaaaatttaaaataataaattaattgaaattttattagaaaaaataaaaaaaaaaattatacacggtttttaaaaaaaacaaattatgataaaattaaaatatgtattgaatgtaacacaaaataatatgaaaaaaattcttaaaaaaatattaagaataatttttaaaaattatttcaaatttaatttttttaaatattgaaaggtatttaatattttgtagggataaaataaaactttcttgttttatttattgtgatttgtttaaatatcactttatttttcgacaatatattttactttacttaaacttgtttaataaattttctaaaatttcataaattttttaacatatgtataatatttataaataaactataatacctcatcttttgaaataaattcactttacaagtagtgatggatttttttatttttttttgaaattttcttttaaactctggaatgaataatctaatttatagtttttttttttagaatttaatttatagtttataacaatataagttatatttgacgtgttatatatgtagcaaaacaaaattattaattagtaaataaatagattgttttaaacaaaagggaggattcaatttcaatgatctactttattagttaagcccaaattttcatgttttcccattaatataaaaagtaaagagataaagaataataacaaagtcacaaacaaaacataaacacttttttttttaaaaataaaataataaataaataaataaaagaaaaagaaagaaagaaagaatgcttggcttttggcacacatgaagatttataaattcaataacaagtcaagtcgacatgatatgctccactcttttatatgtattatttctattgggcctgttgggccgacagagggtgttgatgtatgtatgggggatgctcttgttactatattaaaaaacgttactttggcgggctcggtcgagcgagctcgtcaatcattatgagtactctaagttgaaattgccatgggcttaactcagagactattcaattccttaaagatatgatttatcaaaagaagctcatgtttatttttctttgtgagacgttatgtttgaaagttcgtttggagcttctagagcttggttatgagggtcttttttcggttgatgcttaggggagggggggtagattagtaatgttatggatggataaggaggatgctgagatggtggggtattcgcaaaatcatatagatatggtggtaagatatgatagctctcatatatggcgccttacggggttatatggagaacataatcggtcgttgcggggcaatacttggaatcttatgagggtgttgaatgaagagaatgatctcccttggtgt

SEQ ID NO: 27450 - DNA, 2665 bp, Cannabis sativa
attattaaatatatgtttagaagtaactgtgtaactacaagagtagtaattacactatagtttaaaatataaagtgtcattagatatgatgtaataattatacgtgaatttttaatattatatttgacaaaatagttagtgtgtatgaaaataattgtgtaattattagagtgataattatacagtttagtaattacactatattttaaaaatataatgtatgtgtgtttggatatgaagtagtaatgaaatataaatttttaatattttatttggaaaaataattatacatgaaaataatattttcttagtagttaatatttaaaatagaaaacttttgataattacacagtctaattacactccaatctcatggaggccatgagaattagagtgtaattagaactacccactcgcctctatttataaagttacagtgtaattacatggtcaaacaaacatgtaaaattgtgtaattacctctaactatacacaaattcaattctacggtaattttccaaatgcacccttaacagttacacaagaaaataatatttttttagcagtagaataaaattacataattaaataaacctatcaaattgtgtaattagtaattatctaattataccatgatataattggaattaccttcaattataagtacaataaaattacataattaaataaacatatcaaattgtcaaattgtgtaattagtaattatccaattataccataattttctaaacgtgccctaagaatatatttggtggtaggacattgtttggtttgggttcattaatggcttttgatgcaaaagaaggccacattaaatgagaccacgttatagaaatagtactcttcttctctataccacacctttcaacttgcatgtctattccaaattgagcttaagttttaactcacatttcctaaaaaaaaaataataaatacaagatttcatttattatttttctaaaaactaaaattgttgaaaattagaaattttaacataaaaattgttaaataagttttactttccacatttcacatgtactcaattttttttctttcttttgttttacaaaaatatcaaatccttataatttttctttaaaaaaaatccttaaatttttaaacaataataattacacttgtatgccttttgttttgttttttttttttttttcaattttctgaatgattttttttatttcaacattgttttaaaagtgctaattattatgatttttgtcctctaaattttaacatatactaaatcatgcttcacaaacttttcataccgttaaattttttctgaactattgagattgttagattctaagatttttgtccaattccattaaattttacttaggtgacggtagttcatgtaccaaatcgtgttccgtaaactttgacatgtactaaatcatactctttgaacttttatccacgttaagcatccattaataaaattagacgaaagttcttgaattcaacaatctacatagttttagagaaatttttaacgatctcaaaaatttgggagtaaaaatcctaattagtctttactaacattacatttggcatgatttttttttttttttgttgagaaaatatgtattcacttttaattaagggtaactatcattttggaccttgtgttttacaagaattaccaattaaactctctgttttattaaatgatattcagacattgtgttattcaaaatgctacaaaatagaacatgaaatcaattgttgtggtcaattttttttttgttaataaccaacttgaaaccagtttatagcacaaatacaaaaaaatacaactattcgtatcataacacctccaggccaggttattatcaagttttaatttgatgacaaattaagctcaagattcattaattacaattttgaaaaatatacaccgtctgaattgtcattatttaacaaaatagatggtctaattgataatttttgtaacatacagtatccaaaatgatatttgtaagaaaataccatgtaaaaaatatttaatttttgtaaatatagtgtataaatagttacacatctgtaaaaaaaaaatatatttataaatttgtaaatgttgtcacataattaaaagctgtaattttataaaattaatttttattatttataagatttcacattttcaaattaattttttgagttttgaaaattctctttttttttttttttcaagaaacaaatatttatgatcatcactaaaattttcaaacattactaaaaattcagggtacatttatatgttaaaaaagagtattaggagcacaactttatcacatgacttcttataattagttaacagtttttgtaatctttattaaattaaaataagtgaactcgatattgaattgcatcactaacgatattacacatattaaggtcggtacaaagtaccataagtgtcctttataatttttctacaaaaaagagcattgatattagacaccagcagtacctagcactttctataggcgacgatattctctaaaagttattagttagcgatatttgttaaaagttattttttcaagttatatagaacttgatacttaattataccaataatagtaccatattttctaacaattctaaaaaaaaaaaaaaa

SEQ ID NO: 27451 - DNA, 8624 bp, Cannabis sativa
  modified_base (1051)..(1053): a, c, t, g, unknown or other
acgcagattttcgttaactatattgaagcctaaactatgataaatttgcacagaaaataataaagaacacaaaattttttacgtggttttgtagttaaattttgcatagtccatgagtcaatcttattagatttctgatacaattctagggcctttttctctaataaattttttgtgccctttttagtgtaaccccctcttatttataattacataggagggcagttaattacaaatctgaatgatatcttacaacaataatcccctgaaattatgggatttaattacgtcccacgtaaaataaatgcggttattatttgaaaatcacacaactgtgattggtccccttttaccgggtcaatgcaaacgtgtattaaatacgttgtaaagcgtattgttctgggagatctcgctaagagcatagcaacaataaccctggtagagagccagagtttttcccatgtctttccgaggttgataatgtaaatctcattgcttatgctattgaagacataacaccccatctgacaatcgcagttcttagtgacaaggtgaatatcagcagtcaacatcatttgaatgtcagcttctatttgagagagctgactgatggagctatgaatcttattgaaagatgtctggagctgactagtgaagataccatgagtgtgccttcctatagcgagatggatgcctcgatattcgtagtttttgattcatttggctgttatgattagtttgtataatgtgtattatacgctatgtgtcttaacagtcattatgtctagtctatgtctcttcatgcgtagcaaggttgatgccttgtctagcattactgatgtcgtatggtttctcattaatacacgaggcaacagttcgtatatttttatctcgcttaagacctcacagtcaacaagttggaaatatactctgttactcccgcatttaataagttattcaaatataactatcattatatttggtgattcatattctcctagtttggcacgtgtcctcttctgaagtgctagccgaattttgggtataacannngccccttaaaaagttcttttttaagaaaaactgctttttaatgattacagagggtacatttgtcataatcccttttgcaaaaagcatgtcctctaattttggcggttctgtggtttcgaggtacatcaacatttaatgaccatcttttccactcatctttcaaattctacccgtaggattaatcatctttttgatctaatggagattaacccaagagtatataaaggaaaaaggaaacacctttgaattactttcgccatttttaaaaacctatggaaatttttagagtttttctacaaagaatcacacctagattacttcgaaaccttgcatgccatcatcgtcattggcatttttaacttcaagcattcggagggatcttcaaggcgtctgaggattcgcaaattgtagagcctctcatcgtctcgaaacccaactttaaatagtaagtgaccttccttcttattttcttacaagtttgttatgttgtatttctgggtttaattgttgccttactggtccgcatcgttatcatctcatttggttttagctatttttagggctgaattgtgttcgggtaaatgttagggtttagacagtatgtaggttttctagaatctccaattcactaacttcttgtttgataaatttcttccaggaattgggattgcttcctccttgcagcaaggtcccaatctggctcaaaagtttatcatccagaagatttagaaattgagtatcctactgaaattgccatcccttacagacccaaaatttcaaaacccacatccaaattagaggtaaatgatgtaagcattagagaacacttagtgaaaattcaccaggaagacattgttagtaaccacgaatgcttcttgcaagaaatcactgaaggcaaatgccgtttcttgcgagatgctgcttggcctaaacctcccagtgtgtcgtctattccttttgctaaacctctatttttatccaaactcataattacttttgaaccaggtgacttggaattcgaaataatgtctcccaagccacgtaaatcaaagactccacaggaccctcacatcgccttcgaggcaaagttaatagagtcgagggtgcgaaccatcgcagggtacgtaggcgattcactaaggacctgggacatcgagtataagcgagactaaagggttagatcagtgtgagtcggtgagttaagttgttacgcacccgtgcaatttacacgagagacctctgaaggggccagtggcgagaccagtacaagtggctcgaatggagtaggtgcttggagccttgagcacatcacggcaggagcaataatcccctttcgtgattatttcaaggactttgtaaaccacctcgggctaaatcccgtctcctgcagaatccttgcaagtttgagggttctatacaaaatcttgaattgggagtgttggaaatagagtatctctactctgttaaggtcgttctagtgaggaagaatgcagtagggggcttttactatctcggcactcactctagcaatcgcaaaatcatcgtggattttccaaactaagcttccttcaaggacgacttcttttggacgactggcctgtccccgattggcacagccactttttgtataattgtaagtgattatttgcattagaattggttgaattcatccatgtcttttattctaagttatctgactgaaaatttgttttgttcttgacggctatctcgaaaagacttgcccctactctgagatggccaaactgcgtaggctcctactgaatctcccgtatggccttaggtcaagtgacttctgtagggactgcaatatttaaatatgaattagtgagattataagtactaattttattattatcatcattaatattgacgtttcatgcgaatggttatgttatatttatgattttagctcagtgacgatgaaaaatacaacggagattattttagtcacttggggaaatataaagctttgtagtaatagagattatgtcatgtaagctcaaatggttagtgttggcggggttgtcgtattggaccattttccccctaagtcgattattgaactaggtttagtgatgagggtagtttaataacttaccctattttattgagtgtcttcacaataacttgatagctgccctttaattaaataatggtaagttaataaccttttattagtcaaatttgttagtttagtaaataggaaaaaaaaaaaaaaggctagttctctcttcttcttcttccttgttcggccagcaagaaccaccaacctagggtggagttttctttcaatttcataggctagtaggtgttaatttgaagacttaatctaaggtaaaaccctaagcttgctcaactatggatttatacatgttcataggaagttttgttaggtttagggttaactttgatgattttggttatgtgtttgtgaaattcgattagggctagcttctttaggtcttaaatgataatctaaggttgtttgtgcaatttttagggtttgctggtgcaaattggtcgaccagttttacagggtctgtaaaactggttaaccgctttacatgccaggacctcgaaattgcaactttttcgaatgtgtgttatttttccgagcatagtttggtttcccttagcatttagggtaatagtacattgaatgcgttgttaagattacccttggttttgagctagggttttggaatagttattcgagtaatttacctaattgtgtactctgacttaggacctccgttcagctcgaggattttctattcaagtcgaccggcacgcttgaatctggaatgagatactatagcataaataatataaatatctgaatgtattattgtattagttgtttacactactaacactaatgtaaatgtaattataagggtgttagtacagtgtaggattttagaatagttacggtgtaaccgacacgagtaccagggggtatgtcatgcatatggtacaacactcagtaacttctggaagtacagtgaagaccctaccgacacgagtacagagttggtacttttatgcatatggtacagtggtcgtacttccattaagaacgttcttaaccatttggtgagctcggttgatgagctcaggtcagcttaagcataaagtcggtagagcattgctttcacatatgttatgcatatgttactgagtctgtcgactcatcagtttgctaccttgagtagggaaaggaaaaggtaagttggacgagcagtgagttggggcttggcagtgattgtatatattgtggtagtgcaacctggagggtttcggcctttcaatattttgaattatattttatagatgcatgtcgattgtaaaaaaaaattgtcaaggggttttgtaatagtaaatatgatttttaactgtattttataactcatgatcccgacctatatggctatatgattataatataataaaattagcttcaaagatttataagttttaaatacgggcgttacaatttggtattaaagccaccaggttgttcactgaagacagtccaaatatgtacaatcaagggcagtgttgagctcaactcacggttccataagctttactttttgcaaactgattaagatatattgcatatatgtgtacattgttgtttaaccctaaatgctttcttgaaagtattttgaccactgtctaacctgtatgcctagtaggtttgcaggctaagtcctaagcaatggacgcccagcgaaacgttagacaaagggtgaaatggttgagaccgtaggtggtcggggaggtaaaaatccccaaaacccctgtggacgtggtataggctacggttgtgctcttaggggtggtcaagagaatcctccttaagctccatttgattgggagtagaggtttgctaagatgcaagccagaattactcaacaagaagatgagattcgaaggcttaggcaacgggatgctcttgttcagcctcccctgcaaactcctgctgttgtgattcctgcggtgccagcagaacaacttattactggtaaccgtatggagactttgtatgagagatttaggaagcaagcacccccagtgttcttgggggaccttgatgtgcttaaggaagaacagtggtcgacggtgattgagaggatattaaacttcatgggagtggccggaaatgatagggtggcatgtgccacgtttcaatttgaagaagatgccttagtgtggtaggagatggtatccctcactaaggctgttgctagaatgactagggaggaattacgggagttatttaatgctaagtattacaatgaggcggtccgcagtgcaaagtggaaggagtttgttgaattggtacagggcaagaacatgacagtgaccgaatatacgaccaagtttgatcgcttggccaaattagcctcgggaattgtgccaacaaatttcagtaagaaggaaaagtacttggtagggttaaatgccaagataagcatgatctggttatcaccacaaacgatactacaacctatgctaagatggttgataagactctttgagctgaaagagcagtaaagtttctccatgatacacgagaaactcttggtgctagtgggaccactactttccctatttctggtcctggaaaggagagtgatgattccaccattgagcagaggaagagaactttcctacctatgggaagttcagggaaaaacaataggtttcgtggaaaccaaagtaaagggggacgtcagacctactcctatcctgagtgcccgtgctgcaagaaacatcaccctgggacttgtaatcggagggcatgctttccgtgtggatcactgaggcacctcaagaaagattatccccagttgaagaaataggaacctaaccctaaagctaagccagcgccagcacgtgtttttcccactactcaggcagatgctgccgccagcccttcagtagtcataggtcagcttctcatcaatgcaattactttaactgtttttgatttgggagctacacgcccatatgttgcaacaagagtactgagtcaactcggtaggcctagtgagtattttgagatggaaccctgttgcctaatggggaactaattatttcaagaaagtgggttagatcagtgttaattagaattgaggatagagaacggtgtgccaatctagtggagttaccgttggccgagtttgacatcataatagtaatggaatttgtgtccaagtactctgttagtattgacagaaaatggtagttttcaaccggagagtgaagaaccatttgtttttgttggttcagttcaaggttctcatgtcccgagaatctcagtgttgaaagctagggatttattaagcagtggatgtgtaggatttctagcgattgtaattgattccagtacacttgtgttactcggaattgaagaggttaaagtggctaaggaatttttggacgtgtttcctgaggaattaccagggttactacctcaggaggagatagatttccttattgatctaatacatggggtagaaccttgctgaattaaaagaactgaaaatacaactccaagggatgctggatataggattcacccaacctagtgtgtttccttggggagctctggttctgtttgtaaagaagaaagatgggacccttcgaatgtgtattgactacccagagctgaacaagttaactattaaaaacaaataccctttaactagaattgatgatctgttcgatcaacttcaaggcaagacgatattcttgaagattgacttgagatctggttatcatcaattgagaatccgggaagaagatattccaaaaatagctttttgaactacgtacgaccaatatgagttcttggttatgtcattccagttgacaaatgctacgatagcctttatggatctcatgaacagggtattcaaggatttcctcgataactttgtaattgtatttattgacgatattcttgtgtactctcagtgggaagtagaacacgaataacatctctgtatggttctacaacgactcaaagatcataaactctatgtgaagttcaaaaagtgtgagttttggctgtcacaggtatcttttctaggacatattattgggaaagatgggattattgttgacccaggaaaggttgaaacagtaaagaattggcctagaccaaaaatagttactaaagtacgaagtttcctcagtttggcaggctattatcggcgatttgtagaaggattttctaaaattgtaatcccattatctaagttaactagaaagaatcaacggtttgtatggtcagataaatgtgagaagagtttccaagagttgaagcaaaggatactcctgttttagccttgccatttgatcaagagaaatttgtggtgtattgtgatgcatccagacaaggtttgggttgtgtgctaatgcaagcgaataaagtcatatcttatgcttcacgacaattgaaagattatgagcagcactatccaactcatgacctggaacttgcagcagtggtgttttccctgaaaattaggcgacactacttatatggtgaacagtgtcagatctatactaaccataaaagtcttaaatagtttttcactcagaaagatctgaacattagacaaagggttagagttgtgaaagatatgattgtgaaatcttgtatcaccccgggaaggaaaatgttctggcagatgccctgagttggaaagcacctgatcagactttcaatatggtaatgatttctcctcagttagcctcgaatatgtctagggcaaatattgagtttgtgatcgggaaactacataatctaacattacagtcaaacttactggaaaggattagaatggcaacagtagaagaccctaaactgcttaaaactcgagcaaatgtcttagcagacaaagctaaggattttttgatttctaacagtgggatgttgttgtttaaagctcgagtatgtgttccgaataacattgagcttataagaaagaaattctggatgaagctcacactaccccttactcactacatccgagaaccaccaagatgtatcaagatctgaaaccttatttctggtggtatgggatgaaaacggatgtggtggattatgtgactaagtgcttaacctaccaaaaaattgaagcagaacatcagtgaccagcgagattacttcagcctttatcactttcagaatggaagtggaaagacattgcgatggactttgtggttagtttgcccaagaccataggaatgtgtgactcagtttgggtcgtagtggattgttttacaaagtcagtgcatttcttgcttataaaagtaacttatacagtggattagtatgttgacttgtatgtaaaagagattatttgttttcatggtgtaccaaaatttattgtttcgaacagagaccctaaatttacttcaaaattttgggtgagtctgcagaagaccatggaaactaatctgaagttcagcaccgcctttcatcctcaaacgaacgggcagtctgaacgaactattcaaatacttgaaga

SEQ ID NO: 27452 - DNA, 3969 bp, Cannabis sativa
  modified_base (1407)..(1412): a, c, t, g, unknown or other
ttttttttttttttggtattatgatataataaaatattatgtatatttatatatatacatattgtagaaggagtttattatgtgaccatttgtaacaggagatgggctggtgtggaagaaagtgagaagagcacagagaaggtctttaatggaggagcaacaaaaaagggaggggctgctgctggaggcggttgtcacggctgtttttttgggagcttcaattaatttatgtttccaccattcatttctaactgtcttgattactataccaactaatctcttgttaattttggaggggtatatattcttaactaattattttataaattttaattaatactaaaattgttgttagtttagatttagaaccttcttgtagtaactaactatatatatcattttcaggggatttaattagtaatttagtactagctatatctacattgcttaagcatttagctgtacttctgtactttatttaagctttcatggcaaattttgtaacaaaattacttggacacctttattttgttttgtttttttgtttttttttttttgctggtggacacctatattttgatgtttttattttttaacaagattttgttgggtttttgtatagggatatttgtggaggaaactctcttagtatttataattgttatacatatgactctaataaaagagtggtcgcaaaagtacattattttacgattttgctgcagtcatatttttttttttaccatcaaatgtcaactcaaaaacacgtgacgacatattattagagtgtttaataagctaaataaatatgtcaccgtgtttctgagctgacacttaacatgattaattggcactaatagtcaaaaaagggtatgacaaattgacaacacaaaatcgtagaataagatatttttgctgctattattttttattaacaccatatatgtaagaattacaaatattaagagaatttgattgcaaatatatcttttattttcaacaaattaactaaacatattatgtgagaagtattagcttacactacgtgtggcaaatgacaagttaggtttcttaattaaaattgagattttaattaaatcaataaaaatgaaaatacatcatatatatatttatattataaaagaaggttgagaaaaaaaattaaatattattttggaccctatgttttataaaagttaccaattggatcctctattttgttaaatgaccaaatagaccttgtattttctaaaatggtacaaataagaccttgaattgattttttatcaaaataaaatttaattataatccaatctaaaagtactatgacaaaataatttatattttctgtatcaattcgtattaagaattgtctttaagttggttatattaaaaaaaattatcaannnnnnagcttagggtcctatttttaccattttgaaaaataccattttgaaaaatttagggtacattttgtggtacattttgtcatttaacaaaatagagggtccaatcggtaacttttgcaaaacacaaggtctaaaataatagtatttacccaaattaataattcaataaatatctattaatattaaaagttgttgaccctgaaaagtgatcaaccgataagtgggctcgtatagatctaatgcttgccacatgtgtgcacaaataataataagaaacaatagacaacaagatttgttgaagaggttcgactaccccttatgatattgggtacttttttgagttgaagtctgggtcgaagcagagcaggaccgactatctctacttcagccagcttagtcacgaatggctaggtgacaccaactgcaagaccatgtcaaaagttggcaagtatgccaaaaaaatactttatggcacaaggctttcgtggaattgtgcaccatgagtttcagttggtgtctctcttcagatgttctatccctaccttggaaataagggatagagcgaatcacatcctttctttgttaggtgaagagagaaatattatccggttgaccagtgtggacaaattccagatgcatggcatgtatccccctgctccttgggttgtaagagtgccagttgctggtgcggccagccctagagatgggcaaggccctgacttggacaatgaagaagaacctttgtcccatattgtgtagaatttggagagaagagagagatatctccataggcgcctgtcccgtgggggtcaagttggttatgcctctcttgcctacgtctagcggcaaggacaaagctgtagttgtgagctctgatagctcttcctctaatgatgatggtatttgatagtttataacaccatgcttttattcttgtgctaaatatttttgaatgcattctgactttgctactttctttttgtaggcttgtcttccagaatgagaggtctcgcacgtgggcctttagatgagcccaccagccaagtgagggccaaggtgaccatgacctctcgttgtgctaatcctggtagaccatcactacttctccctccccctaggcctgcacctgctaggcaagctgtagttcagcctgccgaccagggtacgaggagccccaccagagcagcggggtcagcttctggtaggaaggctgctgagtcagccactcgacgtatagagagggatattcctttcttggatgaggtattgccggatttgggtgatggtgtgcctaactggctgtactctgccggattttgggacctttctctagtgatatatgctttcagctttgttcatctttttggcactgtataagctgcccgaccatggtgttatttgcatgtggttggccaaccttgagcatccatacaagggtctagctggccatggcaatccaaagaggggactgggcgaccagaattgactgtttgatattgacattgtttcgctttgtttttcaggccttgatgaagctgagttcggcttgcgacgactctagagggtcttcagacacttttcaggagcgtatgaaggtcttggaagtatctgttgccataaaggacaaagtcaatgccgagctggaggtccttctaatagagaagcagagaatggtctctggattagagactatgctaagtgccaagaacaccgagaacactaaccaagttgctctcatctctaggttgcaaactgatcttgaggaacacaagaagaaattacaggaggctcttgatggctagcaggccattaatgaatattaccttgatttgtcctctaaactcacttacgtgttttgcctgacatgggcagtctgaccttcgtggagagaacactggcccatgggagggcattgttcaagagccggatggagacagagtagactgcttatcaagaggggtcatcatcacgtaactgtgacgaggtgatggccgacccaccagtggaggaggtggccagccaggatgttgcccaccaggccggccaacacaatgatgatggggctgacctggactctgtaggtcttgacttggcggctccaacttcagctcctgctacccccgcacacatgtaaatggaatttttattagtattcagcattatgtttgtattgtatagactctgtttttatgttctgcatagcctgtggcttttttagggcacctggcatcttagcttaggaacattactcattttacatttcacgtggtttgtgacctttttgaaattgtatgtcctatatggcctggagccttttcagaacattattttcatgtcctatgtggcctgaggcctttttagaacattattttatttttagctccaggatcttcatgttagtatctttggccatgagccctctgtttttgaacactactagtattttatcctatttcttttttatcatggattgtgtgaccgaccaggcagtctttaatcttgcatatcttcttagggccttgataagtaagggtccagatgttggaaattattttactag

SEQ ID NO: 27453 - DNA, 1328 bp, Cannabis sativa
taaaatatgaagaaatactaaaaaaaaatctcaaagtatccaccattaccacattgtgtatttaaatatagaattacatatgtaatttaataattattttaaaataaccatcaacaaaacgatacctcgtgataatattgaactctactaatatttaataacaatatatcattgtatggttattgtctataaatatatattcatttattgacatatcttgtcctagaatgatttgtcgagtaaggtcttagcgaacattctttgagtaagattagaactctcttaataacatccaaaaagagggagccacactcgctaatggcgtacctaccttaggactagagagagcaactatggcgtcccctctcaacctttttttttttccataaaaaaattaatatatttttacattttagtctattttatgtaattttttttcatctatactccctttttagtataatttttgtctatttttagatatatttttttaacttttactctactaaacaaattttctgagtccgttattactcacactgatagctctcctctttttcttatatataaaaaaagaaaaaactaagtcttgactattaattagaatttagaaatagagtaataatgactagctaattatttcttcactcattatttagctatgtgaatactttaaagagtaatcaacggttttttagttttgtagtgcggacggtgcgatttttaactatttttttaaatcaatttacacattggttttttcaatttctcaaatcgcacccgcactacaaaactaaaaaactgcaaaattgcaccgcaaaaaatagtgtggtgcagtgcagtttttacagtttagactatcactaaataattaaattatcactaatataacaaagcttgaacaacacttgtcaaaaataccataaagcttaaaaataaatatgaaaaaagtttcaaggtttaacaatacaataattagtgggctttgaactgagtcttcacatattggacctgaataaatattaaaattggtatttttataatatgtggtgcggtgcggtttgaaccgcacattaacaattcaaattaccgcaaactataccgtaccgcgcggtttaagaaaaattcaaactgcgaccacaccacaaagaatttcaaactggtatttttttgcagtgcggtgcgggcagtttgagtgggttgataaacaaccctaatttggactattcagggactgccacgttgctattgactttgttgagaatcatgggttcttgaaccgtatcagaatggacatgatcactatttgtataggtgcggatcggata

SEQ ID NO: 27454 - DNA, 3191 bp, Cannabis sativa
  modified_base (1906)..(1914): a, c, t, g, unknown or other
atctaacggctgttgtacatcacagaatacattccgtgaaagtacatcacaggacaaaatcgtgtccctataattatattatatgccatatataatatcatatataatactactaatactaagtatagttttaataattataataaaataataatattataaccgtatataaattaactatacttatttatattatagatagttctacatgcattgttaatgtgtgaaaaaattatagaatatataagaggaatgtgctacttctcccattgacaattgattttgagatgaacccattcacctttttctaaattctaacaatttatattaataattatttaattttttttgttttgaatttattagtcaaattaaaaaattgaagaatagtgtaattttttgttcccctctcctttaagttgcttattgtcatattcttttcttcttcgtgtttatgctttttctttaaaatatatattaaaatggataaaaaataaaagtatacaatttttcaacaaaaaaaatgtatatattattggattgtttatcagtccccatattatggattttactaacatattgttcaaatagagaacaagagtatgtagggataaataaaaagttaattttatgttttgaagtgtacgactctttctcaggtcactcgtttaaattgtagtggattcttgttcgcactaagctttaaccacacaatgtgcgacggatttggattggcccagttcttgaagacaatggcagaaatggtaggtggtgcacatgttccatctatccaacctgtttggcaacgagagatatttaacgctcgaaacccaccaagaataacttgttcacatcttgaatttgaagacgtaccacttgtgtctcctatttccgaatgctcaaacatgttgctggacccaaacaaccacattcaacgaccattctttttcagtctatataaaataaactcccttcgaaaacaacttccaccacacctagcaaaaacttgttcacgatttgatttactcgctgcatgtctctggaaatgtcgtacaatcgctcttaatctaaacaaaaatgaagttgttcgcttttcctgcttaacaagtatacgtacaaagaaagaggagatggagaaattaggtttgccattgggatactacggcaacgcttttgcatacccagcagtaatgtcgaaagccgaagttttgtgcaaaagctctttgggtgacgttgtggagttgatcaagaaagcgaaagagcaagtgaatgttgagtacatgaaatcagttgcagatcttatggtgattagaggccgaccgaggtttagtgaacttggaaacttcattgtttctgacaatactcgtcttgggttcgatcagatagattttggttggggtttgccgagattcgctggagcagccacctgcttttctatgattattagctgtcttgtgtcgctcgagaaggaaggagagaaagggatttcggtggcaatagccttccctaccgagttggctgtgcaaacatttcaacgagaaattgatcgtttcaagattacatcctctctttaatttatcattttctgtttggtatgtcttgtgtgttttaaaagcacaacaaaatatataatgtaatctcctacaagcacatatatattatgttgcatttatattatgtataagtgattaatattgtgatattttcagtacatatacacacatggcccaccctgaaaatatatgggcccaatacgaattaaattttggggccctcaaaaatttataaaaaaaaaatttaaaagaagagtgttatggaatttgaacccatgaccttggacattatgccatccatctcaaccaactaagctataaatatttgttgcttataatacacttaaattttnnnnnnnnnaaagcctaataatttttttatttttttatattgggccaccggcaagtgtgggccctaggtacgggcctagcctgcctatacctagggccagccctgtatacacagattaattgtaactttaattttttaagtgtccgtgtaaatattgtatttatagagaaccttacacaaattttcaaaaaattcttataatttaagttattaaaattattattcaaacaactagaggcgtatataactaaatattgagattttagacaagtaaaacgtgcagcaacatgtttaaatagtaatttcgacatatgaaatttttggtggaagatctcttataactttaatatatgaagatattaaaagtactaaaagagtgtaactgaaaataattactacccaactgtttagtgaatcttttagaaatcaaatattttgagagaggaaaggaaacaacaagtaataagtaataaatccagcaaattttggttcaggcattaatgatccttaattagtccaagagtcaatattattagcctctttagacggatagtgtaagattacgaagtattagaaagttatatattatagtaaatttggtacaacatttagaatgttccaaattggacacactttttaaaataccttttagagtagtatttttttttttctaatgctttaaaatataacaatatactatttttttagcactccattgaagatgctattagtaattttttatattatttattatgttaaaatgtgtgatatgtgatattaataaattacagaaataataattgcttggcaccttaagtgcacttagtatttctcttaatctatagtagattatttaataatattaacaaataaataacagctaacacggcggtgtagaactataagtgcatgcatacaatgaccaattaatctaaatgctagtactttacaccgagattggctatttcaagtgccaagaattaatggcacataatcgtcgtgtgtgtttatccgtaatccatctcagcggtcgaagagcattaggatataattaaatagagtgaatgttttattaaccattacaaatacgacaaacgcatatcatatttgttttacaattaataaaaaacaagaagcagcagctaagaacatgcatgcattcatgactccttgagccttatgcttcttatacatttatttatatgaagggtttgcattattcaatataaaaagaaccaacgatgatgctatgttatatatgctgtagatttagcagcacaggccct

SEQ ID NO: 27455 - DNA, 1449 bp, Cannabis sativa
taaaaattaactctataccatagagttatcagaaaccgatcctcgaaaaggcttgacaatacctgcaatactttggttagacttattaaaggctattacactcaaactgtaaacctcttctttctttgtcaatatctgcatcagtatgaacatgaaaagaaccagatgaacaatcgagcaaagctggaggatcctcaacttgagcaccagtagcagcaagagatttctgctgtgcatcaaaatactgaagcaaaaaattactacaccaagcaaacacttcattagaagggataatagttctcttatacaaagcattttttctctgattccacaaagcctagaaaaagaataacaaaagatcagtagaacccttatccatattggagaaaatattagaaagaaaatgtataatgtataatgccttccaagctttcctggctctagtgcattctagtaaagcatgcgtaacagtttcaggttgcaggttataaaaagaacacataagggatggaataatatgtctctggaaaaggaggacagccataagcacagaattagaaacaattctccatatgaaatgtttgactttaggagggattttacaatgccagactttagaccaaaagaattttgaactttgaaaggaagaagtagaaggaacatccctaccagaaagagcaagatggtatgctgatttaacactgaaaaggccagagctatcctttccgtagattaggtcatctttaccatcaatccctgaaattggtacatttaatatatcattaacaatacattcataaaaataggtgttgagcctatccagattccagcaaccaggttggtcaataaaataagacatagtattttgactagaatccaaatcacggatgggatgcttaaatttatttgtgggaagccaatgatctgccaaagttctgatttccccttcatcacatattttccatattagtctcgacactaacagatccttaccccagagaatgctacaccaagaaaaagaaagattatgcctagacttagcatccaaaatagaagtatttgggaagtatctagctttcaaagtgagacttaactgggaattaggttgagaaaagattctccaagcctgcttagcaagaatagctttgttaaaatgaatgagagaatgaaaactcaaacccccaacaaacttagaatgacaaacagactgccagtttttccaatgaactttcctaaaatccccagaggacccccaccaaaatctggccattgcagcctcgatttccttacaaagattaacagggaggcaaaaacaagacatcgcataaacaaggattgcttgcaccatagctttgaggagtacttccttaccagccttggaaaaatattttgaatgccaggattgaagcacagaggtaactttatccttaagaaaagcaaaagagtgat

SEQ ID NO: 27456 - DNA, 2804 bp, Cannabis sativa
tttttttttttttatatatttagtgtaattaaatttttatgccatataaaacttggacatggtgccctgttcgggtctgtagctattttatctttccaactgttttactttcattttaactgttctttccttcaatcttcttttaaatttgaagcagcaaccgttccccctcttttcttctccaccatctttcttcaccgccggcgacttcacacctgcatactgcctccattttttctttttcatttccatggatcctttgtcggatgacatccgcaacactctttctctcacagaggaagaaagctccattttcactatccccgaatactgtcccacttcaattgaaagtaatgctccaactcttctcgcaagagttcttactcatcaaactgtgtataaacaattctttatcgaccaaatgtcaagacactggcaagggcgtttctctattttgatttctgaatacaagggtgaagagggtttgtttcatattaagtttggttgtgagggggacaaaagaagggttcttaacaaagaaccatgacactttcagaatcatctcattgtatttcgggcgccaggtgttctgcaaattgtcacaaaggaagatctcatctacactccgttttgggtacaaatttatcgcctccccttcctaagaaaatcgaaagtgttggttgaagcactaggcaatattattggtgagtttattgaagtttttgatgattctactaacgaaggttggggaccattccttcaggttcgagtcaaacttgacacaactaagcctttgtcgagaggccaaatgatccgtttacccaggatcaaggatgaattttgggttgactttcgctatgaaaggctgcccgagttctgctttgaatgtggtcgtttaggccacccctttgaacgctgtgttgcttttatggagcggatggatagtggtaatgatgatgacttccaatatgggccatggatgaaaggctctaaacttccaaccaatggatatgatcgttatcggactgattttgccaaaggcaatgcttggcctttattgactagattggctcgatcaaccttaacctccacactaccggcgttaaacgttcgtcaccaacctcatccacgggttttacttcatggggaatcatccaatagcctgatgcataactctacaaataaccatgctataaacaacactcctcgatctactaatacacacccacccgtggcttttacttataccagcactcccattgctggtgtaatttccacttcccaatcagccctcactcctcacaatcacccacaccataacccgtgtaatactgtccctccacccattatctcccctggctctctcaaccccactaactttccccagaccaatactcaattatcacaaacggaccattcttatctcccctatcatcaacacaactcaccctccattggacaatctgaatcacacaaattctctgcttcatattcactccaaccctctctgccacatgattcctcacataatcactccttcaccccttcaaccaccaacaccatgcacactccaccacaaactcagcacacaagtagccaattcaacaaaccaccatcacttccacatgttcaacactagcagcctgccatcaaaattgacagcaaacaaccagttcatgcacctgtacaatccaagaataaggagttgttgtcctataccaacacccccattccaccagcatctaccacacccaactcaatgactatatcttcaacttctactgctgtcactgatctcagccacatttatatgcccgccattgagaacaacaccttcgctacttatcctccagtcctagcatctatccccattaactctaatctcccttctttttcccagccacaacccaaatcaccactcttcacatacacggctgcaaaagtgtcagactcaaaagaaaatcagccaccaagtacaactttcaagagacataatgactctctttccatcagaaaaatgctgaaacgatgtcgtaatgttgaaggatcgtcatcttctccattgtcaagggaggatgatattgagaagttagtttctgatcttgaggattcaagcttctccactaactcaagtgcggaggttgcaaggcaaccctgcgactcatcatgaaaatccttagttggaatgcacggggtttggggagcccgagtgcgtttagacatctccgattgcttgttcaacaacaatcgccccaagttttgtttctaatggaaactaaactaccggaaaactctattactcggattagacaatctttgcactttcatcatggtttggaatcacctcgccttggccttagtggtggtatactgctcctttggaaagagtgtgtggacatttctttattacatatgggctctactttttttgattgttatttgaagtttgaagacaaccctacttttcatttcacctgcttctatggtgcaccagaagcttgcaacagatcagcctcatggacccttctccaacatctttctgatgttgctcctctattaccatggttagttattggcgacttcaatgagagtttatccaattccaataagcctggtggagccttaagaaatgaaagccaaatggaggcatttcgaagtgctgtggacagatgtcgattacatgaatctccatttgaaggtgatcctttcacttggtccaaaagccgcactgctttgaacactattaaagagcgaattgattggtgttttgttaatcatctttgggagagctctttctgtacacc

SEQ ID NO: 27457 - DNA, 1220 bp, Cannabis sativa
tctgaacaagagggagactatccagaatgattctatggcaggttataacagtaacttaattgagggtttcaaaattaaggttgatgttgccttctcgaaggatgtggcgggtataggtgtagtggtctgggaccatttgaatcaattgcaggccattttttcttgcaaaagtggctactgcttgcatgttacacaatgagttgttggcggctctattgggaattaaagtgtcgaggttgctggggctgggtaggggagttattctctcggactgtcaagtgattgcgaaggttgtggcaagatggctccaaattggttgacgatgtcttcctttgccaagctgttgcaggcaattgatgggactactttctctatgcattggattccgagatcagctatgctgaagctcatgctattgccaagtgggttttaaggaataattattcagattttcttaacttctgggaggtgaatccccgtgtgttcaccactatctttgctaactagactttttttgggagatacttctccttgtaagcataaattttatcttgttaatgcattttgtttttaagcaaatatatatattaatatatatatatataactaagttatctaaaaaaaattagacgaaattacttgagaccaactaaaaagatacccaatcaaaataaataaattaaacaaacctacaaaatgaatacataaaatagaatgttgattagcacacaaaacaaacaaaagttaagaaatctgtaagaaaattgcctaactattttccttttctaacaagaaataaaaacaaaaaaatttctttgaaaacttcttgaataaaatggtgtcaccctttattgaaactaacatgtttactctaatttttacatttatcttctaaggcagaaataatcaaacaatgacacacctacaaccacaaaaatatcaatacaaaatgagaattagcgcacaaaattgataatgataaagttaaaaatatttagcattgaaacaaggtagctcaaattaaactttataataaaatttttattattgctaagaacactctttatcacactctctagttaatttaatgacaaatatcctcttttcaacaaggcttagttttacttaataactagtcataatattatacttttatttcaattatatcattcccactaatttactcaaattatttctgacttattaaaaattaaatattt

SEQ ID NO: 27458 - DNA, 3601 bp, Cannabis sativa
  modified_base (630)..(632): a, c, t, g, unknown or other
  modified_base (3439)..(3440): a, c, t, g, unknown or other
tgcaagtagaatatggttacctttgaagaagcaacagaaaagagtgagagaaactactacaaggttcgtgggctatggaaacttcgaatttcgagaaggctttttatggtttgtcacggcgttattttgacgccaaatctgcttcaaaattacgtcctgtttgaatatggaaacttcttatgttttatttatttttctgttatataaaaatcaaaattacataatttaagataatattttcaaaataaaaattaagataattttttttttaatggataatttagtcaagacaagttacaataataaatcataagatagctttgtaggacaatttggagttttttttttttttttaacaatgaatttcattgaaaaaaaaaattataatgtcatacaaactttaagacttaaaaatttcaacaaaagaaggaatcttatcaaatcatactagttttctataactgtagcacaacttggagttggatcaataacaaccagctaaaaaaacactattcttctttatagtttcttaataagcatttacaacgggattgcccattggagtggtcttgctacatatgtaatgtaatccaatttactaaggtagtgtttggtaacacttttgttttnnnattttaaaaacagaaaaatgaaagtagattttttgtttataaaatttggtttttaaaaaacaaaaatgtattctataactacttttgtttttaaattttaaaaacagaaaacaaaaagtgtgttctgtaaccacctttgttttataattttaaaaacataaaacaaaagtgtgttctgtaactatttttatttttcaattttaaaaacaaaaaacataaataagttcaataaaaataataaaaatttcttcatgtttttagcttcgctattatcaataataaccgcatcactatctgttcgtgttatcaatctacatgtaattacaaaactaatcctaaaatttatataaaaaataatgataaaattaatttaaaaagttacaaactaatgaatcataatcaccctacaatcaataatacagtgaacaaatgtcaaaaatctcgttagtgttcaaacataccgtgaacaaatgtaaaaaatcatgtggtattcaacaatacattaacataacgacaattcttagagaatgttttctattaaagaaaaaaaaaaggggttgttgtggagaaatggaaagaaaaagttgaaggttgaggccatggggtcaaatcattcgaatagtttgggttgaattttgcaatttagactaaatgccctattttcatattcaactccacaagtccataaaactgacagaatcttcttatgataaaaaaaatgttttgaaaattcagttgtgaatgttttgaaaatagttttgcatactcccccaataaataacatcagagctgatgcagaaagctctgctggcattttattcacagcagagagcctttcttctggtgagtctctcccaccaaataagttttcagaaaaaaaaaaaaacttgataagagcactgtgtacatgataaacatcaaacaaatataaataatctcagaacagctagaatttcagtttctctcatctgcactaaagaaaatcaagttttaagaaaattttgcttgttttctacaaacacatacacacacaacagaataaaataaacaaatgtgtgcaggactgataaaaaaatatggccaatgaactatccagaactgaatttcttttatgaaccataataataagagaaattcttaacataatttgtgaattatttatgataaattcaatcagacatttcatcaaacattatacatacatacacaatctccaaactgaatcagacatttcatcaaatattatacatacatacacaaattctaaactgaattagacatttcatcaaacaatataattacatacagaatctacaaaatgaaattttcctaaaaatttacatcaaacaatatacatacattagatacactgaattcagtttgaacagtaagagaagtcttcatcttaaaatcagtgaaatgggttccactaaaaacaaatttaacatgatatgctaaattggtttactactttaaaccgcaaagaacacacaaaaatcatcaaaacgagcaacaattatatgaaattgacaacacgttaacatcgggctcttctatggtaaaccaaattatagttcagagataagttatttacaaaattaagactaaaactatacagaaggaggaggagaaagttgtatcagcttcagctgagggcagagaggtgggatgagagtaagaaaggagattgtgctttgggaaataagactggaaaagtggaaaatggtaggagagtgttacaggcatgaattctgttgagagagtgtgggagcttgaagcttctaattggtgagatttataggagatgatattgtaaataagaaagtagatcccatttcagagattaaacccaaaatctaatatcagagattaaacccaaaacccatttcaaagattatatgagaaaattaaacagaaatttccccaaactttgcaaacctaaaataaaaagaaaatacaagagaatcatacctgtaacaacaaaaattcttcctcaagctactctcatcatatgatattctccttttacattttcaaatctagcaatgaaataaagagaaaaagaaaatctgagagagagggagagagagaacgatgtacagagagggagatagagaacgatatatatatatatagagagagagagagagaacgatatagagagagggagaggaagagatattacctgtgaagccatgaaagacaacttgagcttctgagaaaataagcaagagagataagccaactgagaaaaagtttttaaaatttttaaaatcaacggctgtgttcggtaaccattttaaaaatggttttctgtttttaaaattaaaaatttaaaaatacaaataaaaattgtgtttgataactcttttttattttttatttttaaaattaaaaaacagagaatggagtttaaaaacagattttggataattttaaaaaattttaaaaatacttttatcacttgtgcttctctctcattaatcaccaccttcagaggagttttcatggcttcatcttcaccattacaggtaaatctcttcctctctttatctctctctctatctctctctgtatatttatatagctctctgttccactctccatatttctcgcctctctctctatctccttatttctcagatttttttgttattccttcattctcagatttgaaatgaaaaaatgagaagagcatgacaatgaaagtaatttcctagagagaaagatttttttggctattacaggtatgattttatcttttctcttgtattttattttgattttagggtttttgtttgagaaannttgttcttagcttttattaggtttttggattaattctttcaaattagtttggcatttgatatctcaatgccgagcctgattttggattgctattttttgggtttgatgttatttctctaggttcaatgggattttgggtttgggttttttgggctgagaaa

SEQ ID NO: 27459 - DNA, 3348 bp, Cannabis sativa
tctctctctctctctctctcgctctctctccatctcgatctcctcctttctctcctccacaagccttcattcaaccaagcggagtcacttccattcacgtttcgctctctccttcgacgtggaagcccacactgctgccccaactgccgtcgctccctcatcctctatccaccccccacgccaatgaggtatatatatatatatttgcaaattaggattttttaattttcaattcaagtttctgtcttttgattatgggttagtaattcttgttcttgtttgaactttaacatagcttaaaggaaaagaaatggttccaaatcatcttgtgtttcctttagttttgttaggtgatggtaataatggatttttttttaaatcaaattgatatcgaaagaatttggtgcactataactgagaagacaattttgattttaaaccataggctatattatagcctatggtttgaaactatcgactataacactatatagcctatagtttaaaaccgttagctatatcgtatagccgatagttttaaaccgtaggctatactacatccaatagttttaaaccataggcaatagttttcactattttcgacggttttaactccttagtaaattttttccctgacagttttctagtgttgcctattctactcaattttgcaacagttgactaggtgacagttatagcactgacgacaatacattagctgactatttaaaacagttgaaaaaacccaattttttagtactgcacccatggcacgagaaggtcacttggtgcataaaaggtctcttaaggtgccaaagaagtatttttaggccaaaagctcccttagcacaaaaagttgagccaaagcgcatcgtgaggaggctcgaggacacgccttccatctcgcaccgtgcgcaagaaatatccctaattaatcgtgcaccaccagtaggatcctaggctcgagacgagagcctcccatcttgcatagtaagaaggcccccaatggcacaccacgaggggacttcaaggctcggggacaacttttccatcgcaccgtgaaaggactccaaggcacagggataagccttaatctcacaccacaaggtcactccaatagcgcgggaccaagtttcctttatctctcccacacacatgctcttctcatcctctctatcacaaatatatttaattgtccattcgattaaagctcttttaaaataggttcgagtcccttagaaaaaggagttggaaaatcttgcaatagtacttgataccaaatatattaaaattaaaagtcctcattgagagtcaaaccaactcgaattcagtttcagccaattaaagttaatcaaatcagccaattaagaatgccatctcagataagggattaaagaatctaactaactatcatcgacgaatcctaaattactctaatgtaaaataggaaaagacaatcttataaatattatgcattgtaataggaaaagcaagggctcagatttagattccaagtaagaaaatctagaaaataaaaaatttctattgtgaaacaggaaaagacaatcttataaatatcatgaaattcccatttgaaacctatataattctaaaacttttgaaaagtttaaagacttcaaagtcatggctgaatagcaattaggtaaattattaaagacactgtgataagatcatagtggaaagtgtttggatttcaaattcaaagattaattgttggaagaagggatattatcccaacttacaacacctggaacacctcagcagaacagtgtttcagagagaagaaaccgacccttgtttgacatggtcagatcaatgttgtgatactcatcactatcattgtacttctgatgatacacacttcaagcggctactttacattttgaatgtagtaccctcaaagagaagaagcaacactctaatagaatgagaataaatcccatttgaaatatttttgtatttagggtggccctgctcatgttcttaaattgaagagtgcgaaacttgctcccaagtttgaagaatgtatgtttgtgtgggttattcagaggaaactcgagttggatacttttatagtcatgaggacaataaaatatttgtatcgacaaatgttatatttctagaacatgactatatgaaagatcacaaaccacacagtcaagtggttatggaggaaatcagaaatgatccaatttcgaaaccatcaatttcagtaccatcagttgaatgaccaacaaagatcaccactattctggaaaaggaaaccctgatacatcatcgtagtgggagggttgtgagatagcctacctgctatgaatatgtggcacatgttcttgaatctgacacaaacaaggacgatctattgacttacaaagaagcaatggaaggccctgactcaaataagtggaacaataccatggatcaagaaattgattccatgcgcaccaacaaagtcttggaatataaaaccccacctgaggatattacaccctgtaagtaaattttcaagaagaaaagaaatgctaaagggaaggtaaagacccttaaagctaggcttgtagccaaaggctacacttagtgagaaggcgtcgactatgacgaaaccttctttcctatgtcaatgcttaaatctattcacattcttctatccgttgttgccacttatgattatgatatatcacaaatgaatgtcaagattgcttttctaaatggtgatcttgatgaaactatttatatggataactagaagggtatgtcctaccaggaaaatatcacaagttatgcaaattccttaaatccatttatggattgaagcaagcctctagatcgtagctagaatatcacctttaataggactattaaagagtatgattttgaacaaaacaaagacgaagcatgtgtatacaaatacaataaaggtaatgtagtagtattcttagttctttgtgttgatgatattctacttattggaaataatgtagaaatgttatcagacgtaaataagtggttgcctaaaaaattctaaatgaaggatttgggagaagcacactgtgttcttgacattaaaatctatagagatataaagcgaagtacattaacactttcttaagcaacttatatcaataaggtgctcaaaagattctcaatggagaattctaagaaaagacagttaccgtctagacatggaattactctgtgcaaggatcaatgtccaaagacttcacaggagatgaagaacatgagaaagtacccttacacatcagctgttaggagtttaatgtatgcaatgttgtgtacaaggcggacataagctacgctgtagggatt

SEQ ID NO: 27460 - DNA, 1785 bp, Cannabis sativa
tatatatatatatatgcatgtgcacatgttgtgttgggttccattcatattgactatgaaatcaagtatatagtggctttagagttgggtgggacaatatttgtttgaaattttatttgtatatatatgtgtagatgagatggaatcatgggattagatagattatcattctccttaaaagaagggacttgaccaaagccaaaagcacttaccatacatatgaactctcttgctttctctggttgtttcattatagcattgacaaaaggtggaaacaaattgtgaaaaaggtcatcttcttcttcaaagccaaaagctttctaaggttaagaagtgaacctttttgagcctataataatcactactacctaaagacatttctccaaagattcaaaaagtgaaaacactctagggatgcttgaccattgacctatcatcaataattattaattagttctaaattattgtataattaaacaagtaatatgtgaaacttaatcatcaccaacactcaacaatacccaatgttttagaaaaaaaataactaatcttgattttgctaagaaaaaaaagaaaaaatcagacaggcagcatagcatgtcagcagcatataatgatgagttatgaaaaaggaagaagatgaagagaggtcagaagaccaaccaagttattaatcagtaaagccaaacagtttcaacttttttcttgccctccatctctattcaaattaattcgtataaagtgactttgtttcatttgtggaaattttagagcatggctatgggatttttttttaaaaattttttttactcaaattttagttaaaatacatacaatgttaaaagagatttttttttttttaatcttactccaattatgctaattcattaatttgaacttgattgtttaaataatctttttatgatttgaatttgttaaaaatattgatttaataaatactggaaaaataatattggtttttaattaaaagaatattaaaaaagttacaaaacaataaggagctgtccatatttagaagcttccttttttattttaaatatatatttaattaaatagtaaaattaaacacataaactctaatttgtcttttattatcgataattgaattaaaatcacatgttttaaaaaagttaacatttttaaaaattaacatttaattatagttatttttttaaaaaaaaatttccaataatacctattgaaaaaaaataatatatatatatatattgtatgatcggagcttatctttaaaagacttactcccagaaaactgatttttcttttaattaatttaataatatgtacaaactaaaaaatatatattaaaataataaattttaactaaatttgagtatctccaatatgttttctaaacacactttttagctaaaataaagggtgagcttttaaaaatataagctccaaccataaaagaaaaatagctccttataatagaaaatgaatagagaactctctacttttttgttaaatttttttgataatattttaatcaaaagtattattattttatcattatatttttaataaattaatttatatttaacaatattaaattataaaatattattaaaataattaaataataattaaaatagagagcatgattgaagtaaaaaaaaaaaaaatggaagtctattttaattttttagctattttagctaaaatttggctaaaaaacaaagagtgcagttggagatgctcagagcatttggacttcacattaaagaggcactctatacttta

SEQ ID NO: 27461 - DNA, 2042 bp, Cannabis sativa
  modified_base (1358)..(1362): a, c, t, g, unknown or other
tttttttttttttttgtagtgtaaattaagatcttggtaaaataatatcgaatttagtatatagttagcccattaatcgtaatgaaaatacaaaaatttagagtatgaattcaaattcgtataagaaaacaagttagtgtgtttaagaaaataagaatattgacacaattaaaagcacgacatgcacgaatttaaactcgctacacaaatattgggtatggactgtgctaggctatcttataaaattattgacaccacaccacacaattcatattttttatggtctgacacgactcgtactttcactatcttttcaaaatatagggcaagccaaacactacacatacatatatttacaactctaattggttagtggctattcactgtagcgtgaggtaagatttagctaatgttttacggtaaaagaaagaataataatgaactctttatctctcaaaaagaaataaataaaggaaaaaaattaaaaagtgaaagaaaaagaaatgaaagatacataataagattataaacaaaatttaaccaatgaaagcatgaaaagaaaaattgtcaccaatatgatcacggtgaaatgcgtcacatataaatggtgatgaaaagttagtgatcatgacaaagtgttgccaagaatcttttctttaataattgattatctttatacgtttcatatagatatcgttatgaaaaccatttcaagaaaatacaaaagaatatcacattatttctaatattaagtattatatatttacaagcatataatttggctaagttgtacatgagaaaaaacccttctaaacggcaatccaatatatttgattaactcacatgtagtgtagcgtggctagtacatcgtagctcacagcttaataaataacaataataatgataataatattcactcactctcatgacacccccaacttgactaaattcttttccctaaaaagaaaattagagttatgatatatatactttaaaggtttaaaccataaagtagaccatttgttatatggtggatgatgatgagtttcttactaggtgtgtgttatacattgtacagagggacccatatatgtacatatactcatatatacacatataaaaatacaagaaactttttaggtaggtatatatatatttatggtgtaccccttaaaagggatataccgatacatttttatctgttttaatgtctgaaataattttttagtcaaattttttcttataattatgtaaattatagttatttaagacatcatgcaaaattttaagaaatttgaaaaagtttaacacgccgaaaattatgttcaaacagtatgttgcacgcgtgactattttannnnntacgcgtgtaaaatagactgtttgaatattattttctatatgtaaattattcggaatttctcaaaattttgtaggatatgttaaatagctataacgtatatgaatatgaaaaaaaaattagactaaattttttttccggaatacatcttttttaaggggtgcattgtagaatcactcaatattatattataattataaaacacaaataataatttacgatatgtcaaaaataaaatttaaattagtaaattaaatgcgcttaaaaagtaataagtatacgtgtaatgtagaatcaagatttcttattaaaaagtagtatctctattgtgttaaattaatcaaaatttgatacctcaattaattttttatttagttaacaaaagtagttaacatattcaatataaattaaattagttaatgtatcaaattttgattgatttaacaaagcatgaacaccaatttttaaccgaaaatcttaattcgtaacatgtaacatactaataactattttaatgttatttttgatattttaaattatcaataatgtcgatcaataactacaatatatgttttttatataaaagaaattaagtaattatatttcatatatatagtgaaaagagaaaacagagtcctagtgatcatgatcttatagcaaatgctatatataaatatatata

SEQ ID NO: 27462 - DNA, 2586 bp, Cannabis sativa
ttctaaatgtcatttaaagaatttgcgtcggttttttaaaccgacgtatattccgtagtcgcaaatagttttttattagcgtcgtttttcaaatgacacaaaaaataattttcttcatttacaaaccgtcacaaaatatacattcttctttcatattttctacgtcggtttgaaaatgacgcgaaatcgttcgtggcatttcaaaactgtcactaaaaagttataccgtcggttattaaatgacacataaattactgaaataccttttttcttcacctattgcgtcgtttataaaatgaagcagaaaaataggtaagagaaaattacaatttttcatgcagtttttctcacatgcattatcaaattttagaatgattttatataatagtaaataaataatacaaaaaaagtttcaaagatctcaatagagcacaatgaagtctaatgatatagcttagctttgctaaattatgactctaagaacaatttctgcaacttctctgtgccttgacatcatgaactcccctgtattcctgtcagtatatataatataaaaagtgcaaaattttatgaactacatccaaatacatgataaaattgattaattataggaacagaactaaatttttgaacttaattactttatttaaccaagtaatccaaaacatagtttaaccacaaataatctttgaaaaattatattattgctcccattcaatgatgccaaaaatactccaagattactgaatattcttccttattactgaagtgattaatgtttattcttgaaaagaaggaaaaaaaacagggtcatgtcattatatatgagtagctcttgtatctattcactaaaaagctaattaaacaataagaagagaaacttgatgagcacaagcatcatttgaaaagccatctcaaattgttttaggaaaaacaagaataatatcagtgtatccaaagtcatcatgttctattaatagattagtattgctataccaaactctgatatttctcaatattatgaattattggtagtgttgatgttttataaattttctagcatacacctcaattatatcttcttgtatgaaagaagaatgagaaaattcaatttctttcagaattattagcttattcatattatttatatctaacaacctatcccctaactaaatgactggtttaagtcctaaagactccttttgagtggatgatttcaatgtaggtacaagttacgaaggcgatatcatgttaggctatcaaataaacaccataaactggaaaatacataagacagaaaataattgtattgctggctggtacagaaaagttttaagacaaaaagaccaatcgacatatgacattatatacatatcaatggacttctcacaagaataaaatgcatagtaataataccaattaccataggtaaaatttatgcaacaagcaaacatgactagacaatcttctctattatctttttggaaagaatgcaggaaaacaattcaaaagcaaaaataggtctgaagaaaaaatcaaagctgaatgacacaatattattacctggtttctgaatggttgaagaactttctgccgcacaatacaattgggaaataatgctacaggaggtacctatgtagaaagtcacatgagattctggccacacatgtataatatatattatatataaaccagtccttataagatatttttaaaaaaaacatattatgtgcaaaccacgagtgaaagaaaaacaagaaaaaataataaaatcatagtaatatgctacattaaagtccatataaaatcaaacctattttgattatcgattgtcatgtagtagtgggagttttttttatgctaatcttactcgaagatctactcatattaacaaagcaaagatcctctaccgccaagccaattactcagctttgaccaactacacttcgtaataacaaagcttttgagttaagtaaagaacaatctaaacatctaaattgcacaaagttaatctacaacaagtcgtgaatgaattcaacagtaaaaaatagccacaattgattgagcatctctactagatactctagtagctctatcatcatcatttattttgaaaattaatagcacaatttcaacatttctatctatttaaaaataaaaaatcaaaatagaaactatcagtataaactaacagaaatgatgaggtttagaaactagcaaatgactaatttatttgttcttagcgcaaataaaattaaacaatattatcaatagttattgtgacaatagtaaatattatttcattcaactataggaaaggtgttctaatctaactattactttttctttttttataaggattccactatatgtaacatcacaggaaatgaacataggtgtacggttgacttttcagatcagaccaagtcatctaaaaaaagcagaggaatgtacctaattgacttgtgttgatcaaacatttaccatttctcatttaggtaggtgtgttatcatcatttaccatttcacacacacactcactcacactacaaaaatcataaaagtactgtcaaaaaagaaaataaa

SEQ ID NO: 27463 - DNA, 6899 bp, Cannabis sativa
tgtgtatgagactcatcaagaatctcttgtatgataattttatctgccgggacacaaaccctattcttttatcataataacccattagatgaaagtgaaaagtcttttgctgatccgacctctagcttctccttgtgcccctgtaactgagaatcactttgttgggccaatctttccaacaaatcagactgcagagtaatattagcaagttttccgattacaaactcaattcctgctctagccatatcttctaccagctctgctcaaatcttctttaattcataaacttaccctggcccttttggactttgagcatttgctaccacattatcttttccagggtggtagagaatctcgcagtcataatctttgaccagttccaaccatcgtcgttgcctcatatttaaatccttttgagtgaaaaagtacttgaggctcctatcatcggtatagatctcacacttttcaccataaagataatgacgccaaactttcagtgcaaaaataactgctgccagtttaatatcatgggtaggataccgctgctcatactctttcagttgtatggacacataaggaatcacttttccagactgcataagaacacagtctaacccctgtttggatggatcacaataagtcataaaatttccatcactgactggtaaatttagcacaggagtggtaattaatctttcctatagttcctgggaactagtttcacacttatcagtccaaaaaaacttacagttctttcgagtcaactcggttaagggcatacaaaatcctagcaaagccctcagcaaattttctatattaccctgccaaacccaggaaacttctaacttcggttgcttacttaggtcgaggccagtcttgtaccgcttcaatctttaccggacccactagaataccatctatatttaccacatgccccaagaaacttacctgagacaaccagaattcacatttcttgcacttgacatacaacttatgctccctgtggcattgtaacaccattcgaagatgtctttcacgtgtctcttctatatttgagtaaattagaatatcatcaataaagacaatgacaaaatcatccaggaagtctttgaacactcggttcatcaagtccataaatgccgttgtggcgtttgttaatccgaaggacattactagaaattaatagtgtccatactgagtctgaaaagctgtcttaggaatatcctcttcccaaatcctcaattggtgataaccagatcgaagattgatcttggagaagacgatttttccctgtagctgatcaaataggtcatctatccttggcagaggatacttgttctccactgtcaactcgtttaacttcgatagtcaatgcacattcgtaaagttccatccttatttttcacgaaaaaaatcggtgcaccccaaggtgaggtacttggtctagtaaattttaaatcaaacatctcctataactaaactttcagttctttcagttccgcaggggccattctgtagggatctcttgatacaggctcttcccccttgtattagatcaatttctaaatccatttcatgcttcggtggtaaccctagtaactcctctgtaaaaaaatccagaaattctcaaaccactgggacatgctccagtcccactggtggttccctagtagtatccactacatttgctaggaagtcgatagatccctcacacaacaaatctcttgccttaagtgctaaaattaggggaattcgggatccttgcatctttcccacaaacataaaggggtcctcaccctcaggctcaaagttaccatttttcttttgcaatcaatagtggcgttatattttgcaagccaatcgttacccaaactaacatcaaattcataaaaatttagttgtattagatcgatcaataactcccttccttccataaatactagaagggaccgaacccacctgctagagataaccagctccctagtaaggagtaaagttctgaagcctctagaaagtacatcactaggcctattcaacttctcaattattctacttgaaatataagaatgtgtcgcaccagaatcaataagaacagtcaataaagtaccaacaacagaaagctgacctgtcacagtggaaggaccggcatcaaccttggcctgtgtcagagcaaacactcaaataggggcaggtgtatcatccttcttttgttctagtcgcagtagctgtgggcaattcctcttcaagtgacccactatcccacattgaaaacaagccccaggttgacactcaccctggtggcgcttgttgcacctcgaacattcaggaaaagtctgccagttttcgttcccaccacgacggaaaccttggttaccttgaaatctcatatttggacctgcaactgatggttcattaggccttttcttgcgatcaccaatgtcattatccctaccagaaccagcactagatgtgtgcttcaaagaatctcttctcgcaatatttttctttcgtatctggtcttctggactctcaccatttagggccaattcaactatctgagcataacttcgaacaagcccaggttgtttgggagccactatcacatcccgtggagtatgttcatccaatcctcgaataaacttttcttttctagcagcttcagtagccacttcatctgaagcgaattttcccaatcgatcaaacttagtgggatactctgtcactgtcatgctaccctgtgtcaatcatataaactcttctgcttttgttgctcggatagactcattgtagtatttctcataaaatagtcctcgaaaagcatcccaggtcatgttattcaggtcatgaccctaagacatgatgtcccaccagatacgatcatcttctcacagcatataaatagcacatttgacccgatcattgtcctcgacccgcataaaaataaaaatggatgttatcatactcatccactgctccgctttgagtggatcaacaccaccctcgaacactaccatggctccaggcgattccctgcatccggtggcactaccagaggtgccaaaggatcaagattaaggtttggaaaaggctgagctcgctgctccttagctctcaaattttgttcaccctactaacggatagtctcttacattgcaacatataactcttcccagtttagtggtggtggagggttgccatcattgccaaccctgagcccagcaagctcgcggttacctctaccaatccacctcgggtgcataatctattcacctacggtcatattccaagtaatgacaatactgataagtatttcctaacatctcaaacattcctaacaaccagcatattaagacaaacgtacatacaggtaatcaactaataatctaataattaaaacttattgagccatgagtcgaacgaatcttcgcagccaatgtacatatcaaaccagccttcaggatctaaaaaccttggcgttctgataccatgttgtaacgccctgtccaatagggaccccacatgtgtgtgattttataaaattcttattttataaattatataattataccaaaactgtaggtaattaaaattttgcaatttaaaacaaacactttaatatactatttttttttataaaagttaggtactattctttattgggacccctcataacaaaatatatacatttggtttcaaaatacttttacaacataatctttacgtttcaaaatacaatcaaaagaaacatcccgtccactgggccgtggcacctcgactgatatgttcattgctgctccgacctcagcttcatggctgctcaatcttagctttccctttacctgcaccatatagtaccctaagtcacagagactcagcaagaaaaacgaaataaataataatcgatataagattcatctatttaattctcacaataacaggctcatacattcgaataatacagtaatcacatagtcccgctacttcacaaaatacccttaccactcgcttaccacgagttgaatatgtcactatcgttgcccgataaagcaaacgataagtaagaaacctaaccgcagtttcaggagtaattactcgtaacagtaatgatcatttccaacactcagttataattgaggcttcgtacataattaatatggatctcgatcataatcgagactatacaatacaattgtcaatcacttaaccctaagtgatgcataacacttttcttacctcagttcaaaacacaagtgtgcgggccgacctgagtggaaaacaagctaggcgatcccggtcctatgtcacgacaaccaaaactcaataaaaacctttaatcaaatttctagggataaaccctaatcctatttccccctggatcaaactaacttaaatatctctaaaatactctgaattacactccaaaagataccccgaacaaaaattagacacgaagagaaaacccgagatttccccatactggcaaaactggttgaccggtttgcagtggcttgcataaccgctcgacctgttttttgggtagccatggggaaatctggtttttcaccccaaaatccaatcaaagctccaccaaacctgctacacttttctagaacaatccaatataataaatataacgtatccaaatcaccaattcaccataactcatcaacttgctcaaaaacacattctcaaatgaaaatttagctcactttaccacttctaacttatgcaatccaaaaagcccttacatctaaccattacaagcttaaaaaacctcaataattaacctaaaatcatactccaacatcaattgaaatcacagcccctgaactaaacaaaaccctaatttaatcaactcaaaaccatgagaaaaacaagggaaaatataacaagaacttaccttaaagattttgaaagcaattagggttggttcctagctgaattggatcgtaagagatgaagaaataaaattttcctttcagcttctactagggtcaaaaaagaggagagagagagctatcttaggttgttcattatttttgttggtcattatcttttaattcctacataaattcttttcttttccttcttcttttaattaattaagcttaataataatcagcccaaaaatgcacataggacaaaataccgagctttgtaaaattactaatcttcccctcacaaaatccttaagcctaaaaaaaacctaagggtactttggtaattttaactaatccgtcaaaccgacactctaaaattctagactagcccataatatttccataatattccgtcccttattgtcgtgacatctcagaccactccatccaatttccaggcccgaatatattttattccagaaatggtatccacgatagccacatattccaataaaatctttgtaattaataaattacgctttaattaatcatttactaaagtcacattaatcaaccctagtaagatcataatcttatctcattactagaataatttatatatttaataaaatattcctaattttaatatcataatatttttcgggatactacatgcaatctggccctggtcacttgccccaacgcccaagatgatgtgaaaaaggagaactttagggctttagctatttgggtggtggagaaaagttacaacacctatcacagatagaagaaggaggaagacctgatcactcagacatgaagtgccacatagcgtatggaaggggaagaggatgtaggaaagagcctcgaggcttcacacccacaattttctttccctatacctaacaaagggactttgggttccatctcttctggtgtcagtatgtctccattatatttttttttacattccatctatcaaagagtattcccatgcatggcctataggctttgacaaaaggctcaataggttgatgatgccccgttctccttggggtgctagagaaaaaattagatatttatcattcatagtggacttcctggatttgtctcagatgggatcgattctccctatcccttttttattggatcactttgcatacttagtttaaagttagtttttcccgtcccatagctacctaagggatggcgaccccaataatttggtttatcaatttggtaggatttcctcattcaaaattttcttagcattagtcgagtcattctatgtgaaattgatatgatttctaaggtcccctcgttcagcattgattttttctctctagtctaccgacggatctatcttagtttgaccaccttttatcctttgtccttagtacacaaacatgatgtgatgctccttactatcctagggttatgcttccttcgaggaaacatatttccccagaaacatttcccttgcaggaaatcggaatgaaccttgtgtgggtcgtgatgggttttatttgtccctagtattagcgaagggttgtcctttgaagtaggagggtctttagaagggtatgggataggactaggcattttttcctttcatttttcttaagttcatgagggaccttatccattgtcatgaggcgttaggggaaaagcagtgtgatcaactttgaggcccacctgggccgttgcctgttgcatagcaaccaacgcctcttcaattctcctattcatttctttttgtcatgcaacatcttcataattctttgtgccttgttttcttaacgacacaagctctacatacacatcttctttgccaacttcataggtttctttttcccttaaataatcaggattgttggtatcgcctcctttcccatccaatcaagaaactactccttcttcttgacgtgccatgttatcgaactattatggatgtcattggttgttccttgttaccaccatgtagacatgggtttgtatatatttctttctaaaagactt

SEQ ID NO: 27464 - DNA, 1470 bp, Cannabis sativa
  modified_base (29)..(45): a, c, t, g, unknown or other
  modified_base (899)..(902): a, c, t, g, unknown or other
  modified_base (957)..(975): a, c, t, g, unknown or other
  modified_base (1031)..(1041): a, c, t, g, unknown or other
ttgggcccctgggctgggtgggccctagnnnnnnnnnnnnnnnnnctatgcccagggccgggcctgttgagccggttaccatttttaactaaattttctatccttgcttctagattgagatatacttaccataggataccaaaaaaacatactttttatcaatctaatagttcaaaaatgattcaggtgtgacattcctcaaatatgacttgaggttttacataattggcctattatttatatttataatcaataattatgttcaacacatttttaacatgtcagatgatacacataacatgtgtatatatttaaaattttaaagtttttagaaaaccatcattaaaatagtaattttactaataatttctattaattaaaattaaattttaatttatattgacttttattattttactttgggagcatttaacaatgtgtttgttaacactttttttttttaatcaattctctatttttttaattagaaaagtaaaaatattttccaaaaatatattttataaaattattttcattttttaattttttaattgagaaatcaaaattttaaaaattttgaaaacagaaaaaaaaaaatcacttccaacatttttaaatagttttttttttctcttaattaatattttagacttcgacctcaacctggaccttgaaacccaaactcggactctggccttgaccccagtcccgaacacggaccacgaccccaaccccaactcgaacctaacttgacataaataaaatcaaaaataaaaaatgaaaaataaagttatagaactcactttgttttctatttttgaaattaaaaaacaaacactacaaaaaaatcttacttttagtcacaataaaacttttgattaaaagtgaaaaaattgtgnnnnattataaattattattcctacgttgtgactaaaaagtccgtgactaaaagtattnnnnnnnnnnnnnnnnnnntattgtgactaaatgtgtttttaatcataatactgttgtgactaaaactaaattannnnnnnnnnntatctaaatactatgtttagtcacaaagaatttttttgttgtgactaaaaatcacatttagtcacaatttttttttttattgtgactaaaaggttgtcactaaaggtgattttttttttttatagtgaaaagtggttatagaacacgtttttatattttaaaaaaataaaattttaaaaacataaattttgctttcatttttgtgattaaattaaaaattaaaaacaaaagtgttaccaaacactcagttttttaattttttaactacaaaaatgaaagtaaactttttgtttttaaaaaataaaaatatgttctataacaacttttgcttttaattttaaaaataaaaaaaatgtaactttcatttttatttttattttttaattttatttaagtcaagtttaggttcgagtctggggccgaggtcgt

SEQ ID NO: 27465 - DNA, 1981 bp, Cannabis sativa
ttactaaataattattaataaaaatgcattacttttattgatagacttatgtttttaaacataattactcagtttttttaataatttcttctaacaataatcacttcatggtactactacctttggaaaaaaaatgtaacgcctcaattttttgcctttacaaaaagactcttccacaacttgaaaagattcaaaattacttgaaatataatgatgggttatagaaatcaaaataaaacaaagaatgatcaattgttaaaaataaaactaaggcaacactagtgttctagatcgttttcccgtttgtagtctcacgcagtatacataccagtattgactctgctcactatacacactacatttcccttgtctactacctataagggaaagcaaaaaggtgagctaaatgccctaaaaaaatatttttcatacagtaccatacatataataatatatataatgtactaattaaattctagcaatatcatataacttatcttataactattaggaaatcattctacatatgaaattttttatcatagatgtccatgctaactgttcataccacacatatatagagattatcacaccaatatcatactcatagcagttgcacatatatattataaaataatcatgttcattactataacattgtcatatcatagtcattacacacataacattcttgatctaaaaaatagtcaactaacgaggagtcacaaaaacaacaataaaatgacaataaaaagacagcaaagataataacaacagtgacactatatttttataggaggtttagtcctgatttctacagtagtagtttactccccttttagttgaatttatctttaattagttctacactgaagatcacaagagcagagcgaattacaaatacttttctatagagtttctgctattatgtatcccttccaaggtgatggaaggttagtatttattgggaaggagaattaatcagtattaattgctcaaatttacaccccaatcaatttcctaaatttataggattggataagatcgaatctttggggatcttcataattgaatgaagacctcgatttggtctttgcaaccaggggcatgcaggtgtatgccacccagggagtacctgtactttcaggatgatgttgtgttgtctcttttattgcttgtgaggtatcgtcttgtctctcaagccaatcctatgcgcaagggttactctacggggttacaagtgtagttgagatatttttccttcataccctgactgtacgccatccaggtctacacttggggcgaggttgtatgtcgcccaagtgtatacttggggaggaaatctacacggtgttgaaatacttaatttaatattcccgttcgatcttcttttaaaagatctcagatcgatgatgcggaagattacttgatataaaaaaaccacaccccaaaaaccaatcgggaagcaagagtatgctgcctaggtggtagagctacatatgtcacctaagtttgtgctctacatttgggcactctgaacttcaccatttacttcctgcgaggagtatcagaccacttatgcaagaggtgacttggaatcgatgaatttctcctgaaaacccacctaggagggaaaggcatgtcacctaggtgttagagacttccttcttggctggcacagtgtatgccacccagatatacactcctttgtctaggcaacttatatttgattttatgccttaaataaaactcatttcaatataatcttattattaattaataaaagatcaaaaatcactttatgttgcttggttcacatgttactttcatgattatatatgttaatatataaattttattaaatcttgaacatatagttactcaagattataaaattgtctacacggtggaaaataaacatcactatatacttcaaactattttacctttatgatttatcagtgtactagatttacattga

SEQ ID NO: 27466 - DNA, 2071 bp, Cannabis sativa
  modified_base (1869)..(1870): a, c, t, g, unknown or other
tgtttcacgacctagtctctgtgtcatcataggtagattaggtgagcacccacctataggtgaaagacatagaatccatacaatgagtgaattgaatctaagccccaatattatggtacttatcaggtgcgactacctagtttttggatgtcgttttctataattggtattgagagctaggggtctaatgggtttaatatgcatttgacgcttgattttgagattatttatggtctctatactttgtttatacattttgatataatgatgttgaggtattttattttaaaagctaatcatgtaagaatttttattaaatcaagggtcctttgatattagttattttcttactaggctttataagctcaccccctatatttttcttccaggaacttagttggatacttgtagttgtgggaaagtcgttgatggagaatgatgagattagcttagtcttactataattattaattaactcttctttaaagattgaatgtgtatctaattatattaacgaatgacctgtatcatttatatagacatgaccagttagggaggaggaatatgatggatgctataagtattatcttggtatttctcgggttataaatgttaacaattcggtgactacataactttgagaatatattgttgtatatatatactgacgagtgatccaattttattacaattattttctatttactataggagttactctattattttaattataggtcttatgtaattttgtaatacatattaagggatcatttgtaagtctcattttttcgcaagggtcaaaatgtgacctttaaccacacaagttatagatattacataactgccacaacctaaggctcttagaacttgagtcgtgacactatatatgtataattgtccaacgcctgcattattacttataattcttccatagccccatattccatagagaagaaagtgaaagatagttgaagttggaccaaaaaatttgtcggccatttcatttttgaataagtaaagaaatttattgctaatgttatatttttgtttcttgtttagtgtgtcgttggttgcttatattttcatactgagagtatatgttgtttttttggttgagctttttgttctttttcatgcactatgatttattcatgatcataattttctaagggatagattataacaaatgtttgtatcatctaatcactttgtagtgataatggttagtgatttgtacaagcattacccagcaatgctatgagcgtatttctttttcttaaggaagtttctgtgagtcttaagttggctatggcaaaatattggtagcaaacgaagtcaaatcagcgaagaggtgggagttaaataggatggaagagattatgtcgtcacaaacttgttggggatttggatttcagggactttaggagctataatttagtttttcttgataaacaaaggtggaggttgattacacatgttgattctcttgttacatatgtctataaagatagatattatcccaagggtaatgtcttgtcaactgaattatggaagaatccttacttcatatagaggagtatttggggacctcaaagtcttctttaggctggttgataaacgagatttataatcatttattagagtattttataacaggtataactttagcctattttgcttgaacaaccatcagattcgtcagtgcctcgactaaagctgtcaacttagtgatggcgtctacctcgagcataccagcaaccttcttcgcttggcttctttcagttggccattgctagttattcataaccatttcttcgagtatatcatatgcctcgtttgcactttttctcataaatgccccaccanntgcgacatctataatcgttctggtgttaccaatcaatccgttgtagaaattgtgaaccaacattcactttttgatcccatgatgtggacattttctgatgagatcatccttgaacctctcccaagcctcataaagagattcattgtctagttgacaaaaattattaatttctccttccagcttggcagctttagctggagg

SEQ ID NO: 27467 - DNA, 1904 bp, Cannabis sativa
tacccttaatttggatggtgtctttggtaaatccataaatacttgagatggtgggtttgagatctttctcgtgtaatctcatttgcttaaaagtctataaatgtactaccgtaatcaactaaaatacaatgtacattatcacctctgatattcacgattatcaccaatgcatcagcatgagggtggtgcacgcatctggcatcgctttccatgaaaattatgtcatcgctttatttttttcaacaacttgacttgtcattggtcaattgcttctctcttgcttcttttgtatatctttcatgtgacttatttgattctctaccaatgtgcaagcccccaatgatagtgagaatattgtgaggagacctagagtcactcacttcctcgtcacagtttccaccattattcgcttagggattttgatcatctgtccttgcctcatctttcttcttgtatttgtcaaatcgtccttgatgaattaactctttaattttatcttgaaagatccaacattctagagttttgtgggcaatatctttaggatacatacaaaattttctcgcatctcttttgtcgcagttgcctctgatgggtggtggtttttgaaaactcatttgtgctctttgattgtataaatttgattgcagggaaccactacttcagtgtagttgataaatcgaggacatcctcttaggcttcgtcgtcgaggacttgtggaataagttctcgatcttggagatcacctattttcttttgttttctcaagctctgcgagggaattctctatctgtttatagagctcggccatggtgaagaacttcactaacgactcaagtcgtttggcttgtagctatttttagaaatcaatttgaggtaatacacttataattaacatgcataccaaagaagacttggtggctttctcgaccctagttacttccgcattaaaatatttaaaataattgtaaactctcacctttttcttgttcaatattagacaacattgtgtacagtggtttgtaggtcatggtcacctagaagtgtgtcaagaataaatccacaaaagtctcctaagtagaaattgaggcttcgggcaactaactaaaccactcatgtgtgttatcctcctaggtgtcggcaaggatgtgacacttggatagttgtggaatctgatcagattccatgatagtattgaatttatctaaatatttgatgggattaattagtcaaacccttatatttgaatgactcggagaggcaaaaaccctttaggagttgagcttgtcacacttcaacagtgaatggcgatgttccatgcagtttatacacgtgtgtcctttattgttcaaccacagcaaactttcttgatctacccctacaggtgtgatatcagctgctgctgagaaatttaggcaaaatattcacattttttatggaacaacaacaaggttaacaggtgcaacaattgggttgactagtgcaacaactggattaactggtgaaggagcattaacaacattattaattattaccttaggttgttccgcgggagagggatgccttgattgtctgcttgggattcacggggctcccgtcgtcatgtgttgttattgtagttttctaccttaggtgatcgtgcaagaaaagcctcggtcagtcgatctcatagatatcctctttggatgtggtatttgcctccaagatgcataaaaactgatcccaaacgtgtatcacactaggagtgaaactaccagatctaaatgactcaaaatcatattcctcagggattctccaattaggggcgaacccaacatagaagcgaggcaggacagtcgctaaaaaaaaaaatcaaaaagtagaacctctatccaagaatacacttgggaccaagtaaattatattct

SEQ ID NO: 27468 - DNA, 3698 bp, Cannabis sativa
  modified_base (27)..(47): a, c, t, g, unknown or other
  modified_base (949)..(984): a, c, t, g, unknown or other
tatattaataagtaaatttgattatannnnnnnnnnnnnnnnnnnnngcataaaacccaacagttgattgcttgccaaaaaatgaatctatgctttggcatattaagagagctccatatgaatttgttgaatccaaactgttcttgagcaatactgctgttatgcagcaggttggtcttaaaatgattcgcaccagcccctgctttcctaatatctgtcattgtgaacttgttacgaagctgacaaagcttcctccaataccaacttgtatcattctttaagtcataggtcctaaaggaactgttcttaagataaatattattgatccattccacccaaagaatgtcccttttggatgaaatagcccaaatattatttaccaggaatggcttgattccatttgaccccatctttaaaacctaacccaccataagcctttggaaggcaaactttctcccaagacgccacatgaagcttgcttctattcccattccaaccccgtaagaaacctctgcataatttttcaatctccttgatgatactatgaggtagtatgaagatactcatccaatagtttcgaagaccaagaagcactgagtgaatgagttgagcccttcttacaaaaaaaaagatgtcttgttgcccaaatttgaagcctttgtttgatcttcttgatgatcacaccacagtcctcagctttccattttgtcggtcttagaggaacccctagatatttgagaggaaactctccttcaggaagagccatttctgatagcataacctgttttccttcttctttcactcctccgaagtagagttgagatttacctgtgttaatggtaagccccgacgttgcgctaaactcatctagaatctctttaaccgcccgaatagaacaaatatctcctttacaaaatagcataaaatctcttattattattattattannnnnnnnnnnnnnnnnnnnnnnnnnnnnnnnnnnnttattattattattattatcatatcaagtacccaaaattcaaggacacatatcactctttattatatcatatttcaaatatttattattattattattataatattatatttacatataaaacctaacttatttctttgagataacctaacatagtcacacctctctcatctaaagaaaaaaaaaaaaacctaatctcattctcataagatatattttctctatctcactcttattttaatctctcactccctcttgggaggtagttcttcgtggaggttggttaagagaaggtcgtagaccgtaatttggggtttgaagaattcgggctttgggcctgggagttgggggttcaaagaagttgggctcgcacaggtgttagacattcttgaggtttgccgcttgcaaaggagaagaatggtgcataatctctgtatttgactttctcgacgttcgtttgactttcactgtttgcaggagatgggtcgttctgcgttcaacattgcacttcgtttaccgtttgttgtttatcgttcacggaggagaaaagctttactcaaatatatatgtcctatatatgtaatataaacatgttttttaaattttatatgtttaaagtttgatttgagttgagtagcatatttggttgagagagagaatgggaacggaagggaatagtgatgcaatatcaacttcctccaggactagtttggtttttgcttagtacgtcattgctagtggctttggtgtaattaagtttttggattttttttttgtaattgataatttgtatttagtctcaaattggtactgttttgtgttagaatctaaaagtggtaatttttttttttgaaaagaaatctaaaagtggtattaattatactaaattattatatttaatataataataaattataaaattctaatcaaatcaatacaacaaatgagtagtcaaccctcatttatcccaaataaaaatgtgtttttctttaatttggtatatataatttaaatattaaaaaaatataaaaaaatgtgctaatataatttaatttggtatgcttttcacgtccaacataattggactaaaaaggggttgcaattgtgggtcctaatattaagtccatcaatgctggactagaaacgcttttctagtctaattatgttagactagaaaaataccctttttatgttcctggataccatgtccaacactaaaacggactagaaaaatttatctagtccaactttgatagacttaaaaaggagtttttgtagtagtgagagctaacagtttcatcaagctcgaagaggtcgtcaagaaaattagaggagtttctcaactagaagcaactaattacactgcttatccatttaatgtgtctcaaatggacatttatcatgaaagtgaagaagaatcaaacacgaatgcctccactaaaatagattcctcttttgtgtcaaaatatgagctcgagcagagagatagtggtgatgaatcccctactctttctcaagatgatctcaagtaggagatcattgacgaagtatctctccctacttcgcaagacaacccgggacatgacgaagattctccttttgtttccaacgagcaccaagaacaagggagtagcagtgaagatgtgtcctgtgaattttctaaagatgttaaccaagaaaaagatagtgaagactccgtatgagagagagtgggatcctatattgacacaaaagcattagaatctaggaagaaaaagttggctcactataacatccacttgaatcatgtgtcggtactagggtactggaacaggcagcatttgagatgatattaccaataaagcaactgttcgctaaacagttcgcttcaaagtgagattcactttaccttgtgcaagtgaaaaattgccacttgagctaaaaagatccaacaaagtcatctataagccaaggagtctatcgcaatgttgtggcccctaaactattattagtcaaacagagcatcattgtatacataatttcacccctaataatccttttccttttagtgggaatgtggaagtttcttgtgcatacatttatacatatttaatgtatgacacctttagtactcaatgacctaattactaaaatgatgattttatatgagtcaatcatagaataatcatacacactaatacatatacatatgagtctatttaaaaaaatcaaataataaactctaaatattaataaaaattgaataatgagtatttttgctccctaaacttttagtactacttgattttaccccctaaagtatacgtcttgttacaattttttcctaatatataacagttacataattatactccttctattatgtttcgtttcttttaccgttaaaaattagcaattttattcgttgaactttgactaatacaaaattttgcttccttttactaaaaaattaattttaaaaattataatattctacttttttaaagcaattataatattctattaattaagaaaaaataataaaaattattaaatattaggtaaaaatattaaattaattaaaaattattaatattagttaataaaatttaaattatttttaaaaaatatttcaaattttcattttatttataaacacgtatcttaaaaaattaaactaaaattattgagaatctaataaataatttaaataaattaaaattttttgaagaaaaa

SEQ ID NO: 27469 - DNA, 3833 bp, Cannabis sativa
aaatttgactaaaaaattatttcatatactaaaacagatagagatgtatcatgtatcccttttaagggggtgcattatagaatttcccaatattttatttggatagataagttatactctaaggctatgtttggtaggaatgagggagagtaggaggatggatgtggagagttgatgaaggatggagaatataagggaggaagaggagagtaataatcattttatattgtttggtatgaaggatggagtgattgaaggatagataattattaaattataaaattactattttatccttataattattttttaataatatttgttgagggtatttatgtaatttacaataattgaagaaggagagttccaatccttccattattagagggattagaaattagagatttgagtggatttgctatcctctcacctctcctttctcttcttcaatccctcttaccaaacaaagggatttgttatctcctcccacttctctccctcctctcctttccatccctcaacttctccctcctaccaaacatagtgtaagggtaacattcagtcaaattcaattgaatcgaactaatttgatttaatatttaattataaaaaaagttggattaaatgttaaaaattacattctaactggattagattggttcaaaatccaattaaaaattaatcaaatctaattaattttttatatatatatattaaaaaagattaattataatttttgctcctaaatttttttagccgttaaaaattcttctgaaatattaaaattattggaattaaggatatttgtccagttttattcaattttactaactctatgattgtccatgtactaaagcatgctccttagactttgatatctactaaatcatgctcctcgaactttgacgtgtaccaaatcaaattccttgaatttttatccatgttagacttttcttactaaaattgaagaaaaaattcttaaatccaataattttaatagtttaggggaatttttaacgactttaaaaattcaggaggcataatttgatacatgttaaagtttaggaggaaaaaatcttaattagtcattaaaaaattatttatatttatttatataataaaaaatattaaaaataaaatatatattaattatattttagtgaattttgtatatcttttattacttagaaatgttgttgttttgaatatttattttcatgatgttttgttctattttattacttagaaatgttgttgttttagttattttaaatttttaattgcattacacttgtaaagataatattttcatggagtattaaacttaaataaaaagtgatatttagtttttacatatttttttcttaatatttttaagttaatattaaaatttaagtgtaattgaatatccaattaaacaatcgattcaatccaattagtaattggattggattttgaagtctaattatattgaattagatgataattttccacatctaattagatcgaatgatgattttcgacattcaattattaattagattgaatcggatgagaaaaaataagttaaattagataggatgcccaactcttaactttatagtttgggaaataataaacacatcatgattttccttaaaaaaatagatacaaaataaaaatataaaatatttatttccatccaaaatataaattatctgcataatttatatatattgtaaatgttttactatgcctcaaatttctttttattaaagtaaacaagaaaataataaatttttagtttaaacaaaaaataaatgtagtaaattataaaaattattctaatttatttaaatttttttgttgtcaatattgaggttcattcataaacttttagagtgtaaagataattttagtagtttattttttattagtagttttcaatgttttcaatattgaaacattttaattcattattcatgatttttttccctcttttattgggttgtaaaattacatatttttcatctgttgataagagtaaaataaaaatactatatttgcacacaaaatttgcagtgtttctctttattttttaagctgtgaatcttgtcttaacttgttttcaacaccttgctcgatcatgtcatagagcgaggccacgaattggtggactatatcccaggaatccgttcaactcggctatcagatatctcagagaatttttttgagaaagaagatagtaaaacaatgaaaataatgttagatgctgtttcaaaggtgtcccaagcacaatattttgtatcttcttcagtatatgagcttgaatcacaactctttgatgtgttaaaacccaaatttcctttccccatttacccaattggaccacttaccaccattaatgaccctcaatttcatcatgaaaatggcaactatattgagtggctagattctcaacctcaatcatctgtcttgtacatttcatttgggagttttctttcagtttcgaagacccaattggatgaaattgtgtgtgggataagagctagtggtgttagacacgtgtgggtggcacgtgagaatgtgtcgagtatcaaaaatggttgtggtgaaatggggtttgtggtgccttggtgtgaccaaatgagggtgttgtgtcattcttctattggtgggttttggactcattgtgggtggaattctactatggaagctatttatggtggggttccaatgttgacttttcctataggtggtgatcagtttcataatagcaagcaaattgttgaggattggaagattggttggaaagttaagaagaagaagaagaagaagataatatgtgaagggactcatcatggtgatgatgatgagatgaatttagtaaggagagatgaaatttgtgagcttgtgaagatatttatggatcaagaaaataatgataggaaagttatgggagaaagaatgaagcaacttcaaaaattatgtcaatttgcaatctctaaaggaggctcttcccataccaatattgatgcttttataagccacattttgcaacccgataaatactgacttttataagcggttagcagtttcttatattgaagaagtgttacgggatttggctccttcactctcgtaagctctttataattttgtattcataggcatacatacaataagattttatactttaaatgtcaattgatattcagtactaatgttatactacattatctgtactaaataactacaaatttcaatgtacatcatgatttgttctgatttgatttgaagtatttagtattagttgcttaatattacaatgttgttgtttttcttcaacaacaaccatatgctcattctctacttcataccatatattcaatcaaactctattcattggttcattagtcttgtcaatctcagtgagagttaatttaatgaactaatcaataatgattcaagtggattagggccttatttgctagggaagttaaggtggtcgattctctagatgatgaccaatataccgtccttggaatttataagaactctacagttaaacgtgtttaagtgaaagtaacactagtatagttgactttctgaaaagtcctcgtgctgttatgtgttgcccacgagttgacgaaaatgagcttttaagtgttgaataaatttgaggttattcagcaaaaatatgtagatattatatattatacaataatgggtctctctttttacaactactcaaataaaataagaactaacatttataaatatttgaataatttgtgattatttagtacagatgatggtataagaatttgaagatggaggagctgaaaccataa

SEQ ID NO: 27470 - DNA, 3618 bp, Cannabis sativa
  modified_base (2020)..(2039): a, c, t, g, unknown or other
atttatttgatgtcaatttcactgtttttgctcaatattgtcggaattaatggttgtttccggctgtccttgtgttgttgtagtgattctatctgtggttgtgaaacatagatgcctcatactttttttttggtatttacattataaaagaaaaaaaaaaagggaggacaatataaatgtaacatctgccgtgtggcagtaaaattgaaaagtattaacccaaattcagtatttttgtaaaatgcccaatgattattagagatatgattcatataatattacttgtttcatgagagatactatactataataaaatttaaggattacttcattaatatacaaatttttcacattattatagatctaaatctaatgttatttttacgattatatctatatataaatatggaatgttaatttttttaatttttttagaataatattattttaacgttgttacagaaaattaatatattttttttacaacaatacgaaatattgtaatctattatttttcttttactcacatgggaaagcaatgtaaaaataacacgttttttacaactaaaaaacttgtaaaaaataaaattgataaaaatgtaaatatatatataatttctaaaaatgtataaaacttcaaatttgaggtgtattatgttaatttctccaaaagttaaccccttttaattgtaataatgttaatttatcaattgtttatctttttattttttgtttctttctttctaagaaatgtcccaaatcatgcatttcctagtgtcttgtcagatttgtcattcctaatgtagttttctaaaataaaataataaaaagtaaaagagtaattagtaactagtaacttgttctaaaataaataaataaatagtaacttgtaactagtaaaaaacccccaaatcagacccaacacaaccgtatctattatcttcaacctcactcaaaccatttcttcgatctacaaacccctaaatcctcacacgcctccttcttcttccgaaaattcaccgctatcagtggcttcaaatctggcaaaccactggtatgcttttgattttgtttttctcttttaatttctaagctaaattagttagagtctctttgttcttggtaatttgttactgtgtttgtgagaaatctgtgttgtttgtaatattttagattgcttggtttggtggctttgaaggtttttggattcgatttgaggtattttttaagctcacagtgtgactaaattcctaataaatgtattatttttttgatattgttgtgatcatacaactatgaattcaacaaatcaaagggcctacttcctcttattcagcagtttatctccattacagaaccagttaatccgagttaaccaacaccataacttggaaactggtctatctaatctcaatgttttgaacacttaactgaaataacagttacaattgaaatttaactacagaatggttgttctaatcttgattttctttggattaacattaccaactacagatactgatattagaaagatttaggattttgtgtgctgccatgtttgctgtattttgacttagattgatttatctctaattggtggcttgggtacttttcttttgtgctatgtttactgcattagtgaatctgatactttcttggcattttcggatttagattgctctgtttggtggcttgagtgtattggtattcagatttaggttatatttgtgttactgtgatgaactgttaaatgatatgttttagagcctaagatcaataatgtaattttgttcatgaatggtgtagcggttaatgtgtggtattacatggaagctctgcaaaagaagaatctgctaatgggttatcttcttttgatggtattactattatttttcacctctggtatacaagcttggactggtgagatccatggtagagtcgtctgtgatgtctgcggtgattcctcaattgggcctgaagatcatgttcttgaaggtcaaactctctctctctctctctnnnnnnnnnnnnnnnnnnnnatatatatatgtacatatatatatggatgtatgtatgataagcataatttgacgattttatattgtgatttgtgtttatgaaatgggctatcattatttttttcttattcttggaatattttttgttgcttctctctcttgattgtaatatttgtaggtagcctggtgataatattcttgaaaagatatcctcaaactcaaatttgttgattatattactatcttttgtattactatgggtagttcatgctgacatactaacatgtatgtgctcagttaggattttggatattttagctccgtaatctcattggtgtgcactggaaattccataccttgatgtgcatttattttgattaatagtggcaattaccaattgaaattttgattagaaccgggagctcccagctcaagaaaaccaatgaaacagtagccaaatagtagaaaattgctattggaacagagaaacaaggttacaaactatgggagcccttaggcccctgtgatgcaaagagtcatactcgattcattgcataccccactaactctttacccacctctatatatactgtccaataaaccctcaaaattacgctcattacaatgagtcacacactcttttatttactgtattctaccacaccccactaataatggggtcgaacaaatttgttttcatttcttgaaataagagtgacactaaattccaaaacaccttttgtggtcattgcttgagagttagatggttgttctagatgaatagtttaagtcattactaaatcatgggcgatttgaataaattgaaaccgaaataaaatatagacaacaatggtgcttcaatacttttattagcatcgtaagtaaagaatatttttattattttgtgaaatgcaggggctgaagtggctgttctttgcatcacaaaatctggggaagttttaaattaccaggcattcacaaatgaaaagggactgtacacagtggcagagacaatgcccgagagcgatcgctgggatgcgtgcctggctcgacctatcagcagcttccatgagcactgcactcatcttggtgaaggcagctcaggagtaaagttcagttattctcatccatcaggttactctcaccctgtcaggactttcgtatatcgacctccaagtgtccccacatactgtatttgaaatccttagactccttccttgtccttgtgtatacatatagtcaaaatatgagcttgttttaggctaaatagtaaaaaaaaaataagatttggcatatatctataacatcttatgcatgtattgtttgttttaagcttgagtattagcactctcttttaatcctagtatatatacacagtataactttgataaattaatattcagttaattaataatcttgatcaaattaacacttgaaatgccgttaatttataaagggtttgactgtatattaaagcacatactagattgaagatactgcattatgttgcttaaacgacctaatttgttccattccaaacatatatatatatatatactagtaaaaagttacgtgcgatgcacgtatactaaattttatg

SEQ ID NO: 27471 - DNA, 2100 bp, Cannabis sativa
ataggatgcagaaacttgcgaaagagctgggtgtggtgattccagttagcttctttgaagaggcaaacaatgcccattacaattcaattgccataattgatgctgatggggaagatcttggactttatcgaaagtctcatattccagatggaccaggtacttaaactggtgtggttcgtccttatacattttctattctgattgcttacagccagtgattctctcttacaggttatcaagagaagttttacttcaatccaggtgacactggcttcaaggtgcgtgccaaatacaactgcagagtgcaataattctaattctaattgatatttttggtttttagcgatttatgatatcgtctggaacttatagcatgttgtttgcaaacaggtattccaaacaaagtttgcaaaaattggagttggtaagatctaatgcttagctcttgacatttatttgttgtcattacacaatcttcttaaaaatcttacctcataacttccgaccttgaaggatggcatatctctatttcttattgcaatttcgacttaaaacttgcaatctactcatagctatcacaacatttgtggatggtatccattttggcggatttgcttgtttcattacgcttgcaaagccggtgatatgggaaactaataaatcttctgtatgttttgtcagctatatgctgggatcaatggtttccagagggagcccgagctatggttcttcaaggtgcagagatactgttttaccctactgctataggttcagaacctcaagatcatgaacttgattctcgtgatcactggaagagggttatgcaagggcatgcaggagctaatctggtaagtgtcatttagactggtaatcaaaccttggagtcaatttaaaattgaatttttttcttttactcagctgacttctgctcttgttttcatgtgacttaatttgttagactagttgtttgtttctcttatgttatttctattatgatgccatatttgtcggtgggcctatataagcttatgagtaggattgtaatggacacgttattgaatattaaaatagcgtcttgtgatagagtttgggggttttccccatatgtttgctattgatttggcttgatctttgctcatcctttacaatcctctgcatcactagttgtgacttgtgagaaattccttcaacaccgtattagctatccaatacttcaaaccataaaaactcaaagaaaatgagatatttaacccatttatattttatgctatgaatgaattgtcactaatttgtgaatattgtataattctaatattgaaaagggaaaactaagtcccatctatcttttcaagataactctcaatatccctttcttaatttttttttttttgcttttgataagaatcagcatctcttacttatagccttacagtaagaatcagtatctcttactaatagccttacaaaaagaaaagaaaaatcttgctaatagaaagaacagtacagtaaggagacgagaagtcatccgaacagaaattaggtacatgaagaagcccaatcccttgccaattcagaaaacattaatgtcccgaaatctgtatcatccttaattagataccatgtggtatcatccttccctatatcattaaaaaaacaagatatttgttccttgtaattatgattcttgaagatccttgaattccagcattgcccaattctacatattctatatcttcttatgacattagcaacactaaattgatcaagttctatgagcaaattaactcagcttaaacatggacagtaatttttcccataatctagtagaaaaaaggacaatgatagattaatgatctcagtcttagctccttatgtataatgcaccagctcggttttaagtcaaaacagtatttttcttgtgcaaaacttcatttgtattttcctgaaaccaatagcatctttaattgtggatgccaccaatcaaatgaggggaaaaagtgacttgacatacttgatacttctctctattaaaattaaaagctataattaggaagtacaataaaaagaactatttatgaagtttggctaatggaatagtaa

SEQ ID NO: 27472 - DNA, 3296 bp, Cannabis sativa
  modified_base (2683)..(2711): a, c, t, g, unknown or other
  modified_base (2866)..(2868): a, c, t, g, unknown or other
  modified_base (2895)..(2895): a, c, t, g, unknown or other
  modified_base (3229)..(3247): a, c, t, g, unknown or other
ccaaaggtcatcatctcccatatcaggaagaattgttgtggttaaagcctgtggatcataggtagagtcaatttcagttaaaaaagcatgagaggaagcggaactaccatacttaggggtgatgaagttcttgtcaaagcggtagtgacaaacagccgctgtgtgaccaatgcgaaggcaaacttgacacatcaattttgagccatttccacgcccaaagaaacaccctgttgtgcggccaggttcaacgtttggagcacgagaagaaggaacaccagagtgatgattttccccatttcttgactggtttacactcaagttggcttgcatctttagggaaagatcgattatactgctgtggtgttcaagtcttgattcatgagagagtaacaatgcctggacctcctcaaaagaaagatgatcacttcgagaagtgatgctagacaccactggatcaaattctggtccaagaccattcaagagttggataactaaatcttgtgtgttgactagtgagccagcaattgccaaagcatcggcagtggcttgagctttctcaacatattcaccgattggcagggtgcccttttgaagtctagagaaattaccctttaattgaaggaggcgagccttggtctgacttgaaaatcgttgttcaagtgccctctaaactgagaaagatgttgtaaaggttgccacagaagcaaggatgggttcagacattgaagaccgaatccaagagaggaggagttggtctttctttttccattgcaggtactcgggattttgagctccattgatcaaagtttggggtggggtgatatcagagaacaagatctaatcaagatcatgccctataaccgtggggacaatctgagacttccataaaagatagttgaggcggtctagtttaacggtgagggaagaggacaaagagttttcaaacgggttccagtgaaccgaagaagcagcggtagccattgtggccgttggatcagaggtggaagattccatcgacgcaggttagagactcaatgataccatgaagaaggtaaaaccagaacagagaaaaacaatgctaagagcagagaagaaaaagcagaggcacgaaaaatgaattgcaaaggcttacccaaaatagggttaccatatctttatttatagaccaatgtattacaagcaaaaaaggaaaaagttgttacacagtaataacaaacttaactactaaaccagccttaacaacaattaacagaaaactgttaagtaatgattaattgtttaacatcctccaaccaaaagcaagtagagtccattgaaagagcatacttaattaagacatgagcagcaatattcgttgatctattaacatgagagatctgcactctagagaaattggacactaaatgagagatattagttaacaaactatagaaatcaaaaatagaagcttgtgaagattgcagccctttaaccgcaagtaaagagtctatttcacaacaatgttatactatgtttattgctgtatatttgtttatatattatttttatgatgttttcatgaggttttgtaaaaatgtaaggaaaatttaattttttatgcatttattaattaaaaattattttttaaaatttaagtaaactcgtattagtagaatagactaacattttataaaatcaaattctacccctctcatttcaaacacctaccctctctcttcctcaatctctctctcgctctctaaactcaccttaaggactcgacccataacccaccacccacaaccttagtcccttctcttcacgaccacagaccctacaacccacggacccaatgaccaccatagacctattgacccacagacccaatggcttctccatcaaccacagtttctccatcaacaatgtcgtcaaaggcaagtatcgtttttttgcatgatttttgagtctggattagatttagggttagaatggtgggatatgtgttttggagaaaatttggatttttggcctagtcctatgcaggcccgatatgttagagattttattacaatggaagataatcaagatatattactactctaatgtaatataatacaaagactaaaacaagagattaattaaatatatattacaatacacatatatatacactatatatattgcacatatatataaaagtataagaaaaagaatacaacacatgtaatataatacatatatataacaagagaagaatatatatgaattttagaattaaaattgattaattaaaaccaattaactgagtttggaagtagtattatctcaactagtgaaaggaccatgggcctatataaccgagcttccaacaagtagatctagaatttacaaagtaagttcactaattattaattcctccttgggccactatagattcggaattgaattgcactttaattatatagaacgctctatatgtaccaagatataaatacgttatgattatccattgttacaatcctaatagtcaaagatcatctatagatgattaacatcaaaaagggacaaatctaccgtcatacccttcaatgtattttatccttaaaaaacttagctgcctattaatgacatttcagtagactaatataattactgaaatgagacctcaatcatttatcactattaagccaagctcgaaggaaannnnnnnnnnnnnnnnnnnnnnnnnnnnnagttatagattctatatctatgatcagcgctcccattcaattgaactaccatgttcctaagatgtaagtatctgccagaacaattggttagctttcacgaacaacttgaagaatataaataatacagttgagttgaacctaaccatatcaggatnnngatccatagacctaagatcaaccagtnatattgacttagaaagatataactgtaagtgtaaagaccgcttaattttaatttggaattagaagatagttgtggcttaattatgaaactagattagtaattataatttatgaatatttggagatttataaaatttagggtgtataatatatgttatttataaaatttcatgttttttatgttttgtgcccgatagcattagaatgcagtgtttggccaataaaattacattttagtattttggttttatcggggcaatataattatacattgagaatgtcgggaataatcaaggtgtcggaaatgaccgtttgttgggttttatgtcctaaannnnnnnnnnnnnnnnnnnatcagatttacttattaataaagaccagaaataacattttatgttgcat

SEQ ID NO: 27473 - DNA, 1448 bp, Cannabis sativa
tttttttttttttttgtatatgtggctatgtttagccatattttaatcaggggggacaataatagcctttcccagggcttttatattttatctcaattttttagaatagttggtcggattgcctttattgtgttctttttaagacactagggccttcattgcctcacttttatctagaatttacttaagccttcgattttcattttatttgaagtgagcttgattttttttcacttctattaaacttagggttagtggttatatttatttttggaggtaggtcgtgccatgcctccctgatgcatactatggttattttagttttttgtgggtaggtcataccatgcctccctaatccattcttatggttatttttattttttacaggtaggtagtgtcatgcctctgatccatacttatggttatttttatggttatatatatatatatatatatatatatttgcacagatgttcctcacctacccccaagtgattaaagggtgtaggccttgagtcacttgctgagttttgtcaagttaaattagcacctcttatgaaagtattgttatcagttcattacattatcaaaaatcattgtcttggtcaaatgacttataagccttttaaaaaattctaaagatgaaatcgaatactgaactcctaactattgatagtaatttcggaggtgatcaacattctaggcttttgggatttgggatccatccatctgtttgaggcgataagtttcggcgcatatttcattttcaattttgtaaggtccttcccagttggggcctaatacccacactctgggatctcttgatgtgaggaagactcatcatagtaccaaatctcccaccatgaattttttgtccattaccttcaagttgaagtatttggcaccttcctttggtacaatgctaggcgcatttgagactattctctgagttcttcaataaagtcaagagactcttgaagcaaggattggttgatggccaaatcataagcggtccttctatgagattgtacagtgtgttccatcgagagcatggcctggcagtcgtaaactgttgagaatggtgaatgtcctatagacatttggtctgtggttcgctaggcccagagtactcgtggcgattcttctggccaattgtttttgcaagcttttaatttttttttagggtggttttcagaattttgttcacagcctctgcttgtccatttccttgaggccttgtcactgcatagaagattttaacaatccagtgctttttgcaaaactctgtcaagtgatcactatcgaactatttagaggattattttagattatttaggtgacatttgataatatttttttttaatcaattttctttttttaaaattagaaaagtaaaaatatttttcaaaatcatgttttataaaactattttcatttttaaatttttt

SEQ ID NO: 27474 - DNA, 1718 bp, Cannabis sativa
ttttaaaaacaaaaaattgattaaaaaaattaccaaacgccaccttagtaaataactttctatacatagagtgtattcttagaatgaaatttttatgtgagagcattatttttgtttttattgtaggacaatttttatttggaaaattaccaattatatgtaaacttaacatttttttttacagttttacgttatattattttaatttccaattctataacagacattttacataaataacattgtattaccttctcaattttgatactacaactttgatgaactatactcttactgctactatgttgctgggcttatgagtgttccagtaatggaaatagcaccaaaaccaaaagtttcaccaaagttaaattttcaaataatcaaaacaaaaacaaagaacacaatcaccttggaattcttaccttcttcaaacacttcaacttaaatgcaaagaaatttgaaaattttaaaaatgagaatagtgatttggattttatggaaggaattgactatttacgaataaaagatagcatattgctactaacgatggaggtcactaaagatagaggttgccagtaaaaatggaggatgttggactatacttgcaagaaatctgaagaagatcaaattaaaaaaaaaaaaaaagtacttattcattcctgcattaaaagataaaagaccgtaaacttaattagaactttacctatatttgtatttttaagaaaagccttttatatttctacatatattttccttttatcttttcatgtcaaccaacagaaatgtgcatgcaagtggtgttggtgattgtggggtgacttggctaaaggctgaccctttggaagcgatgggctttagtttttgggaaatttccggagttggacacttgtggttttgcattttggaaaggacgactgttctgttttgtaccacaaaaagagtcatattggtcaattcaaaagctttcatggatttaatacccttttctatatttttatctttttcctttttgggttgtttacgtattaaatgacatagcttttgggtttattactagaacattgcttttagcatgattgagatgtcccttaacacaattatactaataaaagtattatattaaattatatatgatttaatatttaattaaccattaacaatataacataatgattagttctattagtactttttagtatttctcttacaagaaaattagtggaaaatacatcttgtttggctgttaaattagaactgtaaatatgcggactgagttttttgatgcaacatgaaattagcacgagtacgatcaaacataaaaaaaaaaaattaaatttgagcacgatattacaaatttgcatgacacgataggatatagtaaattcgaaaagcacgacacgtaagcacatttagactaatacgaaaacacaaaatattaaaaaactttattatttgaaaatgattataaaaataaatacgtatttatcaattataaataaattcaaatgataataaaattcaaattgtaacaccctaactagtataggcgtgtcaacgtgatttttaacgtactgtgcagctcgtcgctaatcaacgaggttattgaaaatcgtgaataattaaaatttgcttatttaattaaaaacatatagtaatacattataacatcccgggatcccgtttacaaaatacatttataaaagtttggtattcat

SEQ ID NO: 27475 - DNA, 2518 bp, Cannabis sativa
aatcaaaattaaagtaagactagtgtaacacacatacaaatgtacatgtttatgtttgccagatgtatgacatatcagctagaacaatagtttgtgtatatatgattgcatcttgatgttgtgaatatatgagattagaaattcagaaagtatgaaccaatactaccaacactagcacgcaagagtactgagggaatgtggtattatagttggttatacttccaaaagtaagaactagtgctactaacactagtacgccagagtactgagtgcatgttgtattatgactagttataattaaaatatggattgatgctaccaacactagtacgactagagtactgagtgcatgtggtattatggtcaatcatactatggtcaagaatgttccagactcagctataccaatttgagatggtttatgacctgttcttaggtgtatgaactcttagccgcatgtcagttatatgttatgttttatgcttttctaactaagtctattgatacacagatgctatgttatgtgtaggtaaagacaaagctgtcgttgaacggctgtgagtttagagctggatgaagattgttcatatcaagatagtttgacctagagtcttagatcttcgggacagctagggctcacaattttgtagtctttgtgcgggatcttttgattatgtatagttgagaaatatagacacaggatcccatattttataaatataatgcagtttatgtttatttattaaagtttaaattttatcactttttgataaactctttgattagcaaaggttgcacagtaattataaaaagcattgtagcatggctaaacttgtcgagtattacaattttggtatctgtgccgctaggttctctatcaaagaccatcaagatatgtacaatcatcatcagagataaccttgactcacggttcagttgcctttacatgttacaatagcttattataataaaataaaagtatgataggaacatgtcagtgatatattggtagattatgtgcatgtctaagatcccatgtatgcagtcctaagttaattatgttgaccactgcatgactaaactgacttataagttcgcaggctagtatcatatagatacccagcataatataggaagttaagataatatggtcgaaactagtggtagtcaaggccactagaaaccctctcatctctaaggctcagtaagagactttggacgggctcgtggtgtgggtaatattaatccaccacaagctccacaagattgggagaaaaggattgctgagctgcaggccaaaatacatcaacaaaatgaggagattgttaggctgaggcagcaaggccctcaagttgttcctcttccacagattgatattactccaataccaatgtttctagtagaatatcctgtagctggtgataggttggtaccactgtaggaactattctagaattagggacctccattcaaactgggaggccttgatgttatgaaaactgagcaatggctagccactatgaaccagatgctaaattctgttggagtcaccaatagcgatagagtggcatatgccacatttcaattccaggaagtttcccttgtatggtgggagttagcatcgcttacaggggatatcgctgttataacgtgggatgaattctaagatttgtttaactccaagtattaaaatgaagctatttgtaatgcaaaacaaaaggagtttacacaattagttcaggaagaatcaatgtcggtgaaagagtatacgaccaagttttagtgactggccatattagcctcaagtatagtgcctatagattacactaagaaggaaaagtacctgggtggggttaatgccaagatctatcatgatttgacaattatggctgatgatgctactgcctatgcactgatggtgcagaaggctctccgagctaaaggtgcagtacaatttttacatgagccccgagggactcaaggttctactggagtcaatgctcctcctccttttggttttggtaggagttttagtgattcagtttttgatttggagaggaaggctcctttcccattgagttgttctagatagaacaagaggttccacgggtactaaggtcggagttgtggtcgtcagggtggatttacttacctagaatgtcctcattgtaagaaacatcacctgaagaatgtcataagaattccgtcttctagtgtggtcagatgggacattttaaaagggagtgtcgtaagttgaagagggaagagccaaacaaggagttcatatccactcctggtcaggtatttgcaattttgcatgtagatgctaaggcatgtccatcagttgttacatgttagctttttacaaacaactcctattatattgtattatttgactctagggctacacactcgccagagcacagacaaggaaaaaagaattcccaagtagggaactttcgaaggcggggatgaagacgtggatcctctacttggggacccaagcagcaatgttgga

SEQ ID NO: 27476 - DNA, 1938 bp, Cannabis sativa
  modified_base (760)..(763): a, c, t, g, unknown or other
ttattttacatcaaatttttatattagatcatgtagattttataaatatattttacatcattgaaacagtatatccttaaatatatttattaattaaaagaagagaaaaatttattaaagtaattaattcaaagaaagatataagaaaatgagaatcaaatattatttttttgaaaaaaaaaaaatgtatttgaagataatgtaaatcatgcactacatgtataggatttgaagaatataactctaaatagaaaaggaattaacactattttttattaaagagatatttactatagagtttgaattagcactatattttcaattagaaaagatatttactatagagtttgaattaacactatattgctattagaagagataattactctttgttttttcaactttttggaaaatatgctctgtgatacaatatatagtcatgtcacacaagtgttgaatttgaacaaaaattaactagtaattgagttgtgaaggggaaagtgttattacaacaaaaaaaaaaaaaaaaattatttgtattggttttgatctgacatattagtgcgtcaattagctattgacgcttcatttctttgatagacaatcacgtcgtgtggaattaaaaaaaaatgtaaatgactttagatgaagagtattgttattaagtattataacgtacgtctaataccgtcgtcaagtacccatttcttgatcctcttgaacccacagaaattcgtagattattattattattattatnnnnattattattattattattagagctcatcaaataagttagattcatatatagtgtatataattattttaaaaaaatatatattatacatagtctacataatttgtaactttccaagaatatatatcataataatataatgtattataatatacatttctatatattaactcacacgaaacactatttaaataagtatgtatatatttacaaatattatattgacttatttattgttattttctgcttggacgagtcacaaatcgacagacatcaatgcacaggtcaactagatggtttttctaatttttcaattctgcaatataagtgtgccctatataattaagaatgttatagtttgtattggtctaataattttttaatataacaaactatatttccattatattaagaagaagaaattttgaatgtacacacaattaatagagaagaattaatatttagtatatagtatgtgctaatttttatttttttttttgaacacatagtatgtgctaattaaaacatcgatttcaatgtagagttgaaatataatatagggtgattttataatatgcgcatttcgacatgcagttagaataatattttagtttaattttttttttttgttatattcatgtacattatatagttatttataagatatcatacaaaattttgagaaattcgtaataatttacaatataaaaagtaatattcaaacaatttatttcgcatgcatctaaattaaaatagtcttgcgtgcaacacaatgtttgaacttgttttcaatgtttttaaatttttcaaaattttttaaaattttgcaggatgtaataactataatgtacataaccatgaaacagataagggatgcatcagtacatctcttttaaagggtgcattgtaaaattttgtatacatataaagggcaatatatgagcattgctattgggtactaaggtgcctatatgacatggtattttataattagttagtagtttttttataaattttagtaaaactcgatattaaattataccaataataatattacaccttataagaatgttagccactcgtccctttaatatttctcaatatatgttgtaatatccgctttcttggttgaataattttttttttagtttattttgtttgtcaatggggataattta

SEQ ID NO: 27477 - DNA, 1968 bp, Cannabis sativa
ggaatcaattaaattcatgtgaattaattttatttatttagaagaaaaattacctgtaaatgaatgttatagaagacccttcctccaaatgatcaaaagaagaagcgtttagtaccgaaaagccatcttcctccagatcaaccagaatattggacaatggagtttgttgagccttaaatgaggaaatttgtagtactatttctctatcactaagcctattggctgaaacattacacaaagatctccaacctgatgaagagcttttcttatggctttcttcataaatatgctccactctccttgaaattctcaataaaagatgttcctttttctgaattagtcctttcacttggttttgaagctcaggtatgtactttatggttcttgaaattgtggatggattacttagttttttctgaatcagcataattaagagtaactcattattaaaaataataatactatgaagacagctattagctataatggtaagttgggagtcaacttctgtccctttaatttaataaattaggtcctatctagctagcaaccgatattattaatttatgcacatacaaatagaaataattgggtacatctctatctaaaaactcaattaactattttagcattttgaccacttgtttaaaacttttcactaagttgtctagagtatatgaagtttttttgtaaattattatataaaattcatgaaatacgattcactttcaaaattaatgcgttaataaaactatatttaatttaacataagaataaacaaggaaattttaaaataatatatataccatttggtcagctgccggaagaagagagcgaagagaggaataaagagagttgattttcttcctacggtcacgttcactagcattgtgacatagcttcttaatgaccgtgggatcatcaccggtgacagctgttgtggacggcggagattgattgagctctgctgtcttctcttgttgttgttggtggagaagagattgaatgtcgatattattgtgatcataaaaggagaatgaatctgcaaagtgatcaacggctctgctatgatcttcaaataaagccattggattaacggctgagactgaagaagctcgcaatgctaacattatgatacaactatatatagtctaagactaattagtattatcagtactgtatttgagaagattgattaattttatggggcaactttgtactttcttttgcgtagagatgtttgtatgttgtgcttgagtaagtatagtataaatattgaaatatatatacacacacaacagttacagaatcaccttcagctgtcaccttctacctgaacattttctaataattagtaatatagatatccatttaaataattaggattagaatactccaatttatatatatatttatattctccatactcgtggagatttttttgtttggcaaatttacatatactcgtggagatggtgacacatttgaatataaaaaagggtattgtgtatttagtaagcgcataataaattattttaattaaacagtactgatctttctctttcaatcaaccatcattatttattttgcagcaataatcacttttaattttatttgattagcaatataaacttctactactccgcgtatacgtaagagaggtagatgaatttcctacaaaaaaaataaaaaataaaagttttcaagtttatttttatttttataatgtattattaattgtatcttataaacacacaatatatattatatatattctttaacaaaaatattaactaattaaattaatgattttgaagaaattaatggacgagagtaggtctatttcattataaagaattttatattgatcaaattaattagaaggctaaccccttgaatttttaaatcatgcatgtcccttgaatttttttttctgttaaaatctctcttgaactattgacattatta

SEQ ID NO: 27478 - DNA, 3421 bp, Cannabis sativa
  modified_base (27)..(42): a, c, t, g, unknown or other
aggatgttaatgaaacatacatggtannnnnnnnnnnnnnnngtaaaatatttccaacaccttctccccaccagctaaagcagaattgaccagtgtagtaggtccaatcttgatgggagggggaatctcccagaggtctaatgacgaggaagttgagggggtacgcggtttctgagtcctggaggccctggtcttaatcttccccttgccttttcttgggatttcttgaccttgtccatagcggctgagatctagctactcaagacttcaacatcacggattctggtgtatctgcacataagacaacaatatgagtaaataagaggagcaattgcgagtcatataattgtaaggaaaatagcaacgccaagaagaaaaatctagtaaagaaacttgtgtgtgggtgcaaccattcagtgaagtgctatagggttgtccacgaggaaaagctaaaatgctcctatgaccaattaagctgccatactccttaaattttggcagagacatggccaaaaagggtctactttggcagtatccgaaggagtccccagatttctagggctccgaactatatggtctactttatctatgcaatccttcatgggatatctacaacgatttatgcctaggaaatatttgtcaaatcctccttgattccttcgagacatgcgactcgggctggcgatacagatgatccagaagggtccattacctcttcccaaattattggcacttggtgtccccacatcatggtaagtagcggcaaacctccctgagatcttttcttcttcggacaaaggatcgggatggcacgacacccaatcagagtttagggcattatcatttttggacacatttgtgattataatggataagtcagtggcaatcgcctccttcacttccctaagagcttggcagtgcccttgaaagttgactgtgttaatacattgaaattttgtgatcaagtcgaacctgcagaggagttcagttgtcaccaggtccccaacctttaattgctcttcagaaaaggccctatatcgagcttctttcttgactatctccctagtcctaacactctgagggggaagctctgctacaaatcaaatatgttagtccaagtacgaaaattagtagagtttaaaaagcaggaaaaactcaaggtaaatcattagaatatctgggagttgaaagcttaactaaaggaaactcggaagaaaagaaccaatattttcggaggtcatgagtgcgatccgtttgacaaacagggcagtaagagtctgggtgctcatccagtcagaagaaccccaactttgatatgtttgtcctcatgggaggattggccttgacactataaaagtaaaggatatcctacagggaaggaacctccagtttgttgattttacaaaacacataccacccaaccaagagcctatatgatgaagggattaactagaaaggtgcaatcccaatttttgcaatcaggtttgtgaataagttctcaagggaaggtgagcgccactggaaatgtgagaccaactctatgcactgattccatcaatactaatggatgcagactcccctatgacagaaagcctgtgccacattagtccagggacgttacggaggccagtaacttcagaatacgcttgcaacatcccataagatcgaaagtagttagatttttgatctatttcccaaatggaatcagtatgggcctacacacaggctcgcatcagtagaggaattttaaccccttcgtctctcctagcctcgacgatgaggtctctctcagtgatgggttcattttttagaatggtttccaaggcctcaggttgagatgttaccatgtgagactcggtttggtcctatcccactaaagatctttccacaaacggaatagatccacctttgacagatatggtcgtgctagcgagaaggtcttggttaaaatccattggtatgaaggaaaaagcaaaccttttgaaacgaataacatgcacaaggacggggtttctttcgtatacactagccctaacctaagcaagaattattttgctctaaacgtgaaatgtcgaaaattcagatagtgggttagtgcacttacttgtcaaattaggagggatgagtggcatgtcaagaaagcctgccagaaagctctaaagccagtcgatacagcggtcgtagttaacctgaaagtcaacgttcgccctaaggaaaaactttgctggtctaatcgaagaggatcaatgtctgggaaaagttctgtgcggatgacgagtaatcgctggatcagatcttctaacgcttcttgcatgcaaaagatggctggaaaaggaaaagaagttgcagagaaaatatggagctttgagtaaaaggagtaaaaagaacaccaccaaagccagtttatatttcaaaaaaaagacagaccaattgaagatcaacagttcaatttttttgcaatagatccaatgactagggaaatgagaagccccatatgattagcctggggtccaccaaaatgtcgaggtccctttttgcacatcattcagctgccaattgcactccatctttttgttaaacgcaccttgccacgcacgaaaagaggtgacaaatacttcctgaaatgtcgcgtggttaccacgcaagtgaggcaaatgtcgtatgtaccctcagtagaatacagctcatgtgagggtgcatccccgacctaaatctacagcacgtgtcaatgatcaacaccaaaaacaatatcaagctttcgtgatccaaatgatctcgaaagcttgggggtgttatcaaagttttcatcaataagacatgtggcatgatcagagggaaacaaccacaacaagaattattcgaggtaaccaagaaaagaaacaactcccggacttggaagacaacgagaggcgatggcctctgagagtaacttcctttagtaaagaacttagaaggcgatgagggtctcaaagacgttggccacgtcagcatcttgcaaatatcactccatagactgttacacctttttttgacgcaggatcaaattttgtcccctgtgtcaggtcatggtagtgcacgtacacaccctcaaacatactttttgcccaatggcctgcttagagagtatttttcaaaggagagacctttgcgcgacgcatgtccaggatcgtacaaaagcccttgcaagtcgctgtatacccaacacgatgaagaagttttcttacccagccaatggtcagatcatcatctcgcagtactggccttagtagcgtatggggtacgaaaccctaggtaggtaaagggtatgtccttgaccccatttgtgcttataaatagtcctatctttcttcaggcaaagagagaacaatttttacttacagttactctacaaaaattccaagaaatctctctctctctctct

SEQ ID NO: 27479 - DNA, 1562 bp, Cannabis sativa
tcttctctttccacacaaggtactaaagggtgtagttcctcctcactctaactgctattcctttcgacatttttttaaaaaagttccctaccattatagtgatatgtcataattaaaagcaacaattattcttttttggctgaaaattaaaagccgtaattatttcttaaaatttctacgtagagatacatacaggatgaaaatagaaaacgtctctttaggaacagaaaaagaagaagtgaaattcgtcaaagaatgtaccgaccaaaaaataaagaagaaaaagaaactatggattttctcaataagtttatgatagtgaagtgacgttttcactgatcttattatatagtggggtttgattcggttcctcaacaaagctcatccgcggacgattttagcccagcgtattcatttattgtcgtacttttcgactggtcacttccaaaatgggctgtaactattcctcacgtcgcgacaacattgacgtgttcgacagtaactggtcacttaaccactaattctaattattaaaatccacaaaaatagattagattcattatagtattacatgaccatccctaatccattcttgtcacacctctcaaaattcaaaagcttttccttatcatctttattaagaagaccaagtttacttttaattatttttgtaatttcccaacgttgcattaaaataactaaaaattaaagcactaacatgtgaatcatgccattataaatttataataaaaaaaataatttaattttaacttttgattgtagaaatttatttttagaacttcattatatatttaatatttaaataaattattattaacgtattacttttttattaatatatttaaattaattttttaattaaagtataaaaatttaatatcacagaagagttaaaactcttaattaaagattaaattaagatatttaaagtacacaaattaacaaagctagatgacaatatagtaattttattgttaataacttttaggtaaataataactgttatctgtggaccatatgatgaaaacatcttaaaataaaaagaaatatatataaataataagttgtctgttgtcctaattaaataatattttccctctccctcaactgctttttaaatataataatatatattttttttataaaaaaaaagcttgttattaaaaaaagtttgacaatcatcaccagtcaccaccaccatctttcttccaaaaactcctcattagtcatattcacttccaaagccctacccctgatcttctaactctctctctctctatatatatatatttcttgttatagtgtttgtagtgaagaaagtttccattttccttatggcgttggagttttccagctgcgtggactctggacttcagctctccaagcgaatatactacgggaaagaacttcgtccccctccagctccggcgacggcgccgccgcaagtggaggaacagaagatgacgaagtcgtctccggcgatggatgaatatcttccaacggcgccgatggtgtacgcggtggtgccggagccggcgatc

SEQ ID NO: 27480 - DNA, 4368 bp, Cannabis sativa
ttttttaaaaaaaattattaaaaagaactattggtgtctagtaccttcattagtatcataccgttattcgtgcaattaattatcgtgtcccatataacttaagataaaaaacttttagaaaatatcgctaatcaatcgtgaaacgccataaaaagtattggacaccgctaatacctaagaatatttttttttttaaagcatgcaaataaaatttacctttttaatttacatatgtcataaatatatatattttatatacattaattgataagcttttgcatcgacatgatcaatttggctttattaattgtcatgcatgatgatgagctatagctagctagtttaacttgcatttgcatattacaaatattgaaaaaaaaaaaaactgtttccatttgatgaagcaataatagtgtttgatgtcattagaggtgtacgaattatttggcttcatctgatgatatagaaataaataatatattagaaaggaaaaatgagaattgaaagagagagagagagattatgcgcatgccgactaatatatttaattacatttaaatgataaaatatgtattaattaattataagtgtgttaatgaattgagattagatgagacaaacagttgaatcctttggcaaatccaaaggtttgattaggcggcgtcaccgacgccatatccgacgactttgcctgtttcttcctcttttcctcttctttgtcttatatcctcctctatctaccccaacatacaaatactaccaattattaattactattctaatttaataacgaattatattgtcatctcaaatttagtcataaacaattagtatatgactatattcccaagaatatcaaataaataaccgttaacactacatttagataaaatattatattgtattaattattacgattataaattttaatacaatataaattgtattatttaatacataacaaataatctttattagtttgtattataatatttacaaaggattcatagttggggaagtcccaaactcaacccctaaccccgggcccccgaactcaaactcgaactcagacaaggaccctgacctagaccttgactcggatttagatcgaaccctgactcgtacccttaccctagccccgatccaaatttggaccaaaccccgaacccacacccagactcatcttcgaaccacgaattccagacctcagccccgatcctaaactggggtcaaggccaagtttacagtaaatataatataattttaacttattaataaaagttaatatcaaacataatattgtattaaataatgttaatacaatacaatataattcaacacaatactatatataagataataaaatacaatataacacgatttactaaatacacagggattaaactaataaggcgatgcatgatcataacatggatttatatattataaaattaaagaaatctttctgaaaacaatgggaaaaataaatatatttacgtaggtagtgtgtgtgggcggtccttgtgaagattttatttgtatatattcaccttgttttgctaagacatagtaaatttaattctaaacaatactatagcaatggatattattattagatacgatcaaaagggtctctaaccttattggaaatataaaatataaacaatattatgaaaagaatgtaataataaacaaacacttggcacaatattataatttattagatttacattctctagtaaccaatgatcattcattcttaatattttttttattattcttttcacaagaatatattttacatatttattaaacagcaagaaatagttccagccaataaggaaatataaataataaaaaggttctaataagattccaaaccacacattgttcgtatctgtgccggcttgaataactatacaaataatgacaaagttaattaagcctcaaacaaaaattacagctaaaacaactttgtaaagagggttagtgataatattggtaaaattacttataataattaataaccccaaaatctttaataatcaaaattttcttaataattaatatatctttactaaaagacaaaactttccaaataaaaagagagaagaaacactctctcatttcccctaaacccttttccaaaactaatctttaggggctatagcattagcaagaaagagcaaaagtttactttctatctatacaatcttcattattgaattttaaggtatctaatctagtatttgaactttaaaatttttattttttattattattattattatttttaatataagagagataagaaagaaagaaaaagaagcaatgatgaactccctatgtggaagcatgggatctctaaagagagaaaactcatgcaccacaataccaccaacaacaacatcaccaaatagtattagtgaccaaacatcatcaatttcatcagtaccaaataagaacataatcataacaaacaatactacttctactactgatatacaacaacaacaacaacagaacttactaaccccaccaagtttggatttctcaaatctgaaatttgaggagttagacaacaatatcaacaatgaagatccaatgaagatcatcatcatcatcatcatcaagctgttgttcaatctcctgacaacacaatgtgggattctattctcttctcggacaacctcgattcgcccgatttcatggtgatgtcacctgttagaaacatgtcctcgccacaactctcttcttcttataattacaactataatagttcaatgcaacaacaacaacagggccagagtactctgccacccgtttactcatcatcaccaccaagattatattcttcttctcctctaggaaatgctttcaatagtagcaccagcagaggtaaatattaatgctataaactaaagaaatgtcttaattgaacatgttatactctttttgatttgatgagaatggttatctgtaatttgaaaattggattggaatttggaacaggtagtaaaggacttagtccacttcataaggtgttgaacacagtgaacaatcaatatatacaacaacaggagcagcaaccagagactagccttgctcttccggcgattgaggagcttttggaggattttattaatcagaataattccacaacaaccttaactaaggtctctgatatcatatctggaatatcatcaacatcatcatcatctaattatcaacaacaacaacaacaacaacatcaaatcattaccaacaaccaccaacactcggatcatcatacttctaacaacaacaacaacactacctataatcataatcataattctagtactagtgttcccttatcacaacagttgcagctagaacgacagcaagagaagaatcaccaacacaacatgcaccaaaataatcataataacaatctcatgatgcaccctcctcctattgatcaggtcaaatctttgtctctctctctttttatctccttatttaaataagaacaatgatacgtgcacgtacaaattatacacaaacttaacatatacttatgtagtaagaaatataaattaactttatttaagatggttctattcccaatgattaaagaattgttttttgttaaaatttttaatatatattgcttaaattttaaattattctgcaccaatttaaattgtttgaatttcaatatttatgtatgtagtcattagcaaaaatttgtatccattttctaataattttttttgagaaaatctttagtatatctctaaaaagggtgttttagtatccatcttcaaattttaattttaatttttttttatgagcacgtgtaaattatagttatttaggatgacatctaaattttaattttttggtacgtgtataataaataattgtttgaagtttatttttaaaactataaactatttaaaattttctaaaaattaaccaatagttctaaattgaactaaaaaaactcttttaaatgtaaaaacaattaaaaaacaacaacaataacaaaaatgggtgtatgataaacttacccttttatgtattgtgttttttatttctcttttcaagttaaatgctaatttatgactgagttatatatacgtatgcatgcagcatgaacaagacagtgggcttcaattagtgcatcttcttctagcctgtgcagaagcagtatccaaagaggagtacatgttagccagaagatttctccaccacctcaacaccattgtcacaccactcggtgactcaatgcaacgagtcgccgcatgtttcaccgaagccttatcagcaagactagccgcaactctcaccacacctaattccataataacacccaccaccacc

SEQ ID NO: 27481 - DNA, 1388 bp, Cannabis sativa
tttttttttttccattatcatctctatatatataactaactgtaaagttttaactactgttttagaaagtataaaatagaactattcaatcttaattaaccaatcaatagggagcattttatttttaacctattgttgtgtaagttttgatcaatttatgtaatatatttacttttgtcaatacatatattattcttccatcaaaaaaaaaaaaatacataatattattattatgagaaaataagaaaaagtatacaaaggaaatatctaaaagcacaagggctactgacagattagttcctcttcaaataccaatttttttttttaagttacgaataccaaaatttacatactattttgagtaaaacaacaaattataattatttttgataaataaaataaattaaaatttatttatgaactagaaagaaattattattatttatttattacatttttaaatattaaaaaataattataaaaatttatttatttatttatttgcggttatcaagtatcctcacgtcattccgggaagagattctctggacctgtctttatttttaatttttcgacataattattatttttattaaataaaaaaaatatcttagcttcaataatatgaaaaatgcgtattcttttattcttctaatactttatcaataattttatttttaaaaaagaaattacaaactcatataattgaaaacataattttttttttattttaagattataacataggttatgtggatataataaataaacttttttttccatgaaaaataaaaagaaaagtaattaagctttcgtttcaaatcaatattaggtgacatgtcacacattatttattttcattaaataaaatattaaaatcaacgcgccacgctcgtgtaagtaactttaattaactaaaaagtgttttagtcagtaaattattattttttttaaaaaaaaaaaatcaaaagaagtctctaagtaattgaataattaatgttttttttcactttaagcttatccaaactaaaaaatttaaaaaaaaattaactgtcattttttcgtgtactataaagatttcaatgttgtacaaagataataaatgttataaatttaattagttcaacaatgcacttatcaatttttcttcaaaaaaaaaaaaaattaaataaataaaattcgttgactcttaccttcttaatttgagttcatattatttccctttgttccattaatgatagtaataattaaggtcaaaaaataaattaaattaaattaaaatggaaagttctagcaatgcacgtgcgaacgtgtgaaaactaaggttgattggagtatgactagataaagagattttacatattaatttgatccaaattttgtacgaa

SEQ ID NO: 27482 - DNA, 1198 bp, Cannabis sativa
tccttaattatttgaatttctattgtctttgctgatgatcatcatatcatcaacatagaacagtaggtacactaccttatgtgtccctaatcccttgtagtataaacaagagtcaaattttgatcttgagaatccaatactttgaacaaacatgttgagcctgtgattccatttcttaggtgattgcttcaacccatatagtgacctttttaacaaacataccatatcagtcttcccatttttctcctgaaaaataggtggttgctccatgaagatttcctcatctagaaaaccatttaggaaagcaattttgacatttaactgctcaagtcatagtgtgctgcaatggcaaacatcatcccaatggttttgtatttcaccacagacgagaaaatatctgtgtaatctactccttcaacctgtatgaatccatttgctaccaacctaactttgtacctaggtggctcaccttctgtcattccctttttctccttaaacaaccatatgcaagagaaaaccttctttccttgtggccttggaaccaaaatccaagttttgttcttcttcagggattgcatttcttctcccattgcagctagccaattcttctttgatttgcttgcaatagattcctcataagtggttggttctagatcactttcagattgtacaactaccaaagcatatgctatcagatttgcctcagcatatctgcttgggggttttatttctcttctagttctatcctgagcgagttggtagttggtcaaatctggttgattttcttgaccaacttcctgagtgtccacctcacaagcaccttgagcatattcctacatagtagcctgtgtttccacctcagtgtctgtctcttttgctagtctgtgtggtaattcaactgggacttctattctgtcaaaattgatttcgtgctcagccaaatcatctctattagtacctggaacatcagagtctttacctttcttggttgtcaagtgcatgaaattatgctcattgaaaattacatctctagatatgacaatcttaggctttccattttcaatttgacacaacctatatcccttaacacctttaggatatcaaggaaagaaatatttggtggccctaggatcttatttatcgagcttttgatgagcatagtgttggaaattattttaccaggaagatcggaagagcg

SEQ ID NO: 27483 - DNA, 2570 bp, Cannabis sativa
cacgagccatgtattcccctgagatatgattcaccaccaactatgagtcactgcagacctctatgtacttagcacatacctcccgagcgagctttagcctaacggagagtgcttcatactctatttcgttgttagaggccttgaacccaaatttaattactccattcaaaggttgcccctagtgtagtcagagcgatccctgcactgaaaagctgatcgatggccaatccatccacatgcaacttccaaacgagtttgtttttttttttattttcttctattggggatgccttttttggtcctttgtctggctcaagattattttttgaataatgttattctttgcccgtgcatttagcctcgaaatatgccaaagcttgcccttttactgctgtgtagggttgaaaagttatttcgtactgacccaactctatagcccatttgagtagccgtctagaagtgtcaggcttttgtgaaacttggcataaaggttggtcggtttacaccctaataagatgagcttagaaatagggtcttaactttctagtggctaagatcagatagtaagttagttttttaattagggggtaccaatcctctgcctcaactagtcttttgctaatgtagtaaactggatgttggacattattctcctctcttattagcacgcgacttacaacatattcggtgactgcaaagtatatctctaattcttctcaatccaaaggttttgagagtatgggaggctctgcgagttactttttttaattcttgaaaagcattttcacattcttctatccattcaaacttcttgttacctcaaagaatattgaagaagggaacacacttgtctgttaattttgaaacaaatttgttaagtgcgactgtctaaccagttagactttgcactttcttcaaatttgttggcgacttcttatccaggagggcttgaattttctttggattaacttctattcttcgagcattaacaatgaatacaagaaacttacccgagctgaccccgaaagaacaatttaatggatggagtttcatgttgtattttttttgaggattttgaagcatttatctagatcctctttgtgcccccaaccttgctggatttgatgagaatgtcaaccacatatacctccatgtcttatccgatctgatctttgaacatcttgttcactaacctttggtaggtagctccaacattcttgagaccaattgacatgactttataaaagtatagaccaatgtctatttagaagctggtgtgttcttggtcaggtcgatgcattcttatcggatttcaccccaaataagtgtccataaatcttaagatctcatgtttgactattgcatccatgagctgatcgattcttgagagtagaaaatagtcctttggacatgccttattgaggtcggtgaagtcgatacatactcaccatttgttgtttggcttgggcactagtacggggttagccatccaagctgagtataaagcttcaataataaatcagtttttggggagtctttctatatcttcttttagtggttgtgcacgttctttgtccaacaatctccttttttgctagatgggatggaagtctagatcaatatttagggcatgagacatgacagtgggatcaattctaaccatgtccttatgtgataaggcaaaaatttctaggtttgctcttagaaattttatttcaagcaataaatttttcctattttgagtttcctggtggggatggctgggtcaatttccactttttgtagctcttgcactggcccaatatttacatttatttccccaagttggggatccatgtcttcatccctaccatagagcaaggaaaattcctattgggcaatgcttttttccttctctgaattatagccggaggtatcttccttcatgaccttagatagagcaaggttttaatattcccatacaatcctctggtttctttttagacagcctactccacttttagttaagaacttaatgcacaggtgaaagactgatctagggtttgtcagtaaagttatgcacaaatttagattggatacaaattatacattcactagtgaattattggtaataaaacataaagaggtaattagaagggtaaaatgataatttgaccaattctaattatggaccaatacaaggagggctaataactggcattgattatataaacgaacacagttattaaactcaataattataattctataatttctaagagtgcaattctatatttatatcagagtaataataatggaattaataaatataattatttgattgatgagattagatagataatataatttattggagcttagtattataggtccatggttcccggaccactgtataaaatagttaagggtataaataatacaaaatcaagtggaaaaagaaaatcttttttgaagtagcaaaataataataatttattttaaattcattatttaaataaattaaggaaacaaaaatcgtcaagacaagataagatgatattaccttgtatgttatgacaaggtaggcacca

SEQ ID NO: 27484 - DNA, 2634 bp, Cannabis sativa
ctgacttctataatggaaataacatagttcttcacaatacaacttactagcaatattaagtaatcaaatgttaatttacatgaattaatataactagtgaagataatttaaatgattaattaaatttctaaaatatgagttcatctaaataaaatatgtatgtaatctttagtatcttaaaaataccttatcactttgtatgcaattatatgtggtactctaactcaagtgatcaattaatctgatccttcttgattttcctaaaacaaatgcaatgctaggtcttataaaaacttaggcatatatttggcttctaaagatagaagtaaattaatgaatgttcttaatttattctcattaaataaatttgcaagatgttggtttgagttggatatatcactcttaaagataaaagtaacatgatgtatgagtaatatataattttatttaatcagagatggtgtgactactctctatttaattaaaattatagaaatatcaattctattatttatctcaaaaataatagttttagaattaattatttcaccttatataggaaacttttatcatcatttgcaagtaatatatcctccacaaataaaacaaacattactctcacggtctttccggtatatatataattaatttatgatattcttttcaaaactaaatgaaaagttgacatgaagaaatattaattgtgagagatttattttaatctataagtagactttttaagctttcatatgttcactactattagagaaaattctttatggtcgtctgtatgccttctcctctaatttactattttggaatttattaatgaattgaaatgagagcaacaaaagcctagtttactataatagaatcttttattaaaacaagtgagaatgtatagttttttcgctgctatgaatcgtttcttgaacattgtctacagattcttccaattacgaactgatctaggagataatcttttcatcaattctctgcggactttgacagagttaatgaaaagcaaaggtactttgcttcatttctagcttttgctacctgcatcattaggctttacttggatagatggtcactgggatccgttcctcctttatacaattccatttgaagcatattctgaagtgctccaacaattatgcatctgttatagtgagaatttctctcctagaaactcgagaccaggctcctataataatgacacgtaacttactctcgagaatatgagtgtagagctcaatacaaacctagaaaattttcttaatagttaaaaaataaatatgaacaaaataaacctaaaaactatacaccacgccgaagcttgttgttcaacgccgactgctcgaataaaaagcaagtgaggcacatagaaacaaagaagtaaaaaagagttcaagtgatgtcaaccttgagttttcgagattgggatcttggatctacagttggagtggttggattgagatatcagatgaagaaaaagatagcagagactttgtcatttgtcgtcgattttttggttctgtcgtggctcgagctttagaggttgaagaaaaaaaatagcagaccgttttggaggttgagctgcttgagcatgaagaagaaaaaaaatggtagatagaaatgttgcacagtcgcttagaaagggataggagagagaggcggctgggagggactgatatgtgtaaatgaaaccctaaaacctaatgttccttttatatgtgtaaagccccaacaacattaaaaggtccagatattatgggacttttcatcccaaattttatataaaaactgggataaaaagtcccacatgaaaactaaagttgcatttggcaaatgcataaaaatagctctttcaacaccgttttttatccgtttgccaaacaaggcccttgttccaattttttttaaggctccaaatgtgaaagtgggatcaaaagtttctatcccactttttattttttttcattgtaaaaagtgggataaaaagtctcttttgttgtagtgacactttaggctgagtcaatactctgataccatttgtaacgtccccacttcaagcctccattaggccttcccccatgaactaatggcttatacacgggtacgccacttttggttgctttgtggattgatgactgccctacgataaagcaatacgagtgtttccagcgtgctttgtcctcactcgcatgcttcctggaaaaacttcccaggaggtcacccatcttaaaattttcccaagttaagcacacttaactatggtagcccattacgaaagaactccacagttaagcgtgcatgacctggaataatttcaggatgagtgacctcatgggaataatttgttgatatagcattaacataaatgtataaactgtactttgaatttattccaataatataataaatttgtatttataattaatcaacatatttaataatgatgtctaaaaaatatgatgctctgcaaataatattttagagtaagaacacacacaaataaataaaaaaagttaacaactttttatagtcatcaatatatttataatcttgaatagtttaaaataaaatctattatatcattataaaacgcttattttgatttttttttactat

SEQ ID NO: 27485 - DNA, 2188 bp, Cannabis sativa
agagagagagagagagagtactaaccaagatgttgccaaacaagtggttatgacatgttaatttgaagagataaacttctgactttgagtatagaaaggactaattcaaacaaaataattacatatattatactaattcaaacatgtatatgattattgtaaagtcagctacctttatgagggtcatttatatttaatatttatataaaacactctaccaacaccacaaaaaatcatcactctaattcatcctcattgactatccaagttttttaattaattctacaaaaacattacttagaatatttgtgtcatcaccaaattaaatatggccactagccagtgtcatattagatatgtgtaagaatttatagcttgtaaattaagagcattaactaaagataagtaaaagaagaagagagtttaatttggttcacactaaatgaggtcctaagctaatatgattttcctattctcatataggattgaagaccagctgataagatcagattcaaaggtcaaaaattaccaataaagagaaatttgtctaaactaacaatgtgaaatactaaaatttataaaataacctcacttaatttactctctgcgaccgtcatggtcccaaagtagaaatataatgatcgtttatggtcggacaatataattcataatcgttttatatagactgtttttacaaaacacatcctttccactcaaattatgttggtaacacttttgtttttaaattttttaatcacaaaaataaaagtaaaattttaattttaaaaacaaaaatgtgtcctataaccacttttgttttttattttttttttaaaaaataaaagtgtgttctgtaaattttattttcattttcatttgttgattttatttaaattggattcggatctgaagccgagatcggggccgagtcgggtttggggtcggggccaaggtctatttgggttccaaggtttaggttggagtcaggtccaaaatgcgaatattcgcgcttgcgcaaattgaattgattggatgttgtttgacctcaaaaaataactcatctaatctaattcgtagttaattatatatattttaaaaaattgtaatatatatattaattttctagaaatattaataaaaaacacaaacatctcatttctaaacttgttaaaatcttttctaataatatattgaattggtgcatttttatttattttatgatggaagacaaagaaaaataattcctattcacatacacacttttatttttcttttaataatggatatatatatttgtgtaaatctagatatatattgtaatgattaattgtttcatttttttttgtatgagttgagtacatatataatgaccttaggagattaaaaaacaataattttttttttttgtattttaatgaaatattaaataatttatcattaaaaaaacaactgtaatgaactggtacagttgttttttgtttcgagtatagaaatgtaaactttctcgctcattgtattgctaagtacacttttagggtgtgtttggaaagttgaaaagtaattgaaatagtgtaatttagagcagtactactatttttggataatcaatgttaatttttttatgtaattactactcatttgccaatcactaagggcaggttgaaattgagtgcaattgaatgtaactacacaattttgtatatttatttgactacgtaattacatggaaataattaaaaagcctaaataattgaaaattgatgtaattaaattgttattaacatactgtgtactactttaataattacacaattattttcaaacaccctacaataataattcatacataattactacttgtatatatgaaatagattattcataaacatcaacatcaaaagaggaatattggcccaataaaaaacgaaatcaatatgcagtcttgatgtatagcctaaaatgttaaaattgctaaatttgataagaataaagagacctacaaagactatcatatataaaagagttagtaccattgagagtttagagttcaactctttaagatgattcctttaagactctattttctcctcgagttgttctcggcgaaatcccatatctgcagtgcagccgcctttcacaattccaactcttcttcaagatgctctaacgaatttgcactcacctccgc

SEQ ID NO: 27486 - DNA, 2811 bp, Cannabis sativa
agaatatttgcttttggtggtaaactaatttcgctgcttgtacgaaggggacatgtaacaatactatcactaggaatggtctgacacaagttgagaccacacgcgataaggggatccagacgtctcgattcttcccggaggctcaagcatattcaaatcatatccaagtgctctataggattaggatgaccttctgggagtctatcttcttcctggagctatatgttcttgagccccaagataattagtcattagtaacgtctaagctagaccccactggacacttgactgcctgctaggaagtcacgtgtatcaataaaaatttgggataacaaaagctttaaaatattagttgggttttgaaggttgtttttcagtcacagcccaagggtatagtgggagatgggattttctatggagattttatgagaaggtttggttgttggggtattcacaaaattatattgatttactgatcactgctatagggtatagtgcgtatagattgacctagatttatggcaaaatcaactgaagtctcagaagagaaacatagaattttatgtataaacttcataaggaatgaattttgcattggtgtttaattgggaattttaacattctggccagtcattatgataagaaagtagatcaatcttaccttaattggttagtgaatggttttcaacaaatttttcatgattgtgggttgttggatttagaattaaatgggtattaatacagttgggagagtgataatagaaaagtttcatgggtggaagttcatttggaaggttgtcaatcatgattggattactttatttcgtctagctaaattatttaatttggagacttcatcatcatactctgttattgctagaattgcactttacaataactcttatgcaaatgtcaaaattatgattcaagaatgcttggataggtgatttaatgcgcgaaaaaataattcaaaatgtttggggtactcatgtggggttatcatttcaagagaaaattcatttatgtggagaagagcttcagaaatggggtaagtaagccactagaaaattcagagagcacatcaaggattgtaataagaagttaaatcagttaaagcaaagaactgatgaaaaaggtattcatttttatcaagagcaaaggaagattgaagtattttttttttgaaaagcctccaatcatcaggcctttgatatatcattatctagtgatcgagaaatgcaactcgatcaggagtcttgccccatcgagaggttttctaaaaacagtgatcaaaaaaattatggtcgtaggtcagagaccaaaatagtaaatacttccatgtcactgttagttttaggtgtaggaataatcagattatatcactcaaaggaaataatgaaaattgggtggattggtaaaatagtttacctgatgctgtgctagattatttacaaatattttcaaagctttggagtctatgtgggaggaaatagtggagtttatgagtctttcgattacaagtgattacaactttaaattaatcatgtcagtgttgtatgatgaggtaatgatggccctttttcaaatgcgtcctaaaaagcttctcgacctgatggaatggactctactttttatcaaaaatattgggggtatcattggtagaggtgtagtttcagtggtttaattttttttttttcacttagaagtgtgttgacttcatttttagtcaacaacgtgcagttagtaaaacgataatacacataattaaggaataaagattgtcaaaaagttgtaaatgacaccaaatttatagaggtttggcccctaaatcggtaatgacatactcctattttgttgtatttttttagagaataaaaagatcacatgaacctagtcaagttagtttcttggtatctctaaaggttacaaatattttggcaacacaacagctctctagagaatatagaattccttccttgaatagtgaatatgatccaatatttatagggaaaagatgtagcatatttatatttaattacagaataaagtatttaatatttgaatgagtcaatcccacaaaatcctctcatttctcctgattctcgcaatccctcaatgataggaatattgattgacctatttggaagaaaataagttttggaatgaattttgacactttctctcgcaaggtatactggtcggtcattttttgtgagatgattctttgattgttcagattattggtcggtatgctccgtccagcacatgcctggtactggaaggatctatctaatcaatacgggtgaccaatatcgtctggaaaatcttctcaaaggtctctcatccttttaacctcttcatatttaccacgtgccttgtcgctttatgttatgtcatcaggataatttttgggataatatttttctccaagtccgcatggggaccttgctcgggtatgtgacgcgtgttcatgagctgccttccaaagcgacctgtcgagtagaatcatatcgtcagtccgtcccttcaaatttttttcatgataaatttttccttgaaaaccatatcttggggattgtgctaatggttacacgtttctccaaataatttttaagaaaaaaatgaggtttttgggtttttggcaaggaaaaaccattcatttcaaaattagtccccaaaattttcccctctttttactttgcctgtaaatatctcaagaaatcttattatatactttacgtttcttgagtgttcagagcaaaaattgagatagaatttccaagtttttgagcttttttcttcgatcaagta

SEQ ID NO: 27487 - DNA, 3129 bp, Cannabis sativa
atttgtaaagagaaatactgggtaagttttacaatcccacatcgcttgaggaaggtcaaactagtgtaatgattttaacattgtgtaagtatatatgagattacacagttgaatatgacttaaaattgattgattggtactatctatatcaacaatgtgcatcttattttcttgtagcgcgctcatcacgaaataacttcacagttaagcgtgcttgacctgaagcatgcgaatgatgacaaaacacgctgtaaacactcatgttattctgtagggccagtcatcaatccaggatgcagctagagtgacgtactcgtgtataagagccatattcgtggaggaagatccaatgaaagcttaaagcgggaactttacagtagttttacaattataatagttgtttatggtcacacaatgtaatttatagtcatttttcgactatagaaaattattttactaataacaattttcataaaagctaatttttacaaaaacactccatatatagttttatagagctatatgtataaacttgtttattttcacattaattttttggctatgtatgttttctaattaataagattattatttttctttacgcatgtgagactcagtattatattaattaattttaccaaaaaatatatagtatatgtatatggaattttatgagctattgtgtaatattggtgctaatgtgctctgtaatttccatttttttatgcttacttatatggctagctagctatatattttggtaacttgttcttaaatcaatataatctgactacgtttggaactgtacgtgttgaatagttcaaaaagtagaatgaaaataataatatttatatatagatataggaccttaaaatataatttaaacacatatagttttaattattatataaaatttattttcaagacaaatggggagtttaaattaagtaacttatataatacattaatctagttttttttaatggagaattagtaatgtgcagcaaaatacaaaatatcatataagtactgttacacatataatacatatagttttttttctcttaaagataagtggtggtagtatttatagataagagatatgaattttaaagttcgttataactacaaatgctaagttgttaagttagttatgacttaataaactctacgtagtgagatctccacgttgggcacaagcaaaagtgcttaggttaacttctaggactatgaattaaagtgaacgctgaagggacttcttggataggaatagtgatagctagagtcgactattcgtgattcccttccaggagagaacaattaactttttggaactcctttccgaaagaagactaactttcttgaagactccttccggtgtggacaaaatagacttccaagaacgtcctttcggacaacatctatcatttcacgagatcacttattctaaatggacaacacgagaatgccctttcagatgactttctataacaagaaaaacttttggggacctttacatatggaaaaattatatcacaatttccattaaccacctcatctggcattaaggtatatatcttaataaatattaagtgccaaataataacaatattcttaaaattaaaaatagtaaaattaataaaatttaaaaccacatccttcaattataatttaatccacgtataataattatttacttttaattatttttgctgtataattttatttaattggtcaatcacaccgtaatctttgatggagttctaagcacaattcatcatgacttgctacaaaagatttaaaaaattaaagcaaaaataactaatttgaaaacttttattccaacattctaaatctaatggaaaattattttgtacataaattaatatagtgcaacttgtgcaaattaagctgtctatatacaaagacaagcaatatctaaccactttcactaattataattctttcaaataataataataataattagattttttttggttgcatacttgcatgcaatatatattccacgtaatatatatcaaacccctggtcaaaatccatagattatttattaatccattgtccccaattattttgttttgttttattaaatcaaagctaagctgagctgtttaattagatttagaaaaaaagaattaatcaatataattaattaatgaataattaatgccaattcttaagccgaaatccaaggcctatatctagctagtatatagtacgtacacttgattatattatatatgtatattataataagtagctatatattgcactattagctatataggtactataaatacacacactaatcatctcataatttatagaagagaattaattcagatcaaaaacataataatattgtgtatttagatatgggtgacttaacaaagtcatgtgtattgatggtgtgtttcttgattgtgttaatctcaatggaattgggtgttgagggccaaggccaaggtggtggttataagaaggagaagaggcccgtggattgggcggctaccacaaactacgacgttttgacgccgctagcatcgggaagagaacgagcattttgcaaagcaagagggaaatgtacttccaaaaccctaacttgccccgcgcaatgcccggagcgaaagcctaagaagaataagaagaacaagggttgttacattgattgtagcagcaagtgtgaagtcacttgtaaatgtaagccccactccttagatctcaaattagctatatataattttgtatttttgtgttggaatatatatatgtattactataaaaaaaatgtcacttttgctaacttattagcgtaaaaatgcgttaataaaagttaattttattttaccagcataatatttataatttttatcaacacaaaaatacattaacaaacgtctattttttgtagtaaatgcactgaaaatacatgtacatatattgcttctaattaaatcgtgtattagaaaaattacttctaaaaagtgatttttatagtagtatatatagatcttatttttatgactgcacttacgatctaactaactatatattatatagttttacatgtcattttgttctataaataagtcaaccttctttttt

SEQ ID NO: 27488 - DNA, 3398 bp, Cannabis sativa
agatttactagtggaggatgatgagctaaggtccaaatcctataaaaaaaaaaagaagccaagtgataccctgattgtaccgtataaatacttgagtgatgatgctgccaaattagtttgtctccatttggaaagtagcttaggggaatgctaagagtcttgtcaatgtcaatttgtgagaagaattgttgcagcaaaggcaagttccattgcctttctttaatgataaaacttaacaccataatatcattaggtctcgagtaataaactggaaagaaagagccatatccaataatccatggatccgaagcacaatttattctttgccttttaccaatcttctatcttaaacctttaaagagtaattctttcccctaatgaataccttgccaagaaagggagggagaatgaccaaggtttaaatcaagaaaggagctttggggaaaatatctactctttagaatcttacttagaagcgagtcttgtttttcaagaagacgccaagcttgtttagccagcaaagcttggttaaaattcacaaaagatcagaaacccctaccacctttagttttccatagacagagtaaacgccaagagcgacaatgaattgtagagccattttcatttaaaccccaccaaaagtttaccatcatagactcaagctaattacaaaagtatactggtggccgaaagtaactcattgcataagtgggaatggactaaacgatggctttaagaagcatttcatgatcacccgctgaaaaaaaaaatcattccagctgttcattagtttccaaatttttgcctttatgtcactgaaaagttctttcttgtctcttccaaagtatgatggtagacccaaatatctttcatgaaattttgaaatgggcatggacaactgtcaatgaaaaaagatttgtgcagcaagggttgtgttgggcgaaaaggatatcatcgatttttcccgattgagaagttaacatgaagcatggcgataaatatccaaaactctttgattgcaagacaggatctttcatttgcttgaaaaaagagaagactatcatcagcgaagagtaaatgtgagattggaggagcatggcgtgtaagtttgaaaccattgaggtgttcagtattctcttcatattgcaaaagtcgagataagccttctgagcagattaagaatagatagggagttaaaggacaaccttaacgtagacccagagtaggcaccaaagaactagctatttctccatttaaaacaaaagagaagctattagtggttaagcaccccataattagcgagatctatttttttggcaaagcccatttcttgcataacttctttaagaaaatgccattcgactcggtcaaaagctttactcatgtcaagctttagagacgcaatgcaaagcgtccccgagtcttattcttaatggtatggaccagttcaaatgctaccaaaatattatccgtgattaagcaattcggcaagaatgctttttgagtctctgaaattacatgtgtaagaagttgcttgaatcgagccacaagcacttcagtattaagcttcgaaatcacattacataagctgatgggtcaaacgtctttcatacattgagtcttcttaatttttagaataagagtaatgagtgtcttgttcaggcttgaaggatcagccccttcgctaagaacttttaatatagcttttgtgactaagtctccaacggtggaccagttttgctaatagaacattgctgacatgccatcaatttttggactcttatcagaaactgttgtatgtaaggccaaatccacttctgacgcttcaaagggtttcacaaggttagcattcattttggtagtaactaatgtaggaatggtactaagagttaagtcaagagctgattcatcaataactaaagccaaaaaaaaaatggtggtgaaataatcattaatgacagcagccatgttagtttttgtttgcattttaccacctgtgtcattataaagaatcttgatcttattgttagaccatcgagcagatgctttagcgtgaaagaatttcatgttcctgtcacctaaattcagccagtcgatctgagagcgttgttgccaataaatctcttcttgttccaataactcatccagtatttctttggactattgaagctctatcatgttgtcatttgttcaagcaggtgtgttattgagattattgactttggtctgagcttcattgattcttttttccgtgccaagactgtagaccggttgcacaagcatcaaagtttgtaataacaatttgaattggatcaacagagttcagattgtactagcatttggtgattatttctttgatatcagggtttgaaagccatagcttttcaaagcaaaattggcttctctttttgtcatgttgttgcagtagcgagattacacgatgatctgagcaaaagaaatccagctgatgaacctgaggcttgccaaaatatcagtcccaatggtgattaacaaaacactaatcaagatgctttccaatagtttgaacaatagtacggtgtttggcccaagtaaaagtctcatcgtcagctagagtttcttgcagaaaatagcgatccaaggcagtcctaaaagcatccatttgagactcatgacgtaggtagccacccgatttatccgcattggtaagaatttcattgaagtcgccaatagctagccaagggaggagcaaagcaacatcacctaatcgttcgaataaggtccaagatgctgctctgttattggtagttggtgcactataaaatgcaataaaatggaatgttggtcctccatgagtggccatgtaataataaaaaaagtgtgtccaaagtttatcaaagtaacatcaacatcattagtccaatagcataagacctctactaagacccactcgtggtgatttaaggccattattaaagtgtagtgattgatgaaaacaggaaatagaattattattgagttttgtctccatgagaaacaaaacatggggcgactgttgttggactaactattggaaatgtctgaatgcacttgggttctccaaatcccgtgcattccaactaacaattttcatggcgagtggtgggattgcaaagcaaccttcgctgtagagtcaagaaaagcattggaatctgaacttgtagaaaacaatgcctcatcaccatcatctcttgacaacaaagatgcagctatgtttgtgttacctcgacatctctttaacattttacgcatcgatggataatcattggcttttttaattgtgctattaggtgatgcattctctttatccatgccattgtgaatgattgaggtaggaggcttattaattattgcacaaagagtacttgtagcataagaga

SEQ ID NO: 27489 - DNA, 2253 bp, Cannabis sativa
caagagcatgcatgtgaaataataaaaaaggaagtatattatcgaattacgaatgttttggtgccttgctcttgctatgtttcagcttaactatttatttgtacaagatacttacttacaatggcaacacagtgatgggaaaattaggaaaatcaaaattgttagggccatgcaacaattgttatgctttattttctgcagtactaagtttacctgattatggagagaataccttcaaaattcatccaaatattcaagtaataatattaatttcattggaaatgaatgttgcatcatcaacttacttcttttctagtttgcctaccattcaattcaatcgatggttgccatatattcgcagatgaaaaattattgaaagttgttttacaagtgtcttgtattgtttgaaaggtcatatctttgaacaattactcattgaattttttttctcctaatcaggtggcttatgatgattttgttgctgctgggtcacttgctgcagcaagggagaaaggagtcgtaagtttttggctttagttttaaatttcgcttggtcagtagccatgcttgttagagagttccccattgataatgtgtgggaatctaataccatatataagttgtatgagctacttctctcattgtcaattagttttgagatagaaccttatattctaacaatgcttgaccaccctcgacataatcatagatttactatgttttactcactttcacataaaattggatacaattggaaagatagaaaaagataacaaacataggtctttcatcttcattgtatgaatatgcactaaagataaggtctaaccacaaaatcccatttagaaacattcagttctttacttgttcgcgtctcttagatttggttatcaaattagagaatgcatatgtatcattaaaaacagctctgaatgttggctctactttgatggtggcagttgagatcggagggtaaagaatacattgtacaagaaggagatgtgatgctgtttcgattcaatgtttagctcggttttggcagatggaaggacttttcgtttttctcagaaagtgaaggtgaaattggaaatacaggtatggcaaaaattggtcttggagatttgaaaatacaaatgcacagactatcaccattttgtaatatgattgttagtagttacatgcagagagagtgtaataaaattttgtttggaaagttaaatatctcaattgattgattaaaatttttgtaacatcacttgtagaaataaacagatactatggtccccattcaattatgaattttattttattttcagtaatactttcattttttttgccaaattccatgaattaacattttatcataattttttgggactaatattttgaataattagcatttttgtcaaactttttgtacccctataatttatgacttgttaagaatactcttcaaaatataatttttatagtaatatggtctttctattacattttattcaattttattgtgaaatgaatggtgattgataaatagatacaaattaaatatctttcacttttttttactttaatgattaaaaaattaaaaataaaaatttaaataattataaaaaagaaataaatgttattataaaaaaggtgaagggtatttaatttacatccatttataaattactattcactactctactcattttatcataaaatgaataagatatgatagcatgactatattagtgtaaaataaaagttatatttcaagaaaaattattaacaagccatatattataaggggcagaatttagtagtgtaaaagattcaggcaatattaccaattattttattaatattatctttgattatgaatgaaagtgataacaacacccaatttattttcattaattaggctaaatcttaagtgataatttttttagctgatttgtaaaacaaaagtgttctggtattagtcaaaataaatgtgtatagccagatatcattttggtgtaaattataattataatacatacatgggtgtgaatgtgattaaactaaaacaagagtaatattgtatattaatttttaaaggtgaaaaggaacaaattagtgacactatataaagatatgtgataacattagaaaacatactttttttttctataatctaatctattctaattatggatgaagatgaagataaggtgtctttatctgtaacagatagcatcatttgtcacaagaactaagtatata

SEQ ID NO: 27490 - DNA, 1628 bp, Cannabis sativa
aataattttttatggtcgcaaaaacgactataaattacactgtgcaatcataagcgaccattatgttcggataaagtaaattaagtgtggttattttgtaaattttagtatttcaattttccacaaattaggtagtgctaattattgaaatatttaatcacttttttctatttctaccttacggtcctcttccctcaacagctatggtcatttcatgctcaaccatccatggcttccttccacagtcttcactcaatgatttcttcaggtaaattgatattctctttttattctttcatgtttctgcgtctctatgatctcttccactttctatctctttcaatatcaatcttaattttagtctagttttatttcactgtaattattagatctggcttgagaatccgattaggtctttaaaatctgatttcttccatcaacgaatgattttaacttcaaactgtttgttatgtgtgggtatttatgatcttgaagccattgagattatttgagggtgaattgtaattggtttacactggctgatttctcatatatgtctctacttcttgaacactctgtgcctatatctatttagtggtagcaaaactcaggaaattgctcatttttcttcactctatcatgtttctctcttttcccttaaacttttctcttcgtatctttcagcagagtctcccattattgaagcattatattaaaaggttgttgagaaatataagatggagattttgcttatctatttaatggtagcattttgaggctctttgttttgtgtgtgtatgtgtttttttttttttataaaggtctttaacgattggagatttgcatggttgattcgatgtgtacatgtatataatcttatcctctatacgaaatggcagtcaagactcaagagagtttaatacttgagagttatgttaggataagagtctttaaactttcaagtgctatatatgtgattgaattttatgactaagatattcaaaaaaggggtattaagttaagatcatgtaatatcctatgtgttaagcattggactggggaatccatataagcaaagttgttttgatagctattgctacttttatgccatttttgttactttttgcagctcctccaaaggccttttttttttattctttatttttttataagagaaaatatagaaaatttgaagtttttgctttgttcttcttaattatgtttattgtttttcttagatatcttttaaaggtcttgaggttttcttatatttatgtgagattgtagatatctatgtgaatccttatatttgtatgtttagtatttgtgttttcctctgtaggttttggtgtactattagtgagatttaacctgagagagatataattccatcttttgattatttataatttgtgaactgcttctacatttcacctttgttctgacaataaggactctgagttaacaacacacaatcccaattccaaacaaacatacagattatttaaaaagacacacatttctgttgtttttaatccaactaaagcaaaggattagtctttgattataacggtttatttttttatgtgacactctatgttttttcactgttagtgagtgtattgcta

SEQ ID NO: 27491 - DNA, 5073 bp, Cannabis sativa
aaaaaaatatatgggttgataaaattgacataataatggtaaactcaaataatattatttttgcatcaattaataactgccagtatcaaaatattggattcctttcaaaaccgacaaaaatagtgtaaaaatcatattttacactattcccgtcagtttatcacagacacataaaagaaaaaaaatctcaaaaagccatatgcgactgtaatttgttggatttggacctcattgggtacccgttcacttgggagaagaatatgtggattgaagtccgtctagacagggctttagtcattgaagcttggtctcaaatgttccaaggtgccaaactctttaatcttgaaacttctccctgtgatcactctccaattttccttgaacctatagttattgatcaatcatcaaagatttattgtttttgttttgaaaatgacctaaaagaacctatgtgttaccaaatcgttcaagacttttaggacaatgctagctcgggtgagattaagaataaattgaacttgtgtgctacttcattaactctatggggaaaggagattacatggaatttttgaagacacataagagagtgcaaaactgagcttaagcagctggaaagaaaaaaaaaaaaagatgatgcctctgttgctcgatgcggtaaggttaggaagcaactttttgttattcttgatcaaaggaagatcttttaaaaacaaagagctatgcccttttagttgaaagagggggaccaaaataacaaattcttttacaaggcagcaagtaatagacaacgtaataatcatatctctaagcttaaaaattctcaaggattctttgtggattgggagcatggtttggctgatgtagttgtggattattttgctgagttattttcagcttctggcaccgattatagtgaggtagtacaatgcattaatagagtggttcctgacttggccaatttagagtttacaaattaaccggttaccaaggaagaagttcgaaaaataattttccaaatgcatcctgataagagcctagggccaggtagtatgaccctatccttttaccatgaaatgttagaatattgtgaagaaagatgtaattaatttggttcagcatttctttattacgggtgcattcgatgatggttgcagtgatgcaaatgtggtgttaatttcaaagaaaaaaggccctgagtctatgaaggatttgcgcccaattgccttatgtaacgtactctgcaaggttgttacgaaagttatgactaatatattgtatgaagccattcatggactcaattattgcggattctcaaagtacttttatcttgggacgacttatatcagacaatattatggtctcctttgaggtgcttcattttttaaaatgaaaacgaaaaggtaagaccagttgtatggccttaaaactcgacatgagcacggcgtatgattgtattgaatggaattttttggaagctatacttagaaagatgggatttgaagatggctgagtgtgccttattatgtgatgtgtctccactgctaagtaaaaagttattcatggttgtcatgaaacggggccaattgttccaactaggagaattcgacagggagatcctctgtcgccctgcttgtttattctctgcattgaaggtctttttgctcttcttaggaaatatgagtgtcatggctagattcatgggtgaaaggtggcaaatggagcacctcgtgtatcacatttacttttcgccaataatagctatttgtattgtcaagccactgaattagaggccctgcgagttaaagaattattgcaaaaatttgagttggcttcggatcaggaggtaaatttattaaaatcatccatctttttcattactaataccactcttgttgttagaaacgtgatcaaccagcagttacaaatgagctttttagatgaaggcagtttctatttgggtctcctaagcactatgtctcgtaaaaaaattgtagtcttgagttacctcaaagagagagctcaaaaacgacttcaaaattaggaagataaatttctatcaagggtgggcaagcaaattttggtgaagacagtggttcaagcactccctaattatgctacgagcgtctttttgcttcccatggacattagtcgtagtattgagagtatgatagctagttattggtggcaatccttcaacgaaagtggcaaagggcattggttgtcatgggataagctttgtaatcacaaaaatagagacgacatgggctttcggaatttgtgagatttcaaccttgcatttcttggtaaacaaggttggaggatcctctctagaccggatagtaacttgagtattcaaagctagatacttcccttgctgtgactttttttctgctctgcttggccctaatccaagttttgtttggcggagtatttgagaatcacaagagttagttctgcaaggcgtatgctggtgtattgggactgattgtaatattcctattctgggttctccaaggctgccagatgattctaatccactaattattcttgatcatccagctctttgcaatgctactgctagtaatctatttaagcttgatggtactggctggaacgtggaggttattgaggatctctttgttgacagagatcaacatcttattatgtctatccctttacaagtggatgaaatggcagatcattacatttggtcaaaggaggcttcgggattttacactgtcaagagcgtgtataatctattacaaagaatgaaaggtagatggattgaatgactcaagcttctagcgtaaattatggaaattaaagttgcctcccgaaataaaaaacttgatgtggcgtgctggtgtggattgcctcccaatattggttcagcttcgaaccaagcatgtcaatgtaagctctctctgccccttttttcattccaatgatgagacaattattcattgttaagtcacatgctaagcaatcaaaacttattggaatagagtggggattagcactatttgtgcacctgtttcctcctttgtggactggtgtacttcaatcttcaaaaaggttagttcaaaaaaaatgccttgttgcacctgtgtgttgggccatttggagagccgaaaatgaactagtatggaaaggaaagacagcccgagcaaaaaaatataattgtgtttgctaaaaattaccttagtcaaaaaattaagcccaaagcggacaatatcatactaatgtgggagtcaaggtgaggtagcggcccgacaaggtagaggaacgaggtccaacaagtggtatcagagccaaaggtttaggagcgctgggatagtaggctgcatttgcgatgtgtgggagatgccctcaatgtaatgactttgcgatggaagatctatatggtaccttgtatcgaaagtctacctgatattgaggtagtcaggtagtgtgtctctcgttgatgattacgtcagtacaaaatggagattggtgttaggacctgtgtcggaagtcttcctaacaaaggtaatagtcaggcggcgagttcccttggtgatagcggcggcataaggtagtttcgctggagagaaggtcacgagtatgtggtccttagtttgaggagagaattattggggtatcaactcaagtcccacattagaagaatagacaaaagttgtcttgaatataaatgttctacctactccattagtatgaggcatattgagaaagtacccaaaaataaaaccgtgagggtttaggcccaaagcggacaatatcatactaatgtgggagtcaaagtgaggtaacggtccgacaaggtggaaaaacggggtccaacatcatcaagtctaaaacctcatactaaacgctccataaaaatcatatttaattaaaaaaaaaatatattgcgactaaaaagttattgcaagtgaatgttgatcgtgataatggagacgtaaagtttgaaattagttttaatatactttataatatatagaagaaaaatcacttggattgattgagatatgatcatgttatatattctagctagtagtagtcacaatctaataatcctatataattgaatcaagttgttagatatatataatgcttttctagctacttaagtttatatattatttttaattaacaacaaaagatattgcactagtagaaaaagctagttcaacaataggacagaatatccatatagtgcttattaccttttgttgttaattagcaaatcctacatatcccaaatcccactatgtcataacaatgttaaagttaaattggagatgtggtagacaatttaaatacaccattataatgacaaaataaaaatggggcagatcattagaatcttcatcaaaattaggtaaggacaaacaccttgatcttatattttacacaaccaccctacaattaaatgtattgtctattaaatacatagataagtttgccactcttattttacttttatttttttatataattaactatgtataatatctcccacaaatttaaaattcattaattatgttatttgtgaaagctaacttagagaacattatgcgcatgtagcaggcatgcatgctctcaaacgatatcgcttagggcttataagttgctatagtcctatgcttatcgaccaatggcttgctgacatgtggacaagtctgtccaagtagctgaatcacccaacaaaatcatataggctaaaatcacaacacagaagacaaccattcaaaatttggatatcttgctccgacttatctaccggatcaagtgtgcatgttacagttcctatatatatattaattaatagtgctccaatctcataaccaaagtttcaactgagtaaagatatactctctatataacagtatttgtactgcaagtgctcgacatttcaccatgagtgccacaaaaaaggaaactacactatgagaaatgatccctatatatattccttaccctatccacccaaccaaccaatgtatctatgcataggaaccacacccacctattctacactaccccaaaacacgatcacatacaaccaggtat

SEQ ID NO: 27492 - DNA, 2635 bp, Cannabis sativa
aaaaaaaaaaaaatcaaaactttcttccttctatggtgatacttttcctcaccattataattatgtccaccgaaaatgctatcctaacacaaccaaagcaattcaataaaatttctatgattgttgtttaatttgacttctaatactgcctctgccatcttcccattcctctttatattactagcattaaaggcctttaaaggaaaggcaaacattctaatctagaccggaacaaagttcaatcttgcatcttgcatcttgccactgtccggttggtggccgttcttctttcaatcatcagccatcccgcaaaaatccttgacattttacgtttcactttttgacagttctcttctcatccaaacttgaaaccaaacaaaaattgatagcatcatgttttagaatcttcacttcctatttcatttttgtcttccacattctattttgtactaatgaattatttatatcttttctttgagaaaagcctcccaataacaagagcaaggttcccaaactccgcaatcatcccttcttcaataacccattcttcttcctcggcttgctcttcctgattcccttctttagtttggtcttccatgtactcttccatgtattacaagtctttgatatcagttcttccacttcatcagagttgatagtacctgccatagggtcctaatgatcatgttcaattcttgattcttcaagtactaagatctagttactattcctctccatatcttgttggtgacgactcaatcagaaaattcaaaacacgttcaatttttcattttaccttttctccatattacctatgggaaatcgtgtaacttattacttaccagttacatatacaagcttttcctgtactttctcatgtgtaaaaatgaaatttatttatgtgtgaaaatgagataaaaaaggtctccataaaacaaaaaatgtaatataaaagaataagaaaaaaaaaggtgcatgcttgtacaattgactcatcatactcattaaacagtcttacgtggtttacacgttactaagcaccattagttacttcccttccattcattaaattcttacttaccttccattgattaaattcttcccagctcaacataaaggagctagcatttagatgcccaccacctccaaattcctgaatatacatttttcccaatcaaaagaaagatattgtttagcattttaattctttgtttctagctagaatagaatttatataatattatagaggtggctactcaatgttacatgaaattttcattgtaactgatttttaatttgaattttttataaaatcccttttagtaattaatatatataaataatcttatttttatatataagtctttatcataattttttgacaattaaattatttaattataatatttacaataattttttttattttacaaaaattacacttccacatatatcttaattcagaaggaagataaataacaaagaatactttctatctaaactaaatccacatatatcataattgaaagaggcgaaggcaagagaactgagaaaccatttctcattcaacccatttttttatgggaaaatgggttcaactcattttgcatttcatcacatgattccaaatgaatctttaattttaaattttttaaataaaataaataaacaagtgtaataattttcaattaagagtatatgtgtaatgaaattttaaattatgagatcatgtataatttaaaattataaaaggtttagctataaatattttaataattcaagtgtaagaaaattaattgttaaatgatattatttagtaacaaattacaagtcaatataactaatttttaattacaagttaattgttaattgttaattataattaattttaattttaaaatataaaaaaaaatatcaagttaatattatgttacaagtgttttattatttatttttattaaatttctaaatatgtaacaactatttaatagtattttaatggttaaaaataaatataaccataattataaattgagtgtaactattaaaatctccatcatatacatacatgaattattatggtctttatgacgtactacgtgttaagataaattaattcaaaagaaaaacctcacctgggaaattagtgttgtgtcttcagtcttcacgctccttaggcttatttttagcaactgatcattttcaagttcgggtattctgtatacgatagccccaatgcctctattaagagagtagaaaacatcacaaaaggaaacatagtttaattattgattttttatatatatacatgtatagaaactatgattacagtcttatccttctatagcaattactatataggtacccaaaaggaactcaaacctcgaattttgaggaagcaaaccacatgcttgactatgactattcgaggtacccctcttgggtgaaagcgagtttgattgattgaagccatcaaccacaaatggtttttacccttattagtttaaaattaaggtaatgtaatttaccttaaattaagattgtggctcttagtagctaactggtgcccaagttcactccttaactccgcaatagaatcagcacacacagcctatataaataaatatatatatat

SEQ ID NO: 27493 - DNA, 2924 bp, Cannabis sativa
taattaaataaataataaaaatatcgaaacaatccctggatggtgggtggcctgacatggattccaaaggccaaactaattccagttaataaaaaaaaaaagcaataaatagtatttaatagactaggattaatttaatgacaagggccacgtcagccacatgacgggtgggaatctgttggacccatggacgcgtagatcgactaattgacgaacacgtgtacggttcaaaataagcaattttaaagaggcgcgaatatcgatgggccacctcaacaacccccatgcccctcgtatatacggtaaaaccgcttacagttgacacgtgtacgatcacgtggaagttggcgtggcgctcttcttcttcttcttcttcacttcattccattttgtacagagagaaactgagaaatgcttgaggctatgaagctcggtgaatggtgatttcgccattgacgatagttgaagctcttaggaataatatttatcagcaaatttgattccgagatggagatctttggaatttagagtcagaggtatgaagttctttcttgtagatttagtgtataatcttttgccgcgattttctgttactttatttcctttttgggagttttttttttgttttgtttttttttttttttaatttgatgaaagtgaagtgagaagtatgtttggaagagtttaaattacagatttttggttattttcaaagacaaaaatgcagggagcaagaaattttgtacatgtttggctttgtttttgaaaaacagagttaagaaaaacaaaaattatgaaaaaaaagcagagcaaaattgttgtccatggttcatttgagaagttctatatatgctggtcagctctaatttcttttacataaacactttgctttagctaaacctctctctctagggcttttgctcatatttcacgcgctccatctctataacgttatgaattctctctctccatctttgtaattttcttttatttttctatgatttttgttctatcaatttctttatctcccgatttacaatgtttgagatttagatgaacccaagtaaattggggcttttattttttattttttatttttatgcaaaaacaattctataccatattcaaaaatcaattctaattcccttgccacaaatcttctatatgcaattcagaataggttaatgtattctgactcatccacctccaactgcttccccaggcattcctaagcttttctttcctttcagtctttttggctctctactctcaaaaatcaaaaagggagcaaattgaaaagtgcctctacttgaattactgatcaagaatgagaatggatctcaaaatttgaaagcagaatgcaaataggctttcagcttaaaatcttcacaattgtatgtgttggtttcctctttgaaagcaggagtgagtgagtgagtgagtgaagagtgatgactacttttttcttgtgcaaggggaaaaattatgtgttgatatccaaaattgacattgaaaagcacaaaagaaagaaaaaaacagaggcttggggaaaaattatgtgttgatatccaaaattgacattgaaaagcacaaaagaaagaaaaaaacagaggctttacaggtctcaaaagggtgtgaatggttggttgtattggctagaagctatttgttactttttatggtgtttgattaggggtgtttcctgcccaaaacctttggtctttaaagcaggttctgattcttcatcaccactgtcaatgttactcggggtaaacctgttctgaagtgctctaagacgcaaaagataaacattgtagtagtagctcactaaatctgcctttctcctacttggaaaggtcttacaaatttcaatccagaaacacttactgaagagagggaggatttgagctcactattttcttaaacttcttctcttcagcctctgtacaaaacacaattagttcctctgccatgttatggaatctccacaggtgataagctgtgcccaattctcgtttaactctcaatttgttctcagccatatgaaatctgacacattctgtagaacacagcacttgacatccacaattctccagccttccctttcaacaagaaaccttttcttcgacacaatggtaaagtatactggaaaggactatccaagtataaaaagcataaaaccaccatggaaaattaaataatttgcttattatttgagatttcgacacaatgtttgttgtttgttcttatatccgttttctttaagaaagatatatttgattgtttagatggttattatgtatctggttatttttctttacatgttgtagtgaaattctcactcttttgtgtacccctgttgcgttagccacctacctcatagtcagtctctaacaccacatatccgataactacaaattcagctgtcaaatcagagcatagagagtcagttctcgccactggttcagttaatgtcgttcttcttagtattcaatttaattagttgatctgaaaatatgtgcttatctgattcatgggagcccaatattgattgatggaagtttcactgataaatgcctatatcttactcattattttagatgtttactagtaactttccgcatatccagatactgctaataccaactgcttttgcaattttttaattagtatatgtatatatttataataatccgtgtcatagtatttgtgatttcgaatcagttgggcatgtctatcaattcatattacactgatataagcttcgcctttagtgttgagacaccaattgagaagttgtggaaacattaggatcagctgtttctgctgtgaacttgtgtttacagcagaaacacccgatcggttcatgtttctttggtgtaattatattttctcacaaacattactttgcttgtcaattgtca

SEQ ID NO: 27494 - DNA, 3441 bp, Cannabis sativa
aatatatttacaagctatactaatttaaaagagtatatgtgtaatagaaaaaaaatacaaaaataaaaccctaaatattatcatttgcatgtaatttatttgtattatgaagtaatatatgtgtaattaatatcaaaaagcccaaaatattaacgcttttatttaggttattgtggtgtaatgtatattctaaaaaggtatacgtgtaattcaatatctaaaagcccacactttttaaaatattatcatttgcatctaatttgtttgtattataaagtattatatattctaaaagggtatatgagtaatcaaggtgagaaagtccaaaaatattgacacttttatataggttatagatataagttatataaatatatatatatctataacctttataaaaaggagaataatttagtttcggcctttcatagttaatttaccaaaaaacccttatttattatccatatcctttatagtaaaatagaatagttatttgaccatatatttatgcacataaatgttttcttttctgaaaaggatatacaaaatgttgacaagtttatttttctctcacgtgtcaactatccaatgacaggtgttgatgagaaaaaatttctggtgttgttatagcaggagaagagaaaagggaaagtgaacaagtagtattaaagagattttatgtctcaaaacgattatgcagttaaatctaataaacgaagttgaagggttatctagaatcatattaacatagtcaagtgggtcttcttctgagatcaatatacttttgtgttcctttagtgtaattttaatttagttatgatttgatagttttttttcttcttttttatctgttttagtatgaatggatgtatatatttgagaatgaataattgacattaaatctaataaacagaaattaatagctacctgcttaggtgatactggtacttgttttgaactgttgaatctattggaattttgaattaatttttgaaaaaaaaaactaataataaacaaaggtttactctggagttgacccaattcgtagagattacaatgttgttaaaatttgctatatggctatgaataaatttgttgatctcttatgagttaattaagctggaatgatgctagagatggttgatcatagttaagaataacagacagttaaagatttgtgtttagacagtgatgaattgaaaatgctgtgttctgtaaggaacactcattctactttctccttcttataaaattttgttgatatatatatatataggcttatggtgaaaagaagaaacataaataagtttactgatgataaaaagaagaaacataaaattactgacgaagaaacataaataaggcttctaatgaagattagatgtaataaaaagcttggatgtgctcctcttatatataggctttcgaacattgaaaatttgtcacttaaaattaatataaagtgaataattataatctcaatattctacattctatgtgtgctatgcatgtgcggagcacgtatagcttcactagtataatataaagattttaatattccaacaagttgacccttccattctatgatctttctctttggatattttttcttagtggaaacgaaaaacaaacaaaaggagatttaagaaattaggctgcaccttaaggtattggctcttaagttatacacatatatcaatatattattcttatagatgtgatcaattttctaattggtttaaaatatatgaaatgttgttatgtttcttcttattcttatattgtatttataatatataactcttaccatgttacaacctcgtagtgaccccaactttatttctatatgcatttcataaatgtcggcacatggatgcggttataatataattaaatataattattatatgtatataatattgtatattacaatcactatatgtatagatggtttgttaaatattacactggctgacaattgaagaatagatttattatcttaataaagatatatcaaccattctatgggtagcattatgtttgtcatcatattctccaagaagaaagtttctcttattcttttcaatttaagtaaatgtacgtacttaattgaactttctattctttgcctaattaagtacaaaaagtctttctttttttgaccaaataatttgaaggatgcacctaactatacttgtcatttgatcctcacctggcatttagtagcaaatgattgaagcttaattaatagtcccttactatataaatatatatatgtatttatatatctatgaaattaacatacttttattagaaatacaagagcgacttatgtaataagatttcatttagacacttctatacatgtcttgtaagttttagttcatttcatcatcacatgaaactacttttagtaagtctagttaagcaaaaaaaaaggctaatttaattgaggaagcgcactcttttttgggtgttaccatttctagttagagtttgtttggaccataatgtagtattctatatttttcttacctaaatttcaccttccaattggataccattttttattcttccttattccctatgcttttttttttgggggaagttaatagataattacccaaaaaaaaattcatttattacatttagattgccatactgtacatataacttttaacttttatactgtaatttttttaaaacaaatatatcattaaaaaaaaataaacatgtgtgattgaagaaaaaaaggaatctactctcgtatcacgcaacacgaaccttatgataaatcgataaaacacaaacttcaatctttataaacatcggcaattggatcgaagagaaccggagaagtttttccagaagttcatcatgaacgctgcgataacctttgcttctgaaactagccatgaaaactgaaaaaaaaaaaaaaaatcatagattctaacagtcccaacccaacatcaacgacaacaacaataagaggccaatcaatcaaacaaaaaaacaagatcaagatttctcccaacaatctaaacatatatctaaaaaatacaacaacgagtgtatgtgatttttatatttctgctatgaattcagtaattagttcatcaaattgtgttgaaaatgtgttatttgtaccttatcccaatatttaattttaaattacagttattatctgccaaactctgtatgagaaaacaagaccagatacagagtaatttgctctgttttagagaggaaaaatgtatatattgaactgaataaattgtttattacatttgaggccttatataggcaatctattacagtagtctcagcttaagagagcaaccaatacaacagtcttataacagaattcctaacagactaaccgactaaacaactaactctctaaggtctaatactctataagtacaaaataatacgtactat

SEQ ID NO: 27495 - DNA, 2185 bp, Cannabis sativa
  modified_base (2134)..(2138): a, c, t, g, unknown or other
cataaaagaaaattagattaaaaagctcttctgtatgccgaaacagatagagagtctactaaaacagtactccttaagaaaagtgtactgtagtcatgtacttattttatattgtatattcattaaaaaagaaaataaatataattgtgggtctatcatactaaataaataaaatatttatatttcactttttcaattgaaaccccatttattatttgtttaaaggaacaaaatatttaagtaaaaattggtcttgtcttttgacatggtgagaaagtgagttgtgtgtgtgtgatttgtgtgttgtgttctacggcaggttggagattatggcttcgtcgagtgtggccattcgtgatcttgaagacggttacgcagatatcagtattgagggtgaagacgatggggatttaggtgttgatttcctggtgccggatgatcaagctggccacgatcatctctgtattgttggccggttccttattgctcggccgattgattttgaagccatgagacatgttatggcgtctttatggcagccagaaaaatgagtctacgtctaataaattgattctaatcggtatttagttcagttttatcacgagattgatttggaaagggtcgttgggggtagcccgtggactttcaatcgccaacagtttgtttttcgaaggctacaaaggggtgacgatcctaagaaggtggttatcaatcatcttgatatgtgggttcagattcatggcctacaaaccagtttcaaatcggcctctgttgtggaacgtttgggaggttttgttggaacgtttatcaagttggacccgaagaattttcagcatgtttggcgtgagtacatgcgtgtccgagttactatcgacattactgtaccattaaaatgaaggaagaagcttcggagaagcgtggatgatccatgttttcgggctgaatttaaatatgagtttgttcctactttttgttttatttgtggtgttattgaacattctgaaaaatttttctccaagctttttgatatgccgattgaagaaattgtaaaaccttatggattttggatgagggcttaaccccggaggaggtataatttggttgggtcgcagtggttacgtgatggtactgaatcggacgtggcgtttgctggccggagtcacagtccgacagcggtagtgggggcaatttttggctaggccgaattctatggagtttgttggagagaatagtgggtttgggtgcacggctaggagggaatctgcagatattttttcagctcctaaaaataaggagcaaaccgtggggattgatggtaaagctgattttgtgttaaatgatgataattcaaatattatggatgagttggaagatgggattgatagtttcattgtgttggattcaaaacgacgacgtatggtgaaagcccatgtaggccaaacccaattgaatgggtctagtatgggccgagcctaagtggatagggccaatgtattggctattgatagtgggatggagattggtgatgaggttgttgtgaatgattttttgggctcaaaaaatggcctttcggtgggtcctggttcccaggcccaccggtcattatgagtatcataagctggaattgccgtgggcttgggaacccgtgggtttatcaattccttgtggaccttgtggtccaaaagaaatccaaacttctttttctttgtgaaactttttcgaataaagagaaacttgaacgacttcgggtaatgttgggatttgatggtttgttttcggttgatgctcgagggcatagtgggggtttggctatgctctggcataatgacattgaagctcagttacttggctattctttcaatcatattgacatagaaatatcagacgctgcttcttctccctggaggttgactggtctttatggtgagcctaatagaagtatgcatataagacttgggatttgttgcgagctctcaagtcagaatctactctcccgtggtgtgttattggagacttgaataatgttactagtcatcttgataagaggggaggtaatgattatcctctgttacgaaaattgtaaaaccatacgcaagtgcacacaatcaagtagtaaactcacgcaagtgaggtnnnnncacagggaattggattaattaccattaaattatacttatgattctat

SEQ ID NO: 27496 - DNA, 2396 bp, Cannabis sativa
ctctgggaagtaaattggtagtaggtattgtaaatcaaagaggtctaggacgagtttgtaaagagaaaagatctcaccaaaggttgttgaagatctaaccagaacggggattgagttcgtggttagggaacttgttaatatcacattgtggtttgatttattaggaagaattaataaaagcccaacagggtgactttgaattacatgggtataaagaaagattcgagaactagttcggcagaggactttttgattttgtctaaaggaatttcatgatatgaagatagggtttgtgtaccagtgagataaggatattgaatagaaggttttgaatgaatcttatatcatgtcatactctttacatatgggagtaactaaaatatatcacgatgttaaaacccttttgctaagcatgaaagatgatattatgaagtacgaattagatgaacaacttgtcaataagtcaaggaacagtaggtttctatgattctatctgggtacataggaacatatatacaaagtcagtatagttttctttatctgagcaggatacgattaaaacagattagggtgctaagttatttgttgaggaaatagcttaaccctgtgatgcttcaaaggtaattatctcagattgagatttaaagtttacatctaaatgctgagaaagtctgcgactagcatgtgtgatagattttgagaattctcgaattaaacaccatctgctgaatgagtcttcatataatgacagttattagagtactgttaatgtggcactgatgcggtttacagattcaagttcgtatcttgctttatataatggatgaaaaagctatactgatccaagtgtaaagatattaaatttcaagtagggaattttattcttctttaggtggtcccaatgaagggaaatgcagaaattgggaagaaagaaaagttaagtcccaggttaatcggtccgtttgaatttctggaaagggtaggttgggtagctaatcacctaaccatactccctgctttatctagagtttccaatatctacttcaatgttttcgaagtatgtggtagaagcaattcatatatggagttatgaaaatattgaattttaaacaaacttgtcatgaggaacgatcggtatagattttctgagtagaaaagagaaagtgttgcggagtaaagaccatatcgatagttatagtactgtgagagaacaacaagattgaaaggcgatttgagagttaaattcgtagttgcgaaagctatatcgtgagttatttgaataaatttcgaggacgaaatttctataaggagggatagttgtagtatctcggaaaatatattgatattttaattggacatattttattaaatatgttattaagtgagtattagagtaggattataatcctacttaaactaaatactagttgattagggaaataagaataaacaaagcgtaatttattaattacggagattatattagaatatgtgggtatcatagataccgtaatttgagtaaatattttcgggcctggtaactgtggaacttgacgggaggttagatatgtcacgaaaataaaagatgaattgaattggatttgtataccagactagtttagagtttggattctcggtttggcagattaattatgagatgactataatacccctagcatttaatttaaagttcaagggttatgagagggcaaaattgtcattttcgtgataggcattcatttggttttatttaaatcatgtggctgaaattaaaattgttattagttgggattatataaaaaaaaaaaaagaattaaaaaattttttaagttaaaatatagtgaatatggggcatctatcttcattttcccctcattctttttctttcttccccgagcctcttaaggagctgccttcaaggataattttgttaggaaactcatctgatttctggatgatttggttggttgtggaggttattaaagcatcaaggtaagtttttagttttgtttccttaaatttcttaggtcttaggtttaatattagttggggttttggtgatttcgggattgaggtattaaactgagattagaacaggtttcttggcttaaattagagtttgtttatgattgatttggttaggatcacagctgttagtgttgagttaatggaattttagagtttttaagcttaaactttacttgactatgctattttgattaaatggataaattgttgtgaattgatggttggattatgttgtattggtgatattggattgatctggaggtgttgggtaggtgtggtttagatttggttcgagtttggggagaaaaaactcaagactggtgcattgccaaaacgggtcgactggttggttttggtgcagcagaacc

SEQ ID NO: 27497 - DNA, 2139 bp, Cannabis sativa
  modified_base (649)..(658): a, c, t, g, unknown or other
  modified_base (774)..(781): a, c, t, g, unknown or other
  modified_base (1646)..(1660): a, c, t, g, unknown or other
ttacaaaaacaaaaagaaaaagatgatgttgggggtatcaatccaagtcccacattagaagaataagcaagaattgtcttggatatatgtgttttatctacttcattagtatgagaccttttgggaaggtacccgaaaataaaattgtgagagcttagacccaaagcggacaatatcatataaaatctgaaacattcggtatttatgccgcaatttaacctattataattaattcattacattattattactattactattaccatttcattacaccaaaccaaacactcggaccaataaccctatcccatgttaccaaagatagagcctccaccacttgggccacatttattaatctatattattattcatcattttcttcattttgatgattcaaaaaggcactggtttcacaaaaagcatttggatattttttttaatctttttcaaacaaattaagtagtcgttatagtccattccgaacacagtaatgagttggtagatatatatcaatcaactatagtagactcgtgtctaatttccattggtttaaattacttgttttttatttacataggtttgacgtgtcgattttgtatatgttactacaaaaaattttacttttaatcacaacaaaatttgtgactannnnnnnnnnagttgtgactaattataaaatattcttatgttgtgactaaaagtattatagttacaaaaattacaatttatattgtgactaaatgtatttttaatcacaatacttgttgtgactannnnnnnnttagtgacaacttgtaactaaatgctaataagtaatattttgttgtgactaaaaatcacatttaattacaaaaaatatatgttgtgactaaaagattgtcactaatagtagctattttttgtagtgtgtattagtttctaatagtatagttgtattaatagtattgctatttgtctaacactttttataaaagacactttaattagttagtgatgttttttacaaaagattttcttaagttatataagattggatattaattacaccaatatcagtatgacattgaagagggtgttagacaccagtagtgtcttctaacaattctcattgtattaatactcttgggtgatattttttttttttttgacgcgtactcttgggtgatatttgattgagaggaatgaaaacatatatgaataagaatgcatatgagaataggaataggaataagatgtaatcaaatttaaaatgcatacaaaaattgataaaaaattaatttttttttctcatattgcattagaatgatttttcttttcattttaaaataaaaaagtcatttcataaaatgatacgttggaatgacattccaataccttaatgacatgtttacttaaagggaatatgaatcaatcatatggtattgattcacatacaatcgtttactaaattttaaaaaaggataaagtatcccacacaaattagaaagataataaagagaaatgttctcctcccatcaatatatcaatataaaggagaagaatgaggcgacatgtcactctaaaatctctccaaaattatttttctctactcttcttaattctcttatttttaatattttactagagcataaatctacaaattaatnnnnnnnnnnnnnnntaataaattttctataaaaatatcaagcattaagtaattattttatttaaaaaagcactacatatatttcattgttattattattattatattggaattttttcaaaaataattttatataaacctaaattctaaaccctaaataatatacttttgtatgttgatgatttttctcgtttttcatgtgtagactttttaagagaaatatctgatacttttgaggcttttaaatctttgtatttaaaattaaaacctggaaaagattgcaacattggtactattgtttgcattaggagtgatcatgaaaaagaatttgaaaatagtgtatatgatgagtttcataaatctaatggtatttctcgtgaattttttgctgctaaaactcttgaacaaaataaagtggttgaaagaaagaatcgaactctaacaagaatggctagagtaatgttaaataacaagaagattacaaggcatctttg

SEQ ID NO: 27498 - DNA, 4427 bp, Cannabis sativa
agagagagagagagagatagaggtactggattaattgcacaatccgtctgcaaatactctctccttattccaccaagacccaaatcactgctcttacggtctattgaactgtattggagtgggaaaaatagttatataaaagcataagatacaggtaaaatacatttatcactggatgcaaaaccacaaagcagtgaaaagaataaagagccttttcttcatacattgaacctacatgcaaacattagaaactaacaagacacggcacagcactgcacccaccaaaaattttcaggacaaaagtaatactgatttaaatgcttaatactcagaaatgaagtcttgatgacaattcataagatgcaataaattctttactattctagagtatattaacaacctcacaataccagcagttacagtattctgaagtgagagtggacagcccacagctagcacccaatctccaggttgaagcctacttgaagagccgatttttgcagttgggagtggggttttggaatcaatttttactatagcaatatcggaatgtatatcagcattcaacacagtaccctcaaatgtcctaccatcttgtaaagtaacatcaacctgcaacaaataacatacttaaaaacctaatgtagacaacaagatgtcacttagtagcatatatgaaaaataatcttagaaccacattggagtgagaagcatcaattttattagaataaatatgtagtgccaagccattggcaccaaacaatcttggtgaaattgtttcagcatgtggatgaatattgtatttattgctgatattatcagttagcagtcataataaacacttttaaaagatatgactcaatatcaacaataaatattaccacacgatgataagggcatttccataaaaaaaatcatccaaaaaccagctttttgatttcatagagataaaatgtgctataaacttatacatccacgtggtagaacatacaaaaatgaccactgcagcaattatacaccaaacctatacacaaacagtaacataacaactaaatttgaattcaaattaagaaataaatagttgattaaaatttgttattttttttaaggaaaaatatctaataacaattctagaagtaatatttgaatttaaatcttacaaataatttacaattcatttactgcacataatttatgcagaggtgagaaagcatagttctcaataagaacactcttcttcctctgtagggtgatctcaaatccttatctacatctataagctcatatttcgcatgcctttcaatactcaaaacttcactagttccttgcactacattggcctgcctaaacaaatactgatagtatctctttctcataattaagccgagcaggtgaaaactgaagaaaaactgagcttgaattgactacaatgtgacatttttcctccagaaatcaacatttcagtaagcagaataattctgaacacaagaaactaagcatgaattgaccaaaaatgaccttggggtttccaaagggcatttccataatgcacatagctcaagagcattaacgcagacataatatcaaagaggcttgtaaagatgaatacgatagtgacactcataatagcccattcaggaaaacatcatgtcatgtccttgtgatctaaaaaatgaatcaacttaaaaaaaatcatgatcataatggtcttttataaccaagagaatgactcaaataaacatatcactgcaaacaatgactaagccgctccaaaaggacaccaaaatggccttttcacagacataccatgagaacacgttacaaaaataaaatcaaaccactaacctacctttcctttggatgaaatactccttccctgtacattgaccaccgcatgagcacacgttaaaatagtaccatccttgtcaataatagttccagagcctatgctcttcccaccaaagacccccccatacatacctaaaatttaatacaacagttacaattaacaaactctattcttgaaaaccaacaactgaaactgttctcaaaatgaaccaatgaaaaagagtatataccctgatgaagggagatattaacaacagcaggtcccacctttgcagctgctttggcaaacgtatctctaccaaagcatccacaagaatgttcattatggcaaccatccgatgccccagaagattccgatgatggaatagaaccagcactcaaagaaaataattgaaatggacctacactatgaagcttaaataagatggccatgaataattaaatcaaaactctacaatgaatttaagaggtcagcaaattaagataagaaatatcgagggacaaacccaattcggagttcactggcgaggaagatgaaaggcaattaggcattctttcagcaattttccacggcagagaaatcgattcacgccatggtacaggaacagacactcctatgctcacttctaaagtaaaattcataagaccattatcagctatatataattaaaagctcacggatcaaaacgtgtagtgagagcaacgaacttcttaacataatttaatcacatgccactaatagtggacttatttttaacaaaagatttcagaatcaccattgtcagaggagtacaaatacgacaaaccagacccgccggcagcgatgctcacaatccgggtgagtgagttgaagttcgaagctgaaagcctcttctaccaaaatcaaaaccgaaagtatttacaaatcaatgaagtcgaggtcaagcacattaaaattcagaaatgtgtaagaaatccgaaagagaatttgtaagtatataccatagacgccgggagatgattccagaattcgaaaagaaaattgctgaaaaacccagctaaaaccccctaaaattgaatcatatctaacggaataacaaaggagaacttttgatgtgggcccccgaaagcccaatcttgaagcccacgaaatggtttatgcaaatataccaatacagaaggacgatttcatatggaaacttacaaaaaatattggattttaacttaatctttacaaaaaatactgttatacggcaaaaataatttttatactgcctcgagactttttttttcttttgtactgtaagtaccgaaaataaaaaatgaggtttccattttccacaccaacagacagaattaccgcagcaacaccacaacagccgaaaaattaccattaaatttggtgagatgaagcagaaatattaaaactattgatgttggggctgtcatggtttttctaatgttgtttttgggttgttttgtttcatatgtttaacaaatgttagtttcaaattatacaggttaaaccaaccactgaatatttgtttgacggtaactataatgaaagaatcatggacagtaatagttttacctttcattgaaatggtgaaatctagaagaccaaagaaaaagaggatggaagctggctggaaaaataaacaacgtaacaaatgcaacaaatgtggggagttggtgcacaacaagagaacatataggagaagacatcataaatgaaaagaagcagaacaactaaaaaacaacagtataacaacagagagaaactgaatatgatactgaataaaataacttgcatactaatttcattatttttctattagtattaaaaatagagcagtacaataatatttggaaaaatattgtaaaaaaatgaaagaaaacaacattaaaacaaccttaaaacaataataaaataatactaaaataaaccattaacaaaaaaaggtaagttggagaaatatggtggacttagaagtaaagtagagatggagccaacgctttgagaccaaagaaactgaatgacatgaacttagtgtgagtttctgaaagatatctacaagaagttcatcacagagcaagctctccatctctctctcacacacacaaccacactcttatctttctcgattcttcttcttcttccttcacacgctatttttttttaccaactacaaaaggagatggttcgcttttatttgagtaatgttatagacttaggaaaaaaagaaaaaaaaaatgaagaagaaggtgaatagtggagagagagctcaaatacaataaaaaataataataaaagttattatactttaaaaaaaaaaaaaataacgtggagaaactaataagatatatattaagcttttcataattaaattttctttaaaaaaatcacaaaatgacaacaccatcacatcaaaactttttttatattaaatacaataaaaactttcataattatttttttaaaaaaaaaatatatgtatctgacgtgacaaccaattctcccatcaacttttattaatttaagaaaaaataaaagaagacatatattgaagtgacaaaaagcataaaagagaaaaaaaaaa

SEQ ID NO: 27499 - DNA, 1030 bp, Cannabis sativa
  modified_base (27)..(29): a, c, t, g, unknown or other
acacacaataagtgatgaaaatacttnnntttctttattgatatttaaaagataaagattacattgaaatagaattttatttagggcataaaacccaacaaatatcacatgcatgcaagcttggaaattttttttcccagccatgcacacgacgacagccagcagccgcttgctttgggttctgcaccctctttgctattgattgtcgatggtatcgtggtctgcctacgagtcgacggacagtggacccagggtccctagttagtcgttcaggacgtagcatgcattgaatgcatggacatgagacgtcccctcgagcacgatagacccgattgggccattggagatccttcctgacccgcgactgtgtgtggatgctcctccttgtggctggccatgaccaccgtggccatggtggctactgtggcagctggccacggtgggccatggtgatcgattcccttaaacttgaaaccccaatatatatatgtatctatttttgagtatatatatactatatctaatgtgtatacattatattatatattgtatataatatatatagtgcatatacaatgtatatacagtataagttatcatattattatttaatgtaaataattaattattttgttgggatatttatttttttaattaatttgaattcaaaataaatataaagattgctaatttgaaattcaaatttaagttagtaactatcttatttatttaataaaattgttttattataattaagataaataaggggttgtttggtatgcggtaatgggagaagtgagaatgggaatctgaaagcttcctatgtttgattaggtttttaatattttaatgttggctaagtgaaagtggtggagtttagtttggctggcaaggaaaacccaatgaaaatgtagttttcactttccaatgctattggcaaatacaaacttttacatttaattttttttatatgtatgaatactaaaaatatttaaaagatgaagtattttccttattttttttatatatt

SEQ ID NO: 27500 - DNA, 1921 bp, Cannabis sativa
taatataatacttaatataaaacatagatgcacgtaacaatatactagtatattctaaaaatacatatacatattcccataaatcataattcttcattaagttaatctatatatttttattttttatctgaatttaactacgtgagattatttgccacaaattgtatagttatgagggaatttttgtaataaaataaaattcagtagacaaatatacaagactcatagttaaattcaacgagtacaaattttatttattattgtgccaaatttaataaattaatactatattttatactaaatttgaaataacttagtgtgttgcaaatttagtactgcatgaatattttagcaattcattagaaatgctttaaaatatttaaacacgaggtgtggtcttaaaaatagtttagcaattttcaaaattagttatctattaattaattacaatagatattcttaacgtatttttgctgtaatttttttcatcttattttatttatttattttttgttaaattaagtagattatttaacttattttactaattctgttattaataaaattacacaattttttaaaaagaaaatcaagtaatatagtagtatttatttttttgatctaagtcaaatattgtatgtatagttttttagtacaatattcttaaaaaaatgagattttaatatttaattatgtgattgattgggacaagatatcgtaaatacggttatttaatttttggtatagtttattagtggatataatataaatcagttaaccatgtattctcagatttgagtttgaacgtcaaataatagaaaaattatagaactaattaattatcattattattttagtacgtaaattgattaataccataacaactaatcaaagactagtatatgtatatatctttacacgaatattttttattgtaattttgattaccgtgtatatatgtatatgtgtgtgagtatatatgttgtattagaatttggtatttcattattatttttagcttactgttagattctttgtatttgattaattttttagttttgatttatttctaagtttttcattttaattttaggtttaataattttagttttatttttattatgttatttataattcaattaagatttggaatattcaaattaagtgaacactatgataaaagtttattttcctatgttcattcactatgttgtaataatttttgtattttcatttttcttcttctagttatctagttgtttgctgagaaaaaaagggttgaagtgatgaaatttgggtgcttttgtccaatgacaatttttatttagtgaaaaagaagtatatatattctagatttcttttttctttagtgtcaaacttgtattattggtttctaatgttctcttcaatatttatactaaatctaattcgatccaaatttttactttgcctggagatgatttagaagatatcatgcagtggatagtgaatttgaatagaaaattttgtatttatacaccttatatatatatatttgtagagaattagagaaataatctttttctaagaaaacaaaatctcatgataatttatttagttatgtgaatgtgaatgttaatgtatgcattatttattttgtacatatttatgtaatgtttaaatgtttgaaaatatgaatatttagtgagaaatattttaattttgtatagcatttgagtgttgttgattagttactaaacaatattcttacatcgtttataaaataatatttttaatatatttaatattaatttctattgttattcacaagaaaaataaatattaatttatattaagaataaaataaaaacaaaacgattataggcaggctgacctgccactaataatagtgactagctagttatgaatctcacactattat

SEQ ID NO: 27501 - DNA, 3553 bp, Cannabis sativa
agtacaattttcaaagctcaaaaggcccctctcttttctttccccgtgtgaggaagaggaccacagaatatacagatatatttcaatacaacaacttgactcgttcttgtgtatttttaagaaagccaaatggagaaattgccaaactaaccatttcaaacactaaaatttataaaattacctcactaaatttactctatgagactataatgatcgcacactgtaaatctaaagtcgttttgcgaccataatggtcgtttatagtcgcataatataattttggtcatttctatgatcataaaaaattattttactaataaaaaattttataaaaaattatgaatttctactattaataatattatttgtaaatttttataatattaaaaatataaaagctttgattagtaatgtttatacacaagattaataaaattcttacaacttattcagtagaaataaaaagcacaagactaattaagacctaacctttccagctagcataaaagctttgtaggtaacatccctgaccgaagtaagaggtccatcccaagcattctcaaagcctttaaccacctctggggataacaaatccagaccctggctcttagccacattgacaggagagaaagacctgaacagcttcaaaattccattcaaagaaagttgtttatgtatctccaagggcagtggattcccctcagaacctaacccaacactctcaaatggaaacggcaacgttttgtaaccctcatgcacgtagtctctgacttccttgggccaaaacggcagcaatgagtcgtgaaattttttgaagagggagtcgaattcggggctcacagccatgtcaaagtagcaccaaacagcaagcactcctcctggcttgcgcaaaacccgagaaacaatagaatagaagtgtgaaaggtcgaaccaatgaactgctgttgcaacggttattagatccacagaattttctcccccaatcaacgacactaattcgttgtcattcatggtttgaggagtgtggaggtatcggactcgaggatggggagtagctcgctctagctgggccatgtttacatccgttgcaatcacttgcttgtagtgctcagacacctggtcattgaaactttgttactatacatacataaaaattgaggctgttaaagatgatttagtctaacttcgttaataaaattacacgtcataaaaattgaagttgttaaagacgattttagtgatctgaaaacgagatcaacagtgtgatataaaaatcttggccaaatgagatcaacaatgtgaaaggaaaaaaaataggaaaaaaagggatggaggcacttctgatcttagtgatctagagctagatttcatgtcataggagtttttaaattaatcagctgaaatcaatgaccattatccttataagaaactaaaactagccactttaaatggatgtgataaaatccttttaaaaaaagaatatgatcctttaagaggtgtagtttctataggaaacagtcaaaaaacaaaaagcttccacctatatatatttcataaacaaaatgaataaatcacgagaaagaaatagatgatgaagaaaagaaaaactaaccccaatagcagcttggccattgcccgtgccaacgtcccaagccaagttgtggtgaggagtgagagctgccagctttgaataccattcaagtgggtatgttggccgagcttccatgtacgtatcaggttcatacaacccaacagtccccaccattatttaaactttcctgcttctttgcgcttatttgtatttttaggtgtgattctgaaataaaagtttggatttagtgtcaaaactattttatttatcttaacaaatgttatgtgatattaagttttgaattacctataaatttagttaaataaaaattagaactattacattgattaaattcacaagtttttgttctatcacaccatctttcattatctaaacttgcatgtattccttttttggaatcatcatgaaagagaccattaaacaaaaagcttcgggccataatgcatgatcctcaacatctaatttctttttttatacttttttgttaaaggtaaacgaaaaatatccattaataggtaaatcgaagaaagtccaaaaatcttaatagcatcttcaactaaaagcccactaaactgccagcaataaagcatcaaaagattgcaaaaaatgcctaagtttccaatctgattgaacaactgccaactctacccgatcaatgactatgagtcagagatcttccaataaaaattgagtaataacaactctataattcaatctagaataaaaggaaataacaagacggccaactatgtttctatcaattccacaacaggattgaatagcaaagcccagggatcccaaatcggatcggcaaggatgggaatgaacatccccctttttgagccaattcttggttcttggcattcatataagctgaccttccataatgacaatcatagttttacagtcataactattaaccctctcccatacaaataaacaaacaagtatcactacaacaaactaaatgtcaaaaacaatatataccatgttgtaaagcaatgcaattaattcttcaggcacaaatcaattctatttatatgtatctatattagaagcaatgttcctagaaaaaatgagatacctatttagagatcaacaacaatttcatgtccctaatgcaaatcaaatctaaaaatgttcaaacaacacgttttcatacatgtgtaacatgctggagcataaaaatactctttaaattgtgtaacattttaattacacaaattagcttgactgacaagagctatgtgcttgcagagggggaaaggagattaactatgaaactcccttttcgggctaaggaaaaaaaatgaaaaataagctttaaaacaattacagatgcaaaaggactgtagggatagctatatataaatatatatattatgtggtgaacagtaagtcaatacgtccaaagcaagaggctatatatagatatatatatatatatgtatatatatatgagatgaaagaggagcaataccaatgaacagaatcaccacaaagcatatcctttcatacatttatcattacttttattatatacttcgtttttaatttatacagatacatgtagattgaagtccttaatttgactgccaaccaaacctagatgtcattttgtcaagtgtcaactgtcaaagcattcaacaaactattcacatggtgattcacccaattgtgatttatcacactcccatgcaaacattgcagtaaagttctatttaatttattaatattttatttgaagaaaagatttcattaaactcataagattaaagaatacacacattggaatagcatcaagcccagatacagaggaaatccctggccactatactagtgtcctgtaaagtaaatgccaacttagctaaacagtgggctatagtatgacattcctatagcagtggaccaaagaacagaagcaaagtctttggccaaata

SEQ ID NO: 27502 - DNA, 1985 bp, Cannabis sativa
  modified_base (1669)..(1673): a, c, t, g, unknown or other
  modified_base (1748)..(1753): a, c, t, g, unknown or other
  modified_base (1783)..(1787): a, c, t, g, unknown or other
cttccttcatatatttttttttaatgttgttattattttttttatttctaatgaattaatacattctaattaaaatatattattgatgaaaataatagagaaaaataggtgataggtgtcattggcaccactccttcactagtatatatatatatatatataggacacggatgaagtcacgcatgcgtgactggtcttgtatttttttttaagtggtgaggaattgagctaaatataatattttttgtgcccaacttaatagtcattcttctttaagatgaattagttatattttcataaaaaaaaaataaaaaacaagaaagaaagagaggaataagttgaaaaaggtattttttttttttagtattttcaattattattttttttttttgataaatcaagtgttgtattgctcataaatctcatttgtacaaacaaataggaacctcattggataaggacctatatgaatcataattgttctatcattatttacatcaaagctaatttctccattttataagttgaaaaaccagtcttgctccttctttttaacttccttcggccagtatatgcttacacgggtctttacaacctctttcgtgtgctgtataatcttatttgtgcttattgtcttcatgtcccatatgtgctcatttcttgttttccacaaattataaatcaaagcagcagtagtagccaaaaatacctttctcttgaagtttgacatccttgctcttcttatcactctcaccagctgctgcaatgaggagctattcgaaccccaatgcagccattgttttatttcctgcaaacagtgagctgaaactgaacaagagaagaataaatgctcaatgtcttcttgatgtaagttgcataagacacaagtatcttcctgcagtatattatgagctttcaatcttgtttttgttctcagccgattgtgcattgctaaccagaaagtatagcaatgtttgggaacatttagccttccccaaacctctctatcccaggtgaccttctaatgaactgaacaaagcattttgtatccctcagcaatggagtatcgggttccaacaaacatctgcttgtccatcatgctcttattcaccacctgtttccaataccagctgccattttgtgggaacttatattcccaccaatcacatgtttaatatagacactatgtatccatcgcacccacagattatcttctttatttgctagtgcccatacttacttgtataaagcatcttgattccattcttgtattttcctgaatcctacaccccttccttctttggagagtaaaccttctcccaagccactagtcctgccccttgcattaaactttgacccttccacaaaaaggctcggcatattgcttcaagttcagtaataactttccttgggagtttcatgatttggctccaataggtgtgaatggagagtaataccaaattgatgagtaagtatttttaattattaatctatttgtatttgtacttaatcttccaagcttaaattttagtggtaaaataaaaccctccaaatgactgaactgttagtaaatttaaggtgtcatctattttttacagttaactggcaacatagactacttatgtgtacactcttgtacacgtagcacatttatattggtacacctaannnnnttatttaaaaattataaaaaattatttcaaaatttatcatattttttaaattttttattttatttttataatttnnnnnnattttaaaataaattttgaaataaaaatannnnntgtaccgatataaacataccgcgtgttcaagagtgtacacataaacaatccatggtggcagttaactgtgaattacttttctctgaattttgccgtctctcttttctcctaaaattctaactacttaagcttctatttatagggtgttaaaatgactaatgtgcaaatacgcttacgacaaattgcataagggaaatt

SEQ ID NO: 27503 - DNA, 1921 bp, Cannabis sativa
ttaacgggagatcaaacctaatcgttaaatttagcagaatattcttttatttttaagtatattttgttaaaccaagaaatgccgttaaataggcacttttaatatataaagattatgtttaatttatattataatatgattgatgggcacttatcaccaacaattatgggacttagacttgccgtgtatgtgtatccgtttggtgtgttttgtaatgacctgaccattcttggtctgcttagtttataataaacaaattacaactttgctttcaaaacaaacaaatttatatagatatatatataagtagcaaatgattccctcccgcactttacttggtgcggaagaagtcacgcactatatatttgtccactagtgatagtttgaagaaaaagtcacccactaagggatagtttgagtatttgattgggaactatcatgggaaaaataattggagtttgtgttaattttacgatgtatccctctaaataaaagagttacggatgtaacataatgtttgaactttgttttcggcgtattaaatttttttaaatttttcaaaattttgtaggagatcttaaataattataatgtacacgaccataaaaaatactagtctaaaagacaccataagagataggagttcatcagtgcaccaaaaaaaatgtgcgttgtaaaattttccaaaattaaatttttaattttataaatacaattaataataaacataaattaaatattaattttataaatcaaaaaaataatttaaatatatatttataaagtgaatgttgttggtacagtgccacgacatatatgttgtgcactgtagtcacacgacaaatatagggtgaaagttggagtctcgttagagacatattgtgcatcatataagagtaatttgcggtataaatacctaagtttaattcctagttgcaaataaatatatcagcttagtttttgacgctaatagtacttaagttataattctaaaatatctgtgtgtacctaaatattaagtattaagtaaattgccacgtgacaatatgatctgttcaagtcattaaatttttattttaaaacaaatattttaaatataccaataagaaaataacacttgaacaatgacttaacatttaatgtcctggtacttacagagtttcaaaattataacttaagtattattgccgctaaaaattaaacttagatatttatttgtaactgaaagttagacttaattacttatgccgtaaattactctatataaatatacagattttatcaactcaattaatattataaatatttataaaaaaatataaaattatagattaatttaagaagtgacatttgaattctttttctataaaatacttttgcaaatatacttaaggaaaaaaaaagagtattgttaaatggatagaatttttatttcttatataaatatatttaaatttagaccttaattattattattttgtttctatatttttttattaatttttactatatttttttaaaattatatacatattaattaattaaaaataataaaaaaaaattataataataaatttattaatatataatacaatttattgctcaataatagatgataaaaatataattatttacaatatatataatttcgaattattataaacaattggtcctgaagcacaatttatttatatagttttgattacattatgtgtatttcattatgttgcaacgtatacaactgcacttttaagtagtgactattcatgtttattttattatgtacaaaattgtatcctttaagatttttatagctttcatcttttcaagtttcttttttacttatatttatttttttaattatttttttgatttaataatgataaataatatggttaaaaaaattcaaatgagatttgag

SEQ ID NO: 27504 - DNA, 3902 bp, Cannabis sativa
gggtcaaatttttgggtaaatattcgccccccccccaaagtcagtatgacaaaggtgtcaaactgactttctaacatatactatgcatgttcatgtatgaccaccagtttggcatcactttttagcatctgaccttcatttttagcctccaactgcgattctctatgatctaggagaaattaaaaaaaaaaaagataatttttcaataatttcatagttttagaaataggtgagatcttcctaaagatacaagtactcattattcactttattaacactcaaaagtagccaacaccagctcactagattggtgagaagaataatgaatgtaagtaaaaaaattgagagacacaaaatttatagtagttgaatccccatgtcccgatggtaatggagcaatgtctagtttaagttttcatttctcctgagatgatattacagaaaaatgcttagtgtttaagctctactttctagagagagtaatctgaccttatgggtagttttttgaatgtaaaaaatgagataagggaactggaactctccttttataggaaaaataaattcaaaatatgaaaaaatatatatatataatttggataatttttactgtagatgatgatccaacgataaaaattaccttctaaattttatagtcattttttggagctcgacaggacccgttgtggttaactcgaaggttatttttgtatctccctcggggtgaaatttgaggtcgatagcttcagaattgcgagtaaagtgggagacatgacttgatagagcattaactatctttagaagaaaagttgaatcacatcaattggatcaatattgaatgagttatggctgctttattgaaggcaattcatgaccaaacgctcaggttgacatcccagcgccctggttgacttatgacgttaacctagatgttgcggtaaggggaaaaacctccatgagatgtactttaagatgcctaagtgatattttatcatcactcaatctgtttttgtgttttgacaatgttggtcaccagttcttggagatgttgttgttctacggaaatgagagactagaaactcttcatttctgagtgagttttccatgtgaatattgagaaatcaaagttgtaaatttgtcttctctgaattcatggatcttagttattataaataacaagatggacggtcgaattggaatccaattaggataagcaaaacccagtgtagcaggccatttgtcaatttgggcactgggccctcattcgcgagctcccgatatgtcattttgatacttccaagtttcttgaacttgtgaaagaggtctcctaccctatttttgaccattcaggattcattggctgaattagatttggcaattgaatgatcaaaatccgctcaccatgttgattatcaacttgggcgttggcccaacactaggtcaacctaggcgttgggccgtatttctaggggctcgggtttgtggttttctccccgaatttgcttgaatcttcattatttttgatgatggaaaaaaatgctcgaaatacttttttgagatagcccaggttaacaatatgtaccaacctgggcgtcaggtcctagtcatggcccttcgaaagttctgtttcgtcgccagaaatagctgaatcttaatctttctaaaaattgagaagggcccagcttgacaaaatgtcaacctaggcgctgcgccagcctcaagtgtacacgtgggggctggaccttgcttttggcacccaagaagtgttgtttctttcttgaaagtacctattttcctattttgatgaagatgaaaaagatacaaaaggtggatcgtcaatctgatacttggaaggcgcccagattgataaattatcaatttgggcactagggtgcccgggcatcgagtggtcaaaaattaaatttcttcgaatattctaatgcctcaaatatatctgtggtatatctagttcatgtccaaatgcaaattttgacccatttgcactaagatagtcttaaaaaatgaaaccctaattgaggatatccacttagacgctgggtgaaatcctaaatgcctaggtggtttctgggggtgtaggttcgtttaattttagctcctgggacatggatttgattgctccatatcttcatggtatagaatactaagagatagtgagttggaatcaagttgttgaagtctgaactttcatcctagagttttcaaagtcaatttgggtgcaaggctgaggacccctcctaggtcgacttgctatcactcgagactactcaactctaagatgtcatctttcttgctatgtgtcaaacattgatgtccacatcatcagggctaatttgggtgtaaatacactttcattcgcatcactctcttttcttcccagcttttagtccacatgcttatattagtttggagatctttaccagggcttacttcaacttgcctcgagatttttgtttccacaagtaaacttttttttttttaatctcgaagaaaatgagtcaatgatttcaatggaatcgaaaaaatatcattatgacaaagcattccccttccaattagaaattaagaaatttttccttgtttgttgaagcgtcatttccatttcaagcgtttagaaacatcttcatttgaactaaaccaagataaattgagatgaaccgagctagagttaagctaattgagctaagatgaatcacgtcatggtgagatatgggctgtaaaaaatagactcgaagattacaagcccttcttgatcctcacattgcttaatatattagagcaaagcacagagtgcctaaatctacgaccatagaaactgaaagcggtgaaaaaagagtagccttggagcttttaagttcagccattgagagtgagaatgatgcagacaaagattatgtgcttgaaactctagtcaagagcacacttagtaacttgaatccatcagaaatgattacagtcttcttgatgaaataatgtagaattcgccaaggtgcacatgtgttgtcgtcaatgcttgttcaccttgatgaatctcgtagcctcaaattttgtagcaaacgttattgtttataatgtgcaattttttactaataaattatttcacaataactttgttactaatgacttcaatgtttaaagtacattattagggaggtgttagacaacgttaaaggttgcttatgatagtttacattaaatcaacactagtggttcacaataattttgttactaatgactttgatgttcgatgtttatttcagccaatgaccgaaaataccctattctgattgagaaattaactttattagaacggggtaagcaaatgaggcatatattcaaaaaccctcaattaaaagtgaccttaaaagtaagtaacttttgaacccaaagcacattattcctagcatgctaaatgagataattgtggctgtaatgacactcaaaagaaccgtttttgacctaagattttgactttctaatccacttaagaacatcataaaaatatcattttggactagaagaaccagtcaagtgccgcacttgttaaagcactatactgctataaatatattctaagaagaggtgagaatggatctacactccacttccacacaataaatacaaggaagagttggtataactaaactggcaaagtatgtcaaaaattggcaaacaattcttcaaagctaaccaacatatgaagttgtattttggagtaaaaaactatcccaaatgccatcataacctcatctaacaatatttccttgagacatcttgatcacaaattaactatggaaaactaataattttgaaaatcctcataggagaagagttgttttacctttgaccctattctattaaagttgaataatccaaccaaaacaaaa

SEQ ID NO: 27505 - DNA, 1679 bp, Cannabis sativa
  modified_base (476)..(478): a, c, t, g, unknown or other
attatctataaaagtaagtatatcgtaaagaatttgaaaatagaggtaaaaattaaaataaataaagtgagtatactatataatcttctcataattgaatgtaaacttcgccagtgacgaaatcagcccgtaggtatggcccaaattaactaagagggaaatgggcccatttagtctaatgaaccatcgataaaatatggcccaaaaggctcacatcacgggctcgctgatagtctttgagaaaaggcccatttaataatttacttacttcagccaaaaattaaaaatattgtgctctacatttagtattggataatttcacaaaaacataaaaataacaaaaaaattataaaaatacagttttacagaattttaaacacttttacaaattttttattttatttacagaaaatacgatatttttttgttataatcttattaatttgttgtcgattttttgttatctgtatgttatnnnttgttgttattttgatgttatttccatattactttcatatagttttattgttgattttatgttgttttcatgttattttagaaaaccgtaaaaatgtaaaaaagtattcttttaacgtaaaaaaatgtaaatgttttataaaaaaatggtgacttatttaattattcttttattattattattattattattattgggataatttaagcaatatggttattattaatctttgacaaatttgcttatttttttaagatgaggaacaaaaattttagccacataagaatttcaaattgcttatgaaactctgcaactattattttacttctaacataacatttaaactatcttgtataccataccatcccattccacatatataaatatatatttttttaatatataacctcatttaattatcatttgtaattaattaaaattatatgtagttattacaatacagagtacaaccctgcattttttttttcataaaataaaataaaatacatttggtttggatattatcaaccaaccaatacttccattccaattaatattcatgtcaattattttctaagcattattcatgtcattttgaattaaagatttttttttttcttaataagtcattattaataatatatatataaatatatatatatatatataaaaatccaataattgtagaaacactcttgcttttaatttatcattttacattcgacttaaactaatatatatttagggatataattttgtcttgttattgtacttttacgaattgtaatccgtgatgtacggcagctatcagatgaggatattatatgatctgatggctgagattgatctaggagtaattaggtttaaaaaacaaaaacgtactctaacactcatttaatgtacactgaaacccatataccacatacattccgtaaaaatacattaccgaacaaaatcatatccatatatatttatatttattcaaaccattttcgccccttcataaaagatgaaatatattatcttaatatagtaatatatattttcaatgaataaaaaattataataaccacacaaaaaaaaattaatgacgtaagtggtgagggagctatgtacgtaataaacacgtgtgggattatgtagtataacacgtgtgagaatgagaaccattcccttgagaacatgtggtgtacacatatga

SEQ ID NO: 27506 - DNA, 1135 bp, Cannabis sativa
atgaacctactgaacctaaagtgcatgtgtccctacttcgttgccactgcccatgcatatttgcctatagctgactcattctatttagcaatgctcctaaatctcaacccactttcactctttattcagcacataatagccatacttcctgaactatttataaaaagataatgttatatttattttactatttataattatactgtagaagatacaaattaaattaaaaaaaaaaaaatactgttgttgataattattcaatatttattaatagtatacaaaaattatatttgcactcatattatttatagtatactttttgaattaaaaaaaataaaagagtgctgaattagtaaaaaatttaaaaatgtattaaattttgatatttgttttcactctacaaaacagttttgcgttggtcaacactacgcgccaacaaccataataatgaaaaaacaaaggcaaaacttttgcttcagttatcaattgacgcaaaaaagtaatattttgcgttagtgactacttcaacgctaatttgaaaaccaacgacaaaaaattaatttttataaaacaaatttattttagggattttttcaatattatacctaaagttgattttatttacaaaaatacttttaagaaaaatatttgcacaaataccgttgtgccacatcagcatacatatcgaaattcaaaacaattattgaaatagaaaaaactggaaaaatctcgtttctagaaattttcgctttttggaaatttaaaaaaaaaaaagtaatcatttagttgcttttaatgtgaataagatattaataggttacttttctattaaaaaatttatttcagaattttacaaatatataaataatcaaataaccaatttaatatgtgagaaacatatatttttatgtctccaaaaaatgacgactaatattaaaagaaactttcttgtttcctttttatatttttaggttatattatgttattttattgtataaaatacggtttctttttttttttttttaatgtaactcatatgatgtttaagatactattcaatttattgacaaattattttataaacctattaaaacttattacattattttctcaaataattacccgtatgattgaa

SEQ ID NO: 27507 - DNA, 3522 bp, Cannabis sativa
ctttttttttttttttttctgatcccctttcccatttttctctggggtatttatagagattggtgggaatagttaaaaaggaataacttgtctttgagtgccaacaatggatgagcataagtttctaagagatacaaaatagggcatccattacctataccgtaggtatcgtagggattaggtgagattaatctttatttttccttgattgatgtgattcttcataatgaagccgtcactagccccttcgattatggtgtaatcgccttaaacaaggcttacgatgtctgacatgtcctcttatgggtgttcccaacgctttccccatgttgcattaaatgcgaggcgactgttcgaatatgcccttctcgtcccggagatgcctaactacacctttagcttccgaagaggagggcatgcttttgtactacttcgggggctcgctccccgaattacacttgttctatttcatacgattcttaactagtcgccgggtgaggtgtcctttaggtccacgtgtcatacataaccgtggccacgtattttgggaaaacctcggggcaacaattagtatctaaaaactattgttatgagttgatttgttcttgaaattgggttatgatttttgaggatattgtgcaatgggtttagattgagatttagggttacgaaatggatttcaattttggggaaaagaatgtgaagaaggattgcaatataggttaaaatagtgatgcaaagatggataagtattttagatgaaatagaaggttacataaaaaaaaatctataatatctcagagaaaaaaaggacattaaagaagaaatatctaacagaactactcttactaaaatatgaagaaacgatgaagatgagctacaatagtatgaattaagccataaagaagaaagaaagctcaatgaaaaagaaatttaggtctctgagaacagaaggattaagataaaacatgagaatgagaatgtaaattttttttctttaataaaagggataatgaaaactgagagaatcctataataattttaaaaaatatataatataaaagtaagtaaatgaaataataaaaaacataaaattaaaagtaaaggtgtaacttagggtattattagtttatttattaaaattaattaattagaaaataaactttattgtcttttaattgaatattatatattttttaattaatgatgacaaaatggtaaaatattatagaaatgattttgttagaaataagattacttaaaaaagacactcatttagcaggaaagtgcaagagagagtacaaaaacactcctccctaaaagaatgaaaaaagaaagaaaaaaaaaaaataatctaaataacaaataaattattaatttttactttgccctttatgccatttcctccaatggttactctccatttctagagagagagaatttcttcagtcaagatatttctctaaaccagcatacctctctctctcactgtgtccgaagttgagcagtttttggtgaagggcacgacgacctccttcccttcccttcccttcccagggagaaaagaaagaaatagaatccaaatccatttcatcccaactctctctcctcaacacgttttaaacattttctagagagagaaagtcacggagtttccgtattttgcttcctttcttcctttcccaccttcttcttctcctcctcctctctcttcaggaagagcaattctacagggagagagactggcttagttggtttcttcttcttcttcttcgttttgtgtcccagctgggttttgccttcggatcacggaggttttactccgtatggagttcgtgggcagagccgtgaggagagaaatcaaaggccgaggggttttgtcgggacttgtgaaatcgtacaaatcctcatctggtttgttcgaggtcgattacgaagatggcgattccgaggagttggacttggccgaggtctcgttgctcgttggtggtgagctccagctggtggaggtagacgaggacgagcccagccagcatgatcggaggctcaagaaacggcgtcgtttggaaaaaggtggccaagcgccgggagattcaggtaatgctggtcgaaatattgtaactgatgggacccttgggaatgatgatggggttgggggggatttgaatgataattgtgtttctttgaatgatgggaaagagggaaatctggaaatgggacatggagttggcagaaatttggagctcaatggtgatttgaatggaaatgttagctctacgtctgaatttgataaaaccctgtcggaaaaggagggtttagcagatagtgtctctggtaatggggatttgaaagatgggtttgatttaaatgctggatttaatttgaatctaagtgatgactctaatttgcattttaatcctgaggaaaatttgaagaaactcgatcaaattgatcttaatttggatgtgaatggcgattttgataagaatttgaactcgggggactttcatttttcctctttgggtatccagaggaagggatgtaactttgacttgaatttggaggtacttgaagatgttaaagaggcagagagtgaggggaatcgacaacttacttctcttgataatgtaggagatggccaaacaaaagatggtgatgaaggtgttgaagaaaagttagtagaagaaggtattggtttaaatgggaattcgacaaaagttcacctagatatgaatgaagatgttaacgtgacctcaggtaaagatgtatgctctgctgaagttgttgctaacgaatgtagtggctccattcaagatggaaagcctgttgcttcagttgctgtcgtggatactagctcagtaggggattgtgatttgacagaagctcaggtgagagatggttattctgaagctggtattcaaatgatcaatgaacacctagacaattcaggaagtccatccagtagaaagggcagtcgtagtaagagaaaaaagctatcagataacattaaatccccgtcagaaatggttttaagaagaagtgcccgtagaggatccgctcaaaatcatatttcaatcacattgtgtactgccatggatacaccatcttcacctgcagttagtgcaataacagaggaaaaaccagggacttcttgtgggaaagtatttgagaagccctgtgttctgctccctccgaagctacaattgcctccttcttcgcaaattatagatttaagtgacattcccatacttgaccttttctctgtctatgcttttcttcgatcatttagtacattattattcctgagcccctttgaggtggaggattttgtggcagctctgaagtgtaagtgtcctagttcattgtttgataatgttcatgtttctatattgcaaactcttcgaaagcatttggaatacctttcgagtgaaggttctgaatccgcttctgattgcctaaggtattcctcaaaacccaagtttaatcactttggttgtttatctctcttctctctctctctct

SEQ ID NO: 27508 - DNA, 2305 bp, Cannabis sativa
ttggggactaatctgcatcaaccttaactttttggggacttttgccgcaattatccctaatatttttaaatattattatagttatatatttttaaattctaattattttattaagagtaaataaatataaatatttcttatttgtaaacagtataaatatttgtaaaataatattttttttctagttttatcgatacatattttattttgaatttattaaaaaaatatttaaaagtaactcataaaatatatttttatctaaaccacataatttagaatttatacattatttgtaagcagcatatttttagctggcaccaatatttgtaaaataataaatatttttctaattttattagtatagattttattttgaatttattaaaaaaacatttaaaagtaacttataaaatatgttgaggaaccacatgatccccatttgacagatcaaggtatccctcgtgcgaacgcaaatgacgtaacaaatgcagtaaacccaccaatcacaccaattgtgcctaaacaacacaataaagttgctcagtggaaagtaaacacccccttaaggggataatccaaaaagaattccaagactgaaagcatgattcttctctaacaaatttgagagaaaagcgaagtaaattcaaagcagagagaaccaaagcataaaccaccaaggcacccaaacacaaaatttcctagtctcacataacaaatcgaacaaaaattaaagggcaaccacaacaacagagcttaccctttaccagcaaacatcgacttcgtgcacaatcacatcaaaggaaaacatcgacttcgtgcacattcacatcaaagctgggtgtgctactcttattaagtttgtgggtccgtccatgccaagttatgtcatgcaaactacaaaatgctcgaactatcttgttaataagattgatggcatgatttgtaatttttggtagggttatgagaaaggaaaccatgggcttcacctaaaggcatgtgataaactatgccttcccaaatcccatggtgggctatgattccgaaaaactaaagaaatgaactaggcttacctggctaagtgggggtagaacctattaattggtagtcagtccctttgctgtcaggtcttggaagcaaagtacgtgaaatggaaagatttccttacttgcaagtacaaagactcaaatttgtaattttggaaaatgtggtgaaagccaaagctattttaaagaaaagtgtttgtcgaatggttattgatggaagggatactagaatctgggatgatccttgagtttcccatggtaaggagttttatcctaagtctaatggatctatagattctggtggtaacagagtggctaatcttcttatgaattacggtgattgggattcagaaattgaattacctatctgacaaagaaaccgtttcggccatcttgaaagggggcagaccttctggtcagggtaaggataggtgaattcagaccaagaagagtaatggacgcttctcgtgtaaatcagcttatctcatccaagctttagaaagggcttcttagtatgaagttgcgtcgtccctctagaacaaactgtggaataataacattttggaatgacataagatattgtggtggtgtatcctctctaaggccctcccaattcgagttgttctttctaagaggctccatattgaggatgtggcttgccccttgtgtggggttgaagagaaaacgatgaagcacttatttctctcttgtaatttagtttttcatttgtgacgttcgtccccgtggggtatcttttctattgttgggtctggcatttgcatgtgggattgggtcaaattcatttgggggctagaaaaataaggtgttaatacagatgaagtgtttctttattcatcgattgttgttgatacaatttggcagactcggaacgacaagatacacaatagaagtccggttaaagtgaaacactgtattaactctattcattactcttacgcagattacagagcctctattttccttactctttcttcgctcctagtagatggatggcaacctccccctcaagagtggtttaagctaaactgtgatgttaaaatagtgacagaaagcatgtgcatcacggttgtgactactggctagaaactatcttgttgtggtgtgtggggtgcatacggcaagaatggagttttctaatgctctatgtggagaagcggaacatgctgcttgcctttggaagttgctaaaaatttatagagtgattctagtgtggttaccaatttgctcaacgaactgaattt

SEQ ID NO: 27509 - DNA, 5588 bp, Cannabis sativa
  modified_base (5539)..(5552): a, c, t, g, unknown or other
ttgggaagcaaaacgtgataaaaagagaagttaaaaaagaagaacctggtattctcggcgacatattgcctcagttatgaagtgaatttatttttacacatgggcaaatgcagaactaaaaaatcttgaaaatattaatttgacactacttaaaacattagattaagctacttaatttgtgcattaatagtcatataatgaactatggaaatatattaatttgtgcattcatcaagccaatatgtgtaatattaataaactaaaattcgggtatcttaaattgttaaataaaccttcctattgcatgtatacttataatcgatacacataagtaagttggtacaaataatgagtaaaaatatagctaaaaaaaatatttgcaatatttgtatagttcaaacagaatatatgtaacaaaaataaattcagagggtaagattctacaagaactattgttcacaagcaaatattaatttatcgccttttcaaaaaaaaaaaaatattaatttatcgtttcaaacttgatggctaaccgtaaatcataaaatcgagatttgttgttattaattgcattttaagtcccaacaatttttttttttccttaacttagtcctaacaaatttattattatatttaatatactaaaattagattcgtggactaaatataaccttttaatctaagccattttttttatatatttaaatcacatttacttataaaaaatcttatattgtggttaaaaatgtattactgaaaaaaaaaaagacaattaaaaatacaaaaataaataaaataattacaaaaatatagtttgtagagatgttttaacatttttacaattttatagattttatttagataaaatatgacgttttatgtattttttttttattgtattattgttattttgttattcattttttgttatttgtattttatttttaatgttgttttgatattgttttgttgttaattttatgtgatttttttgttattttcttatatttttataaaatactgtaaaaatataaaaataaaatataaatgtaaaaaaaatatattttttataaaaattagtgttttatgtaattataaaaaaaaattattattttgtagtagatataaagttacattattagagagtcacattgttaatgtttgaaaagataatagaatatataagatgaatgggctactctttctattgtcaattggttttgagataaaacccattcacctaaaagtgtcacttgtgatcagggatagtaatagtgagccaaaaaagagctctgcttagttatgatataagaagaatgactacttttcttattaccaattaattttaagatggaaccttatttatcttatctccaaattctaatatgcataaagtataatcacgtgtttattcacagcaaagatttaactatatctaaacgaatggaggaacaaacaacatgctattagtttataacttttcttatattttcttaaagacaatttggcttaatttaaataggtaaataaacaactcagaggtttaggtgatcaactcattgaataatatggtgggccccctgttttgtaggtacacgcacaatgacgcaatggtaatattttaacttattatgaaagacagtcattgtcaataatatatggacacgtttggaagtagtaatgagctaagcaaatggtttttgcacccaaaaccacagatttctccaaaactggaggtgaagttgtcctcacatactactctatataattatataaactttcttaaagaggaaatatgagttcaatagaaccaagcacaacacaacttttctaattacaattttatcagtcaatattattaaagaggaaatatgagttcaataagcaagggttgggcagtggcaacaagtattggagtagtggaagctttgaaggaccaaggtgtttgtagatggaattctgttttgaagtcaattcagcaacacacaaaaagcaatctcagatcttattctcaggcaaagaaaatatcagctcactattctaacaacatctccaaagacgagaaattgaagcaatctgaggaatctcttaaaactgtcatgtacttgagctgttggggtcccaataattgagaaccctctgaatttttgtaatatagtttcctatcttttagtaaaatgtttatacggatttaatttaaactctatctcacctttcaatgattttgcttctttcactattatcaaagtgccttactaaattactcatgtctatagaatagcctcacaaaaatacaatgattctgatcgtagtgtcaaaaaagagaaacctgataagtcataacaattaatatatgagaaatgagtaatgacttaatttaagagtggaaataattttcaacctaaaagccataatttttttacttcaaagttgtttttgctactttcttgtgaaataattgcaagcttgagtaccatgatttgtgatgtgttcatatgagctgtttaggcagagttcatcaactgtgctgacgacttattcagttattctaaatataaaatagtttgtagttgcttatattataatattatgaattcgattgaagatttgctgatagagcagtgaagaatttcggtagcaataaaagggactcttaagttctttgtccattacaacttctatttatttttattttttttgttgaccaggaaacaacttctatagttattttattgtattctttataattcaaaagtttaaaagtggagaatatataattgtacgataagattaagagagacatcttattttagttatttccttggtttttagaactaatgagttttcttttctgttttcatggtgaggatattagaagagagaaaagatttattttattatttgtaaagatttatctgagtacaagagaagaaaggtgccttatataggcacgatatgtaccagaatagaagaaaagaataaatcaactaatcctaactaatttatcttaactaacttaacggaacttaataggccgtttcaagatggagtgtaaaagttttcgacacccatcttagatacaatatctttgaagtgatttgggaacaaaggttttgttaagatatcgaccagattggtttttgaagatacatggttcattttgatgcagtcgttggtgatcttttctctaataatgtgacagtcaattttcgcgtgttttgttctttcatggtaaactagatattctgcaatgtgtattgctgctgaattgtcacagaatagacttgatggcagctgtgtttttatgtggaaatctttgatgatggagtgtagccatgtaagttcgcaagtggcattggccatggctctatactctgcctcagctgatgatagagaaatggtaggttgtttcttagatttccaggagatgagagattgcccaaggaagacacaatatcgtgaaattgatctttgagtgttgaggcaagctccccaatcggcatcaataaaggcctgaaaatgaggtgttggacaagatgcatagaaaaaaaaaagtccttgttcaggagagcttttgaggtactgtaggactcgagttgcaacatgtaagtgtggtttccttcgtgattgaaggaattggctaagtttgttgactgcaaagcttatgtcaggtcttgtgattgtgaggtagagaagtttgctgattaagcttccgtattgagttggattttggaagagttggccatcatcattgccaagctttgtgttggcttccataggagttgatgttggttttgatccaaggcagcctgagtcttttaataattagagagtgaagggtctttgggtgatagatatgcctttggggcatcttataatttcgagtccaagtgtaagctgccaagatcttttagtttgaattgtgcatcaagggaagagatgaaggtgttcaatgatgcaatattgttagtggcaactatgatataatcaacctaaatgagtaaggccgaaaaattgtcaggttgatgtctaataaatagagagtggtcattttgtgacagtgtgaaaccttactgtagtaaggtagtgcttagttaggcataccattatctagaggcttgtttcaagccatataagcttttctgtaatttgttgactggattctttggtattactccttttggagtgtagccttgaggtagtttcatgtaaacatcctcatgtaattttccatggaggaaggcattgttgatatccatgtgacgtagatgccagtttttaatggcagcaagggcaaatagtagtttgagagtattgaatttaaccacaggggtatatgttttgaaataatcaataactggttgttggttgtaacccttggctactaatcgggctttacgtctttggattgatccatcagggtttaatttcttttgatagacctatttgttgccaataacatctttgccatcaggtaaaggagcaactatccatgtgtgatttttctccaaggcatctatctcatcatccattgttgtattccatatttcgtgaagtctggcttcaacatatgttactgattcaggtaagtttgctgcagcaaagacaacaactttaaattttgtacttaacctgtcataagaaaggaaatttgaaatggggaaagttgtgctaaaaaaaattggctgctgtgcagttgtagtcattcaagtgagcagatttgtatctttcttcctaatttggaggtttttggtggctgctgatgggcaggaggggaaggtgatgttgtagttgcagattagtgagtatctacagggtaaaacgaagtattgttggaagggaaaaatatatcaatgttggggtaatggctgaaggttttgcagggaaatatcgactcataaaagataacatcctttgaatgaaaaatttagtttgtttggatatcaagaagggtgtaggacttcaagttgtctggatagtctatgaaaacacaaggtcttgctcgaggagaaaatttttcggtgttggttacatgtgatccataagcaagacatctaaaatttcttaagggagcataatttggttttgttttgtgcaaaaactcataggatgtttactcattgagagtgatggagggggttctgttgagtaaattaattcttgtttttaccatgtaactccaatagatgagcggcaggttggattgaaaagctaaggccctggcaacattgaggatgtgttggtgtttgcgttccacgactgtgttttgctagggtctacctacacaagaattgttatggataacacctttgttgttgtaaaaactggttagattcagttctttagcattggcacttctgacagatttgatgttattttgatattgaatgttaacaaaggtgaaaattttttgtattatttgaggcgcttaatatttagatcttagtaggtagatccatgtgtatctagaatggtcatccactatagttaaaaaaaatatttataagcatcgatagaggtgttggaaatattttaccannnnnnnnnnnnnntaccaagtatgttttattaacaacctaatatgaatt

SEQ ID NO: 27510 - DNA, 5461 bp, Cannabis sativa
  modified_base (4596)..(4605): a, c, t, g, unknown or other
aaagagactcctattagattttgaattccttctcttctccctttagaattcgaatgcactatagtgaaagagtacttgcccactcaattcaagttaatactcaatcatagtgtagaagattgtgaagaactccatcaccaaaagagatacaggttcagatcttggcaatactctgcgacagaaagaaacaagggttagagatctgaacagaaggagccataatattttgctaccaccaatgtaaggttttctacaactttatatgtgtttattttattattttaagaaattcatatttaggattttagattatagatcataatcaaacatacatgttagtaaatttagatcctggtaaaacaagttccaacaattacctcttgatagctcaagggttcagagctatcaacttcttctgcaacagctaatgcataaataatgaagtcaacatagccaaatttactaggagccctgctctctctcctttgtatgtttctggctaattggtagttgctaaggtcaccctggttaccctcatcttcagtcaattcttcatgttcttcttgagttgtagagtgactagatgactaatccacctcaatatgcatattgtctagttggacagcttgaacattatcaggagtgactttaacttccatagtcatttcttcttccttaaacacaacatctttactgattagacactttttctgtctaggttcaaggcaccacatcttgtagcccttaaccccatctagataacgaaggaacatgcatcttaaagcccttggttgtaactatattgtttgatatgcacataagttgtgcaaccaaacactctcaaatgttcaaacttgggtggcttccctgtccaaatctcttgaggtgtcttaaaattgttagccactaaagaacatctatttattagatagcatgatgtcataagagcttctccccgaaatggcctctccaaactagctcttaattgcaagcatttaaccctttccatgagtgtcatattcatcctcttagcaacttcattttgtcgagggttcttcaccacagttttgtgcctcatgattccttttcttgcacagaaggctttgaactcatttgaacaatactcaagtccattatcagttatgaggaccttgagtttatttcctgtttgattctccagaagttttctccaattgatgaaagtctcaagggcctagtctttgtttttcaataagtacacccacatttttctactataatcatctattatgctcataaagtagtatgcacttcccatagttggtattcgtgaggatccccatagggcagaatgcccatatgctagtctatcagttgttgtgtactcacctttaccatatctaattttgcatgccttcccaagaacacactcatgacataactcaagcttgtctttcaatttctcattgaacaagcgatagttctccaattcttcaggtcctctctagctgacatggccaagtctgagatgccaaagtctagttgaattgttaattgagttgttggttaatggtgttgcacttcctagtattgactttccatctaagatgtaaagaccattatatagctaacatttaatcaatttttatgatccttgacttatcctcataattccatcatcaattttaacagaatattcagctttatcaaacatgccaatagacaataaatttctcttaagatcaggtacatacctgacttgttgcagagattttaggttgttaaaatgatttttgatcataacaatgcctattttccctttatgtcacatgctttttattgccaagcagcactgtgccattggtatcttttgacaatgtactgaataaatctttatttggagtcatgtggaatgaacaacatgagtctagtacccattctccacctgaatcagaactagatgccacaagaacatcaacatagtcatgtccattagcaatatttgcttctccattcttcttgtttcttgtctgttagccctctattttcaacttttcttttggagttaggcaattatctctgaaatggccttcctttttgtaatagtggcattgtttaccagttgtggcccttgaatttgaatgttctcttgagtttgacttggattgatttcctttgtatccatttgagtgattctggtttcccttgtaatctctcttttgaaattttgcttgacaatgagaagtccctcaccattgctctcatttctatcttctcccttcttctgaatttattttgaattgaaagctgctttacttcaatcatggtaagaatgtctttcccatacagaattgtatcaataaagtgctcatacctctttggcaaagatttgagcaatatgattgcttgatcctcatcctcaatcttcacaccaagattgttcagattaaggatgattttgttgaaatcatctaaatgttttcttagttctctggtctcatccatctgaagtgagtatagtcttttcttgaggtgtaacttatttactaaagatttcttcatgtagattgaaaaaaatttattccagaggccaagggcctattcctcatttgagacttctcttaacacttcatcactaaggctcaagagtatgacattgtgtgcctttgattcgatctcattcttcttcttcaagtcttcgatctgatccatggcttctgtatctaatgcctttgagatcccttgatgaattagaaaggcttttattttaattctccacaagctaaaatcatttatgccattgaatttgtccatctcaagtctgattgtggtcattgctaattaactcagggggctcgagtttggttcttgatagtttaaatgtggttcttgaaggtttgaatgcggattttgaaacctacaactctagtaccatttgcagtggattaaaaccacttgatcttcatcgttaaactaaattgagtgagtaagaatacaagcaactcaaacaaacacaacttgaattaaaccaacaataacaaattaactaaaaccaaaaaaacttagtttgaatcacaaagggataaaatgaatagaatctttattgatcatcaacacccattacagcaatagttcttgaactcattaaaactcaacaatggtgtatctcaccaattacaaaagctcacctggggtacccttgatcagaaacacaaggaactcgtacaccccttcttcactcacactaaatctaaaatagaattacaattatggagaaaagaaaaagagagaattatagacaatgagagagactaatgttgatgttgatatctcttgagtgtttaactgtaatgttttatatatagggtaataatttgattagtttattcgaaagtgaaatgtaaccaacttaactaccactcttgacacatgccaataagtaggggtgagcataaaatttggaaaactgaaaaaaccgttcaaaccgacctaccgaacaccattggaatcgagactgacgaaaccgaaaattgaaaaaactgctaacggtttaaaccgccattgaacagtcggtttttttttggtaataaaccgaccgaaaaaacaaaataaaaaaccgaaactgagcgttatacatatatatattaatttattaagttttttctcatgtattatagttactaataatatataaaaataatatattatttttttattaatattaaagttaaaagaataagataattagtgtttgaacaattaatttatatgcttgtagttgtaaaatgtaaaataatgtatttatagaataaattggattatttttttaaaaaaaaaaataaagttcggtttgggcggtttaaaccgaccaaaccgaggttcaaaacggtcgattttaagatatgttctggattgggcggtcagttttcggattgcaccaatccaaaccgaaaattgaattttggatttttatatagaaaaaaccgaccgatgctcagccttaccaatgagagtgctaatgtggacagagtatgtggatcaaatctaaaaaaaaaagtgtactaaaataaccatttagagtgttgtaaattttttcaagaatatttattaatattgttacaaaacaaaaaaagaatactaattatgggcaattctattttacactctgaaaaaaaggactcttctaggatacttattatctatttcgagatagtagattttttgggtctaatttttttttcatatttgtgcacgttgtagtgatttaggatcacttataaacttttaaaaaattatgaatactttacagcgtggaaaataagcacgcacattgacgaagctactttagcctaggtgaggtagttgcctctgcctcaactatttttcttcttcactcatatatatatagatatatatatatatacacacatatataaatagaataatttacggcgtaaatacttaagttcaactttcgattgtagataaatacttaagtttattttttgacagtaatcagacttgagttatatttctagaacatacataggtacttgaccgttaaatgtcaagccattatccacgtgtcattttcttattgatatatttaaattaatnnnnnnnnnnaaaataaaaatttaataacctgaaccaatcagggattgctacatgcaatttacttaacacttaatagctaagtacatatagaagcttcagaattataacttaggtattattactgccaaaaattaaacgaaaatatttatttacaactagaaattaaacttaagttttatgtcgtaaattactcatataaatatttataacatatatataatgggtaatatgaatttatcttatgcaaatttatatctattgtctattgaaactgttttaattataacactaaataaaatgagtaaatattattttagatcccacattttacaaaatttaccaattacttcttctattcttttagcacaatttttatcaaatttttcttaatatgactaaatataacatacctaaagtcaatttttaacacaaatgtgtgcaaaaaatataaccaccttagttataacacatcaacctcatggtattattatgttctattttgattagaatttaaattgttatttaacaaaaagagtaatttaatcggtaacttttgtaaaatataaaattcaaaattatttgtccattgaaaaaatcaaagcagctcttctataaattagatatatgctttttttaaaaaaaaaaattaattctttttattaatatttttacaaatttaattaatatagcatattcgcctcactttattttattttctaacttcgtctctaaacacgcatgattattttttcttatatttatattaagctgttatttaaattctatttttgacattataactatttttagaagttgttaaagtatatcattttgttgcgatatttagcacacgcaagtgtacgta

SEQ ID NO: 27511 - DNA, 2831 bp, Cannabis sativa
cataaatactttgtgttcagtttgaaaactccaatatttatggagtccttggattgcctataagattagacaagttttgccagccaaaaccactggggtgatgacattttttcttcccaaaaccagtggggttttggtgccaaccatggtcagaaggaccatgggagcccccgggatgcatggagacgtttcttagaaggaggagagagaagagagcattactcatttaggtgaattaattttaaaaccaagaaaacatacatacacctacgattttaaaagaaaaagcaccaaaactaatcgaaacaaagaaggctcagtattgctcaaattctccacgggaagtacaaatttagtttcaattaacaaaagacagagtcgccctttacccaacataagtatatttcgtgtgcttttgaataattcagaatcaagatcatagtggtcaattcataaacacatgtaggcctctaatctaggagaagataattttatctacttgctcatcataaggtcaaattcagttagctcctccaaaaatattacctaacgatgattgaacttaactaaacaattgtctagtacatttacacaaaatttaaaagcagaagagaaatgcaatgatgaagaaaaccaaacctcaagaatttcttgagctctatccatgttccggcacaaagggatatcaaatttcaccatggcaagctcattttttatccatgtaaacttaatatcatccacaacagcttgagtcaccccagctttcttgaccttcacccatttcctcatcttgtaagcctcacttctcaacctttcaagcaactctttttcaaggctcaattccgcagcactaacagttttttctttcttcattctcctaaagacaaagctctcatccttctcccatggcactttccggcgcatttccgaatcccctgcctcgccaagtcgtttcaaataacccccaattcccagtttttcagaacctttctgggtttcttccatatcaactttctccccaagcttttgaatcttcctggcgattttcttaatggcattcttccctctacgaccaaccaacttatcagtgagctcgccactggacctttcaggcttgaccctcttgccgttttccgatttcgagaggtcgacgacatcgtggggctcaacaaggagaggaccgtgcatccatggaggtgtgggcattttaatggaggtggggcgcgaagtggactccaatggaagcttggagtctgcgtttgagtttggttgagtggagttgagtgagatgaaatgtgaagcataattggtttgtttagtgtggtgaggttttgggttgaaggaagaagatatgagtaaggaagaatgggaatatggggtggagttgtatgaaagataagtagagtttagaagagaagagtacgatgaagaagaaggatagaataatagtatgggaggcatagatattagatagtcacttaagagaatgaaaaattttcagtctcactcttatctccaattcaacagccaatgctatttgctcatacatacatcggaaaatttgctgtgattcggaatgattatttatttatttattttggtcagtgtgattgggagtgattttataacgataagatacgagactccaacttcaaaactttctctcaaaaaaaaaaaaaaaaaaaacttcaaaatcaatttcaataaatcaattcacttttattaaaaataaataaatataagctaattataatttttcctcaactttttcaggacgttaatagtttcaaattattaaatttaaagatttctgactattttcgttcaattttactaatatgataattattgacgctaaaaagtgatcaactccgtacaatatagtaagcagtagtggccaactaatgtataaacaaaaaaaaatgaaagagaacacaacaattatagtagttcactccccgtgaattaatggtaatggaactacatctacttagagatcttattatcacgaaaacagagaaaaaatgtctaagcctgatagaagctatgaccttgtagagaaaatgaagaatgtgtaaaatgagttggggtgactctcctttataagaaaggaaatccaattaaattacaataaaatgatagaaaatttgcacaaaattcattcaaaaattctacactagctcacaggttgattttgatgcctgaaatgtaaaatcgtgctaagggtattcgatacacttagatccgtcttaaaaatagctttcatgtaccacttgaatcacatcatttggataaaatttgagggagttatgaccattttactgagtggtgtgcactactaaacgtgactgcgaggtcaattcgacctttaggcacccaggttgacatagaacgtcaacctaagtgcccaaaacttggcttcttgggctttaggcatagtttgagatgcttgaatgatataatagctattcttagctcattcttgactctggtgaagatctcttggcaatttttcttgatatgcacatgtgatgcccgggtaatcactagtgattactaggtgacgaccggttgatcactaatgcacatgggtgttggtggacttgcacataacacatgtgcataggatacttgttagattaattaacaatcccaagatactattttgtatataatatatagaattctaataatatatatatataaataataattaggtttgtgtacctcattgatctatagcaattacaacaatttgatagtgcaatactatcaactaagccttcccccatagatctctaaatcagaagcagttttatttatctaattat

SEQ ID NO: 27512 - DNA, 5559 bp, Cannabis sativa
ggggcctccagaatgtcaaccagcttagcaccgagctttgcaagtctaatgaccaacgcgaagtcttggctaagcaatggaatgactcccaatcggagatcaccaggctaaagaagaatgttgaaaagcaagagaaagctcttaagactgagcttgaggctgctcaaaacaaaattaaggatcttcttaaggctaactagcaggcccagacaactattgacgatgctaacaaaaagcttgaaatggccaaggcaaatgctaagataagaatcaacttgatggccaagcagtctatttaccgagcttggttagcaaatcctgggatggacctgagtttcttaggggttggtgttgatgaaatgtgagcttattgtgaagagaccaagaaggatgaagacgttgaagaaggcaaatttgaagaagaagaagaagaaaaagaaaatttccctaagtcttcagctatgtagacttagtttttgtcattttaatttctggataatggccatttggctgagacaatattttgcctcttgtggcgtttactatgtaatataaattttcaattgctttgttggttagccaacatagctatatttatattttttatgctattttaccatgtttttctcaagttattaatagttattggatattgtgtttttatccacgagtaaacaaaacacctttctcaatttagcttagagtgtaatgcaaactttaaatgttcttacaaaatttttctgaacactttttgatattcgtttgagctgttgtgattctgctatattaattatgcacaggcagttagttaaccttctattcatactttaggttgtgtactatttatcaagacacactagggtatctcatttatagtacatgctataatatgcgagctgttatttattcagatcgcacttagctttgtgttgtttatgagacttaaaaatttcgcttacaactgctattttagtttctactttaagaagtgtttcaaaatattcaatttttatgctgttccagaccagcttttaatcaacatcctttctttttgtaaaaaaatttattttctagaccttagcgagcctagttctttaaacatacatctctagttaaaaatttagtttgttgtgtatgtatatgcccctcaaataattttaaagaaattaaattttatgattacttgaaatattcaaatctttattaaaataaagaacattatttacaacattatttacaaagataaacttaatttgacaagataaactactggtaatacgaccgtaagtgttcggtgttctagtaattttttattagcgagccgttaagtcatgctaatttataaattccggttcccactacaactttaaaacatacgaaccttcccattttaggttgaacacttctgctaatgggctcgcgtatttgaaaatacgcgtcttaacaccaaatcttctactttaaagagtatttttcgaactcttttattaaagtatctagtgatgcggtgttgataagtagcattgattatctgtgacttgctgtgtttttcttcaagcaaatccaaggacatactgagaagttcttagttttgttcctgattgtagaattcatgctcgtgggtcacaatgtttacttctacagttaacattacttctgagccaaatgccaatgaaaatggagtgtgtcccgttacttttcttttgtcgttctatttgcccagagtacttatggtaactcgtcaacccatctgcctttggatgcatctaacttcttttttatagtgtccttcaaggttttattaactgcttctacttgtccatttgcttaaggtcttgatactgatgagaagcttttgataattttattcctttcatagaacttagtgaataagtcctcgtcgaactaagggttgttatcagacactgttttaattggaatgccaaacctacaaataatgttcttgatgacaaaatcaagaactattctgcacgtaatggatactaaaggttcaacttctgttcattttgtgaagaagtcgtctgctatgatagcatattttgtgccatctcgaattgtgggtaaagacccaattaattcgattctccatattataaatgggtacgacaaggtcatcattctcagctcagtgggtggtactcgaggtatatgcgagaatcgttggcacttgtcacatcgtttaacaaattcatgtgtgtctttgttgatagtcagctaataataaccttaacgaattattttcttagataagctttgccaacctgcatgatctccacataagccttcatgaatttctctaataatttcgttggcttctgttgataacacacatcataataaatgcatagaatatcctcttctgtataattttccatcaactattgtatatcgaagaattgtgtatagaagcttttgtgtcttggttttgtttgtgggaagttctccatttaacagatctttgacgataagggtcattcatgacgggtttacatctatcatgtcaattttttctttctcacatatacttggctcgttcagtacctccaccagaaccaagtttaatttgtcgaggtcaaattgagatgccaattttgccaaagcatctgcattagagttttgttctcttggaatttattatattttgaaataaagttttttcaaacttcctctaattatttggccattgtcaagccttttgcttagtattctcccaaaatttgattcatgaccagctacaaagcaccaaaacattagtattttcatttactacatatttctctatagttcggaatatggggtctaagtccaaatctaaatcaaagtctgagtcaggtataaaaaattaagtagggtaggaaataataaattcttgttattaaaaaagggacataataaattcttgcaagcttgacttgccttcaaagaatctagaaaattttaatttcaaattttaaatattaaaatagcaaacacaccactctaataaaattattaaataagatacacatcatacctcattatttacattaatttacatggaaaaaaaaatgcacattgtcattttctaaaaggagaatattataagtgtataatataccttagatcaataatctaatttttgtgttaaatttgactaaaaaataaattaatgttatatttaatttaaattttataattattaaactttatattaagagatcaatataaaatacgtataacaatgaaatttatttttttattgtacatataaaatatgtttatataaaattacatctaaagagcacactaatgtagccgcaatagctaaaaaaaatctcaaaccctattttaaaaattacaaaataaaaaaatattacctgattaaaaaaattaaatatacatgtattgcacttaacatcacctaattaaaaaagaaaactaatcatacgtgtattgtatatagcatcgacctagtatattaatgagtggcaaaaaagtaaacacaaaataatatttattgtggtataaaatatagcccatgttatatattctaaatttaacataattttttttttgactgaaaattttaatctttattagacttgaagatccgccaccaagcaaggtagcaagtcacttgaaacaaactccaaactgaaatggcaaccaggatataatctagcagttttagcaaacgtgtgagccactacattagttgattacttaacaaaagaaataacaacattattcaaatttgcaagcaaatctttacaatcttgaatggccatactaaataaggaaatcattttaatcgagctttgaatagctagcaccacacacagagagtcagttttgatgaagatattttcccaaccacatctctttacccaattaagaacctctcggataccgattgctgctgcaagagttttatccacatggcctgaaagaagcttagtccaaccttctaccaaaaaccatcaaaattacgagcagccacacccaaaccgaaactcctaccgccattaaaaagagttgcatcaatgttaaccttgatactattagcttgaggtaaaggtcaatgctcattaacatcactagcctgaagaataggccatgacgaatctacagatttttgagcacttttccatttatcaaggtacgaaacgcgaacgcaacaatgtcatcaggcaagaaggctttttctttccaaaccaggttgtttcgagctccccatacaacccaacaaacatctgctacaagattgttacaaaagacattcaaacacaactgaggaagcttgtaccctgaacttgcactattccaatgcccacacttcccaacatttcttagtctcacgacaagcaactagcacatggaagatggactcgtcctcctcgttgtagataggacataacgaaccaacaaccacatgttttgtccgaagttgaacaatcgttggtagacaatccgtacacgcacgccaaacaaattttggatcttcaatggaagcttcaatctccagaacgtgggccaaaaagagttatcagaggcttcaaaccagtgtcccttgattttctgcagcagggcatatgcatttttgacagaataaaaacccgagttctcatttctccaaaccaaatgatcttccacttgtgaaacattaagatgaatattttcaataagctttctatctctgtcattaaaaagatcattcaaaatctcatcgttccaagcaagcttacctggtctcatcaagttgtttacacgtacattacaaagagcagatgattggaggtgatgacggggttatcttcactggggagccacggttcaccaaggaccatgatgttaccaccattacccacacaccaattaacataactttttgtatatgtcaaatttaaatcatattatacattactattattattgaaatttagtttatgaacatggactaaaaaatatatacacactatatttatgttagatgttcttaaaagatgaccttagctacatcctattttaatatttaattaaaagagtttttttaataatttctttattaaggaccatttataaattttcttcaaaataatttatactatttaaaataaaatttaaatattttttaatatgctaattaaaaatgacctatcacatattcaaccaaaatatgtaattgtttttttaaattttataagtgatctaattcaaaaatatttttttttatttagagaaacatatgaagatacacgtaataaattcgggagtgtacaataaacttttctaaaagagtaatttgcggcataacttccttaagtggctaaatttttgcaactaactcccaattctaaaattttggtggtaaaacctcctaaactcaagttctattagtacttagccctttccatccatttttggctgttaactgccatggtggaaagtccacatctttttacgtgtacacagtgtacatgtggcataattttattagtccacgtaaataaatatttaaaaaaaataaacaaattaattattataaaaataaaaaataaa

SEQ ID NO: 27513 - DNA, 2044 bp, Cannabis sativa
atatcattacaaaaggatcagttagccttttaagtacatacacttgtctatacatccttgattccaagctccacacttttacttcacaaataaacaaaaaccataaaatttcaaggtctttcattgtgcaggactaaaagaataattctaaaggtttttcttaggaagaattgtctcccaaacagcctcaatttcttcttttgctctttcaaatatatttggacccttaacctcatcaattggggtgttctcgtcaatgtcatcactcgtaccatgggtttctctgtgatgctggtgtggagacttctcatggtgtatgatttcttcaatcttttgcttggttttctcaataaaattgggtgtctccacgtggatctctgcaaaattccagtgaacaaccaatggtgtggagagtggaaaacaacaaactaaaccaggaaattctaaaaaacaagcaatgcagtaattagtaaaaaagctcaaaagagttcacttcaatgaggtgttttagaaaaagtaccacaaaccatgtcatgtcatataaaatcttgctcatgacaatgttcagctagaaaagctaaaagcataccaaacccagtggaacaaaatatcttcatgcattaatgacaaagcaagtagacatagacaagcgtaagaaacatattgatacaaagaacagaaaccaaaaccatacagtgttgacagtattagtgatagttctttttgctccaattaataattttcatacaggaagaaacaaacattatccaacaactttgtactaatgactacaattttcatgagatatacctaaattagacatgggtttctgctgattgtggatctcctctctatcttcacccctgccatcacaataattttccagcattggatttcaagaacatttataaatatatatataactctggtcttagtttggatctttgacagtaccttcctccacgagttgaagactcctctttgagatggattgtatggattaaagcttcaacctcttcttttgctcgctcaaacaaattaggagctctaacatcctccaatggggttttcacatcaatatcatctctcaatccatgggtctccttgtgatgaacatgtgctatctcttcttttgctctctcagacaaattgggtgtttgtgatttatctaatacaacattaaggttattgagttatcatcatttacacgaaacaacaaataaaaactgaccaatagaaatacacaacaaatggtaaattgattaaggagaagaaagtggttaatcggtacctgatggagggtgggagggtgaatcgattggtgtttgaaatcctccaatcctccattgttaatgtttggacgtgatcgatgggagaagttgaaattggaattgcagtttggtaggactctgaagactcagacaagttgtaaattaagaattgcaaaggcaaagaaaaagcgaatatgacagattggacaattgcaacgtttggccccactttagtagtttattagcggcggcgggtatcccatctatatccacgggaaacataggttgttttatgccacgtgtcatgcagttaaaggttagctcttttagtttgacaatataaaattccattaaccattggatttattttaataattaattataaatatttaaaatatttgtgtgcagtctttaaaaatatacatatatattgtttccttctcatcatggttccaatccaatgtaactgaatgaaaaaattgaattgggttggattttaaaagtttgattataaataaagagaattgttaaaaaatattattaatgcgtaacactcttttcaatgtcatataattattggcataattaattattagttaaccaattatgatacatcacttatagaaaatgttggacatcattgatgctcaataaaagtgctcataaataaattatatcggctaattaataatttttctccccgaactttgacatatactaaatcgtgccacctgaatttttttggccgttaaaaattcccccgaactattgag

SEQ ID NO: 27514 - DNA, 2988 bp, Cannabis sativa
  modified_base (987)..(987): a, c, t, g, unknown or other
ggttgttcatgatttatttatggatcaagacactgatttgatacttggcattctccttagtgaatctgctattttggatcattttttttggtctaaaaaaagtttgggcttctactcagtaaagagcgcgtatcattatttgcagcaacagaaaaggagttcgagtttgagagaggattccaagtgctggagtcatctctggaagttgaagatccctccaaaaattcaattttttctttggaaggcgcttacaggttgtctccctactcgcgttcagctcctgtaaaagcatgtacccgtgcaaactagttgtttgttctgtaatgttacaactgagtccatctcacatgtgttagtgaattgtccatttaccatttcttgttggaacctcattggtgtagactctcggtatctgcattctgcagattttttgtttggtttgctgggctgtttgagataatgtcaacatgggcgctgggtcataactgccttcagtaaaacgaacataactcattcaataccgatttgattgatgcgactcaacttgcatttcaaagctatttcaatgcttcatcaagtaatttctcacactataattgcaattctgaagctatcaatcttaaatttcaccccaatagagttacaaaaatatgcctaagttacccgtaacgggtcctatcgggtctaaaaataaatatcaccatcaaaagctaatataccattagatcatcatctacggtaaaaaagatctaattttcatttttctcctatttttttgggactccttcaactataaaaggagaactccgcttagctcatttttcatattcagaaaactacccacaaggctagagcttctgacattagtcttttttttttttgtaattccatcttgtgagaaatgaaaattcgaagtagatgtagcttcattactgtcgcgatacatggactgaaatactataaaatttgttgtgtctctcttataantacttaacaactatttcattctcgccaatctagggagcgggtgtggcttataagtctaatccagatttctaaggcaacgctaaagggttggaaaatgaaaacatttttaaaaataggtcgtcccatgcttcttaaatttttttggtctttcccttctgatttataccatggaaactacaaaactttcttagcaggtggcatccaaaattaatcatttcatctagaattttttatgggaaagcgagaaatggaacagtgggttatgtctcaaagcatgggataaaatctgtctttccaagtctcagggagggttaggcttccaaaaaaaaatgagatgaattgagcatttctttgaaaatggggatggcaactcattaataaggttatgatgcaaggttcttacaaccaattatttaaggataccccttttttcaatgcaattataagaattatgatttgtagtttcggaggaatgtggtaaaggttaaaaatattttgagaaagggtgtttgctatgggatagttgatgggaaagatatctatatctgaaaagattcgtgagtggctcatgataataatttttttttcaattttgaatggggttcctacttcaagctttatgattgtgtcaaatttattattacagaatggggagtggaatctttgtaagctgaattggttgtataatcaagatagtgttcatgccattttagaaggaggaaagccatcaggacaagggagggatcattgggtctagattaaggaactcaatgataaattctccaccaaatcttcataccttttagagatcaacactatcatgttgctccctctttgtggaataaactctataatagcaaaatgcttgaacgacaagatattttggtacaacattctatcaaatgagattcccattcggtccatccttagagaatgaatagacattgaagactcataatgcccgatttgtgggagagaggaagaaacaatggagcatcctcttcttcattgtaacgtggcttctcatatttggagagcatctgcttagggtctcattcctctacggggattggggactagaatgtgggaatgagtcaaattcatttcaagtttgcatgagagagatgtgaatattaatgatgtatatttatgtgtcaatcgtagttaatactatatgaagagcacgaaatgacaacgtacataacaaccatatgcataacatactttattatcataattttaatgctcattggtatatagaatgtagtcactctctcttgtatcaattacaatcatcccatgctatcaatgagtagacccttctgcctatgaaatggatcaaacttaactgtgatgtggcagttagggagggaattgtgatgctggcagttgtggctcgtgaccatgtagaaaatatgcttcgagttggtaccaagcgactggttttttctaatgctcttagtggggaagtatctgcttgtttgttggcactggaacttgctgtgaagaaagggatgcaatttattactctggcacgtgattcgtacatagttattgaagctctcaagggttcttattcaaggtggaaaattgacaactatgttactcattgtagaaatcttatgaattcttttttaggatgtaatttttcaaaagtttcaatatcgttcaacttttttgctcacaatttagttaagtgggcatttactcaatatgtaactgatatttttgaagcttctataataacgaacaatattgtttgtaatggcaattaggcgtcatttatttttatttatataatttccttttttttaaaaaaaaatgatgaatgtatcgaattttgccttttttttttttttttgtgaatagatttccttagttgtctttattagatttatgagcatagttatttttgacattcatgctagcacatcttgacgctctttaattagttagtgaaattttatactatttaactgataaattaaaatgtttaaaaag

SEQ ID NO: 27515 - DNA, 2516 bp, Cannabis sativa
  modified_base (2449)..(2488): a, c, t, g, unknown or other
gtggccttttgtagttttgaggatagacctggtagaatccctccccacaagaaaaggaagagtcaaatacgaaattgtcgcggttgattatttcattaagtgggttgaggcagagccaatgaatactatcacctcaaaaaaggccttgaattttgttattaagaacatcgtgtgtcgatacaaacttccatacaagattatatccgataatgggaagcactttgacattgaaacacttcaccaacttttgtggccaacatggaatcatgaaaagcttctcagttgtagctcgactgcaggccaacagacaagttgaagtcgtgaataaaatcttgaaaacaatgttgaagaaaaagctccaagcatgtaaagctcattggccagaagaacttatgtgagttctttgggcctacaggaccatggagagaactttaataggagacacgtcatacacaatagcttactgatgtgaagctgtaatccttatgggggccatggtcccctctcatcggcgagacacttataacacttttcggaaaaattccttgctccaagaattattaggcttaatcgaagaactttgggaacagtcacgggtccaacttaaaatataccaaggcaagatttcatggaactttaagtccaaagtgaagagtcacacatttgatgttggagatctcatcttgagaagagtattcccagctttgcaagaatgaagagtgggggtacttggcccaaatttggagggcctatatgagatacttaaaaaagtaggccaatgaactttttcagtttagaaagaacggatggatcgagggtccctaattcctggaatgtagaccacgtacgttggtactactaataggccgaggtgaccataccttgattaaatcccttaagctttgtgtaaatttttatataattccttctttatgtaaaacctccaggcataataacatgaaaataaaagtattttacatttaaatttacgatttatgtttttaagccacaaactatgttttaaataagtgaccaagaagttggagatgtccaaacttctcagctcacttggggggcactatgcccaactatgtatgccctcaaaaacgtatagtgtgctatgtttatttactttgattgtgcatattgaatttttactataacttgcatttaaaccaaaaacaagatgcattttcaaccaaatttcccaagggaaagatacacttgaattccttcttgagatcaaaaattagtgtaaattctgaatgagatgcattttcagccaaatttgccaagagggaaagattcacctaaattcattctcgaaaattttagtgtattgcctaaggtttaaattgattgggatctgagaaccttgaaccgatccaacataaacaaatggattttcaccctccaattggaacgttaccattctctgcttgcagtcaatgctagctgaatacttggacaaaaaatctatcccaactataatatcaaactctattaaattcaattccactaggtcaacactcaactccctatccttaattctcaatggcataaacctaatccacgttttagagataacaaattctccgttacgtagtagggttccaaaccctaattctatgaaatcataaggcctaccaaattttgaaattacttccaatgccacatatgaatgtttatccccagagtcaaacagtattgaaaagtaggagttgttgatgagaatctaacctattaccacaaaaggactagctgcagcatgtgcttgtgtgatagcaaacatccgagcaggtgtgggttttgcctctagtttctactcttcctttttcatttgaggacaatctttcttgggattcccaactatgccacactaaaagcatgtccttcgagtacattctccatgatggtgtttctcgcatttgggcacttaggataggaataaccctgacatccacctctaccttggtttccctggaaccttttactctgacttgaaccacctgacattgggaaaacattcttcttttgatcggtattggaatcaccaccatcccaaccataaccagaagtaggaagggtggtgatccactagcacttggagtctctcggagctcctgaagaaattttactgcagccttgactcatagagccttgtcaaccatctcagggtaactagttgtatcatcggtcttaatcaccaaattaggcctaatcttggtatttagacccgccaactatttttctttcttgttgaagtctgtaggcacaattctcgaagccaacttagcaagtcaatcaaactttattgtatattctcttttactgacatggcctctccctgaacaaattttgtaaactcttttcgcttagcactgtggactgcttcattgtaatatttaacattgaacagatcccgaaactgttggaattattttactannnnnnnnnnnnnnnnnnnnnnnnnnnnnnnnnnnnnnnnaaatatgaacttctaaaacgaaaataaa

SEQ ID NO: 27516 - DNA, 3103 bp, Cannabis sativa
ccagggtctcgtgtcgtctttggatgacaatagttggaattagtctttttgaaagagctaaaagaaaaaaaaatagtaaaattcaaacataaaattctaacttagaattaaagtttgaaataatgaatacttacatataattttgtagtggtgttgcttggatgaagcccgatcgtccaaaaaaatcatgcttgaactctttcttatttgggagtctaacaataatcttattatcattagagtgagtacccagatagtagaagccgcttgagcaattcttcctcgtagggcatgccttaagggcataaaaacacatcatctcaaaggggttggatactcctatcctaagatgtggtaaattgacttcaagcaggctaggatcctatatgtatttgggatgagttgaaagggtgcgaacctgacataattacaaaagtccttaaagtactgtttgagaggaaggacaaccccagctttaacatgctcaacactccaagcacctatccttgaagaaccactagtgctgcaaccctcttcattcgacgagcgagttggaggaaagcaactgaatttgccttgtgtgaccagtcaaattcgacatccttcctcgttcttgataccacaagaccttagaaatggacccgcatatggggcaattaacctaaccttagactcaatcagttgagcctcgaatcggactaaagggttttggggtaatttagacttgcgctcctttggagacatgaagtcaaagtttaaattacatggaaaaaaagcaacggtaacctcaggtaaaaataatggtccctctaaaggatactttgttaaactagggaattttggccaagctgcaactcgcaagaagtgacgcttcccatcgataacctcgtcaataaaatgtttagagtgagctgaggcatcttctcggtcgagtttttcattgaataacctaattctctcatcgtttatttctaaaattatttttgggtgttgaagttatggtttgaagggtaaggcaagaattctaaaaaaaaattcttttcctaaaaaaaaatgttttaggaattctaaaattttgaaaataatttaatttagagaaggggatttctaaaatctaactaccttattacttcagggaaaaaatcgtacaagaacatacaaaagttaataaaaataacatagagacaaaaaaggtaaaaaaatcaaagacttaccgaattctgggtttctctgagggcgttgatgatttcttactggaaatctccgatactaagggtctgggatgtactgagagcgaggtttggaaatattgttaaggcatgcaagattttcaaaaatctctgaagctgaaatggatttttttctctggtttggtacttcaaaagaggtaattaggaagacgatggtaaaaaaatccttttatatcaaaaaggtaaggaatcgttgatctagttcaaaattggattaaacggttagggatctgtctagggaatacaaaaagataggtaaaaagcccgttagatgaaaggatatttaattaatgatcaaataatctttctctagaaaaataaatctgccaaagaaaaacactcattaccaatcgagaaaagaccaaagtgacccaccaagaattacttaaaaaaccctttcagtttcacaaagaactttttagggggcaatttttatgtccatattttgagccataaatatgggcgtgacacgtggatattgctctcaaaaattaaggaaacataaatacaaaagttatcttatctcgggatgtgctactatcaatgatgtgttgtctcacattgtattatattatggctatcaattaaaaacgataaaattatacatacagtgactagcgaggataacaatatcttgagttaatctcgaaacttaactaagatgtatgaggcttgcataaaacattaaaggatgagttaagtggaaatggtagataatgagttgtttaagaacttgcaatttattgacccacatactcgtgagtatgttgaaagactaagggccatggtctagagaaaaactttctcgccatttccatcaaatgtgagaaaaacaatcaagagaaacacgctttagatcgcttcctaatgatacgacgggggaaaacatcaagttgtctcgcaatgttcatctctattacaaaaggatgcgagacaactctaaacataccacttcagcgaaaacccattacttttagataaattaaaaagcggttattagcagttatttttatttatcacacatgttgtaaatatgaaatgtggagattgtctacgttccatagacagttacctagataagatcaagatggaataattgtcgtttcaaagaatcctataaatagggacaaagtcctacgaagaaagatttccattttttttaaggaaaaactatgagagattaaggaaatatccagagatgttctcttgtattcagaaacattatagaaatataatcagaaataatattgactcgtgaagtatgtagatttaattacaaaatcacgtaaaatttctttatattttatttatattcgatcataattaatattttagttttatttaaaaggctttattgttgtaacaaattttttgtgttaatagttagaatgacaaatttgaacttatttatttatttgttatttatgtgggtaaaatatgttttaatagataaaaaatattaatatgtcaagtaagattaagatgatataaatatgacatatttaaatgttatatcagttgtgttctatcatctgtttacctatttataaccatatcgtattcttataaagtatgccactctctgcgggttcactatgattagcatctataggtgtgagggttaacccaattgtcgagttcaactactttagtaatcctgttgatgtggatcagtgtgtgaatgacacccgcaagattggtgatgtattgaggagttgttctatggaggttttcaaattcagggaatgtcttgggggtcgagatttcaaatacgtggggcctgcatagtccgttgatcaatcaaatgatcggttgatgggagagttcttgcacagtgagtactatatggcact

SEQ ID NO: 27517 - DNA, 1574 bp, Cannabis sativa
tttagggttccaaatcgcttcccctaattttcaatcgcagttttctatttataactaatttttaggattcgtcggacgaatttacccttggtcgtacgggctctcgccgcggccacaatgttcctcgctgcggccagatgagcttctgaaaaccgtgcttctattctgactttatggccgggacgaaggtgtatctcgtcgcggcgactggggcatcaaaaattgtgtcctctgtcttcaagttatggccgcggccaaaagtgcattgaacctaaaattggcatttttcttggctccgctcatcttttattgcactcttgcaacccgaggcctctattactccgaagaacctgaaaacatataaaacacgcataattccgtcctaaaacaacgaaaagtgaacataaaattgatccaaaatataggctaaaaatagcctaacaggcacaaagtaggagaagtttgcacaaaccattatcggtttgttgtttctacgccctcttattttgaggggaagttttatggttttagttttaaatcctttatgttttattcgtgttagtgcttgtattcaagaaaggtattttttatgtatcgttaacatgtttgttacagggttttgtaattaattatgtctatcaaattgcaaaagagggagattgtaaagtctttagttggtatatttggtaaagatgataaaattaattatgtttggtattttcgaaattagttgtttattacatttaatttttgtcgaaaatagtttctcttttcttagtgtgaaaagtcttttgaataaatatatatgtgatttccttatttaaatgatttggtatttactttgtatatttaaggaaagtctttatatttatttcattaattctcttttgatttcttagtcaagaaaacgtgtaaagctattttttaatgtatattttgttatttttctttatataaggaaactttttgctgaaaatctgtccaagtacagtgaatctatttgaacggattgacattctgtttgaacagattatgcttttctttttgagaatattttccatttattattttattatttcctttgtagtaaagcacggcctgttgtgtatttattgagaatatattgtttctcagtttgtggctttatatggaaaaaataaaatattttattatataataattatactatatctatatatggtatttatttataattaatttatttgattcctcctctgatatgatctcattcatctctacagctaagttgtgtgatgtccaaagaatatttcgtggtaatgaacttggctttaatgaagtctagattcacaatgttgactagacagatcaggatttcgtctgcacactttccatatctattcagacagaatttcatcatttaatgagtttttgtaaggaaactaattattttttttttctttgtattcagacctttggagctcggttttaggggtcatttatcaatctaaatatgacctaaaccagcagcaaaaggttgaactcttccacttcttaattttctatatttttagaagagattttttttttttttt

SEQ ID NO: 27518 - DNA, 2252 bp, Cannabis sativa
agtcaaaaattagatccatgttgcgccatacagctttggcatatttgcatccaaatagagcatgcccaattaattcccacgcttatttgcaaactgaacatgttgagtccgtgatgatcttgcgcctcaccaaagaagtagcaactggtagagcattgtgaataacccgctaagcaaagatcttgaatttttgggggagttgcaaggaccagaagtacttccaccaagaagcttgtgagatagaactggagcaattattagcactagcatctgctatagaggttgcaagatggtacccagattgtaccgtgtaggcacttgatgtggtatagtgccaaacaagagcatctgaattctggaaaaaactaagaggcagtgtcaagattcgatccacatccaaaggagagaaccattgttgcaggagagggacattccaaactctttcatctgtgattaaatggctaaccattgcattggcaggaccagaaaaatggatgggagtgaaagtatcttggccaggtatccaagaatcaagtgcaacccgaatctgccttccttcaccaattttccaacgcaagcctttaatgagtaactcacgtccccaaatgattccttgccaagttaaagaggggttgtgaccatgtggagcatgtagaatatcattatgaggaaagtaacgacttttgagtaattttccaagaaccgaatctggtttctccaacaaccgccacgcttgcttttccaacaatgcttggttaaattgttcaaaagatcagaaccccatcccaccatctattttagatttacacagtaagtgccatgctctccaatgtattttcgatccattttcattcgatccccaccagaagttagccatcatagattctagctggttaccgacatagactggaagtcaaaaacaactcataacatatgttggaatagcctaaaccacagctttaagaagcacttcacgccccccagctgaaaagattttctcattctgattgtgcaaaaggcgccaaatcttctctttaatgtcactaaacaggtgttgcttgtcacgaccagtgtatgatggtagacccaaatatttttcatggcattcacagatgggcatggagagatgtctgtgaaaaagaatttgtgatgccaaggtggtgtttggagaaaaagacattaccgacttatcatggtttagaagttggcctgaggcacggtgatagatgtccaagactttctttatagcaagacatgaactttcattggcatgacagaaaaggagactgtcatcagcaaaaagcaagtgagaaatcggtgcagcgtttctagtcagcttaagcccagtcaatcgtccttcatcttcctcaaattgtaacaatcttgagaggccctcggagcagatgaggaacaaatatggagacaaagggcagccttggcgtaaaccgcgagttggggtcaaggatccagagacttcaccattgacattaaaagagaaagtatttgttgagagacaagtcatgataaggttgatccattgttcagcaaagcccattttcctcataacttcttgaataaagctccattctactcggtcaaaagccttactcatgtccaacttaagagagacaatctgtttccttcccgctgttctattcttaatggcatggacaagctcgaaagccactaaaatattgtcagtgatgaggcgatttggcaagaaggcactttgagtttctgaaatgacatgtgggagaacaactttaaatcttgcaacaagaaccttggtaatgagctttgaaatgacattgcaaagggtaatcagtcggtaatctttcatgttctatggctttttatttttgggaatcaaggtattaatggtacggttcaagggagttgggtcagctccatcattgagtactcccagcactgccttggagactaaatcccccactaaatcccaatgtttttggttaaacatggcggacataccgtcaattccagggcttttatccggactcatacttttcagcgcttcatcaacctccgctctagtaaaaggctgagtgagaccgtagttcatatcagtagtgaccatgacagggattgtttcaagagcagaggacgttgtagcatcatccgttggagaagcttgaaagatattctgaaaatactcttcaattacagagaccaaatctgaacgtgagtgcactttgaggccaacatcattaattagaaattttattttgtta

SEQ ID NO: 27519 - DNA, 2362 bp, Cannabis sativa
agttccatgattcatcaataaaataggcagtcaaacacatataatggagattttgacatgaagtccatgtatcagtggtgaggcaaacacgttggctagacttagttaacaaatctttcaatcttttcttctcagttaaatagagattaaagcaatctctagtaactgtggatcgggaaggaactttaaatctaggctcaaacaaattcatcaaatacctaaatccctcattttcgacatgactaaatggaagctcatcaataattatcatcctagcaatgacttctctaattttttctacattatatatttgtgcagtgagttctacaaccccacccacttctcttttttcacaaaaattcaatgtcttatgcttgttatccatgttagaaggaaagaatttgcaaacacttatgtgtgccaacaaatttgatgtcctattttttctatgaccacatgcataatctttcttgcaatagttacaaatagctctaatattatctttatccttcacatcttttgtgaaatgatcccaagcaggagatggaggtttaacaagtttgcgtttagttggtaccttaaagttgttatttgtagatgttagcgatggtaatttatcaattgatggtcccataggaaaactattagagctcatcattatatttgcagctccacttttgttaatttgagaactatttgcttgaggctgactttcattgatgaactcaattggagatggaattccaatctgttttgatacttctacacaatcatctctctccatctacatctacatacataacaaactaatatacatatatgtcaatatgcaaaccaataaacaataaaatgcaaatatgaagaacacaaaacttaaactctaaaataacataatcgctgaaaaaattaagaaatagacaatgaaagttatatcttaatacagttattacgaatcaaacatataaagtttcaaaatgtggtatagcataatgccagtttatgtccatatattatataacaattatttttcttttttcaattgatcagttcttccatttatcacaaagtgtggtgaattggattcacctcattcaagaacacaacaactagaaactcaattaatcacagtaatgtcaaatgcacgatcaacaaaatgattaaaacaggaaacttaagagcagttaaataagtgattttggcatttctctcattctttttccttccactcttttcatcttttcgaaaatttctggcaaacataaagtatccaaaatattatcacaacagcaacacattgtgttatttattgttagtataataaaatatcaaaattaacttaactatttttatttaataatgtaataaagattgacatgatcgaagtaaatgcaataatgctttccaagaagaacttcatgttgaaacaaacattaataaatagtatcagtattttgataaattgtgtttgaatagatggtagtatgaagcaccaaaagcaacaatcaacacctacataaaaaaatttcaaacccacatgctcactttccaagctagctcctagctatttgaatagaaccattatcatatttcaaacaacaaaatcaaaaagtgaaaaggaagaaagacattgccaagttaaacatggtaaaactttcactacttaagcaacaaggaacgataaatttgaaatcacgttaattcagacacgagtgtttgttgatgaaacaataacaagcaacctcttgcagtgtgcataaacagagcttttgaacgcgatatgggtagttacttacatcaaaagcatttcattatttatattatctaataaaaataaaaaagatagatagtagatagatcatttcttttacatcaaaagcataaaattatcataaatcaatataccaagcacataatagaatatttctttcaataaacagagaactatgacttaacacctgaaacaagagcattaggaaactagcaaaacagagaaaacacaagcttggactacggttcatcagaaaaaatgtcaacactgactaaaatattagagagagagagagagagaagaaataccgttaaagagatggtcaactgaagagatggtgtcgatttctcaggcgactgaagagacggccgctgttaaggtgactgaagtagaccgccgactgcagatctagactggtcggcaagggctcagtcgatttctcagtcgttaggactggtggtaggagatgaaaacggctgtaggagaaagagaagaaagtgaaacgattattaggtttagaattttttaggtcagattattttatatattattactagaaattaatattataataaaaaaactactcttttattt

SEQ ID NO: 27520 - DNA, 2014 bp, Cannabis sativa
tgtaaagggttttatttagggcacaaaacccaacagatgtatcatgagagaactaagcacattgatgtgcggcttcacttcatcagagatatcattgcagaaggaaaagtgaagctcaagaaagtctcaacggaggacaatgcctcagacatactcaccaagccacttaccactgccaaattcaaacattgtttgaatttacttaggatcactaccatctgtgatctttaatcctctgtttactgttgttttcttttaaaactcttgtacattcctttgtttacactgaataaatcaatcaaggtggaaattgttaatatatggtcggtttattcagttaggatattttggggaggttacttagttttcggttgggcttttctatttttggataagctatatatattgatcacatgatcccttatgatgtaacttgtattcatcattttgatactaatcaatataataaaacattactattttcccaactctctctctctctctctctcgtttctttctggtttgaagaactgtgttcagttcaaatgtgcaatcatgcatggtatacagatctgtggaagtcgattgtttcccaacagaattatatgcaataaattttttaattgattttaaacgaatgatgatcacccatgcctattcatctccaactttgaatttgatacctgaccatcgttaaccactgcgaagctagcaaatatatatgaactcaattccacccaagctctgaccattagacgccgcaaaaacttcgatcctcaatcccaaatgcacgaagtcctctaatgtcgtggttatgcgttatggtagaccttgcggaaggtgttgatgctcctcaatgcaagaggcacgaagtcttccctagtcactcatcttttctcttttgttttacttttaattcttattttgtttgttagaataaaagaaacaaaataaaatagagaggaataatcatgtgtcgtttataatattttaaatacaacattaatggcatgtttgatttgttgtaatgtgaattgtaattgaatcaaattatctattacagtgtttgtttgcttttaaaaatgatgtaatggaattacattgtaattataattacattctataagggaaaccctattacattaaaaaagctatgtaatgagaattacattacaaaagactaaataaactaaagctaaaatgactctaataccctttttatataaatataaaaattaaagtaaggaataattttgtcaatttattatttattctaatattcattttaacaacaaactaaacatcttaatcaattctcattactatttttattccattacattactattactattaccatgactattacattccaccaaaccaaacattacctaagatgacatggcgtatacatattggataaaaaaaccttggggtttttttttggacaccccatagaagaactttgctatatttatgtatatacacaaagataaaataaaaatagtttgagaaaaataatagagagccagagagagaaaaagaaagagtgaaaaaaaaatgaaaaagagaaaaaaaaaaaaagtcaccaactgagtttaaaaaatagaaagaaaaaaaaaagtcagaaaatttactttaaaaaaagaagtattctttgtaaatactctattatttacaaataataagtaaaaaaatagtaaaaaaaaattaagtagagaaagtataaatgtatttattttgtcatagtataaatgtaaagtgtaaagaatagttagtattctttgtaaatactctaatttttcaaaaaaaataaaataatattaagaatgcaaaaaaaaaatgctttacactaaaattaaattggtatagattcaacatttaacactattaatgatgttaaatttagtgtacaacattttagtgtataatttggtatgctattggagtgaaatagtgtaaagattacataccaatttaataaaatggtgcactaataaaaatgattttaggt

SEQ ID NO: 27521 - DNA, 3102 bp, Cannabis sativa
tttatctccaatggtatagcatctctatattttgccacataagctttccacctcatcaagcattctccaaaatattactattggagatgctcttaggcaccagtagtgatacccctaaaagctattatattaaattatatgagacctaatacttaattggatcaatagtaatattaacacatacgaggtgctaggtactactggtgccctttagtatttttcttttaaaaaagtactaattataatctcatattataattttttagtcaattcctacgttcgaaattacatgccgaaatattttttcatagcggtattcatcatacagtatcaaaaatagagtttctcatattctaatttaccatgcgtattcaaagtattttcgacacgataaattatttgaatttttttaaaaatttacagaaataatgttgtaagtatcacaaataccgccgtgaaaaaaattgaaagaaaatattctaacatatttttttcaaacatacaaattaattaagaaattgtaacaagaaattaacggtaacactctctaattttagcaaggaacaatccttctttacgttacgccacttcgtacttggttcttcgtttcccattccaacattatttcacacgcttcactgtccaggtccagcccatcaagcccaaatatgaagcccgttatcgagattttaagagaattgatcaacataatgtttggaagttgaggattggaaaatgtagaaaagtgatatgtcagacaataaaaattataaattttcaagtttgatataaaaaattatgttgaacaagtttattttgttttgcatgcaattttaatttcatgctaaatatgagatttttcttttcttacttttctatttctgtactaaaatcaaacttcaaaacatagtcaaagtattttaggagtgctcaattgtacttctttttggagttaattcggaaaatttatatcccttttggagtttatacctttctcgattttttttttttttaaatattacaaataaaaaagacaagtaattaactataaaactacaatttaaacaactatttgttcaaaaatttgagaaattaaaaattaggcctgagttggcaattcgtgttatcgtgtcgtgctcgaatcgatacatttatagcacgaccaattaaggtaaatacgaacacgacacatttattatacgtgttgaaacctcaaatacgaatacgacacgattaatttgtagttacacgacacgatacgataatacaaacacaacaagattattaaacgtatcaaaaactcaaatacgaacacgatacaattattaaacgtcacacaaatctatttattttgtgtcatttttgagttgtgtcgtcatatcgtgacccatctttctagcccaattaaaactcataaagccaaatacattaataattttttataaatttgaccgtgtgggatcagtcctaagaagctaagctaatatgttattttgtttttaaaactggagaccatatgatttagttataagtattgttattaaacacgaggggtgtttaacactgttgagaacttgagaatcatggggctacatctcaaaactaattggtaatgagtggagtagttcacgttattatgtatgtttcaatactttttacatttaatccatgtgagacaatattctccaatatctcccctcaagatggtggctatttttgctcaccaatcttgaattaccttatcacaagtcatgttaggtgtagatcgaaagcccactaaagatatgactctaacaccatatgagagaaacagacaaaaagcaaaaaattgtatctcaattttttattgaattgcttgagctaaatatacatgagccatttatataggcaatgaaaacaaagtcagttaggaagagaagctaaccaacttaactaacttgcttaactgaaacagtaaaacctaacaactaattatcaaactaactaatctaactaactctaataaacatctttataggtagtgctccatgattggttagcaatattatttaaaagttatttttctaaattatacgagactcgatacttaataaaaacaataaccgtatgacaccaaagatagtactagacaccaataatacttattagcaattctctttagttatgcatttactcacaacccaaagaagagtctaattaatttgtctctcagttgtattttagtattctttcagccctagttaattagttcatttgaaatgaaaagttgactaattgttcatctcttctttactatacttactaataatattactattgtcaatgaaaaatgaaggggttttatctaaaattgtttgttgggtagtaggggagtagagtctagagtagagtggttacattacaaacatacacgcacacattgacattgttgggttaggcacatttattatttaatatacaaaattaattaattacaaacacaactctacaacaaagcaaaaagttacgaaaccttctcaactaaaaaacgcagaaaaaatcaatgagcactttcattttttgttttttaatttttgatagtaaattgctaaaaaaggaaagagcacttttgttatcgaataaccaattattcatcagattttgtccctcaatttcctacggattgctgtttattcatcagatttttctctttctttaatatttagaaagaaactaatagtattttattttgattaagaacgaatttattcaaaaacatttttttttaattttgaacttgattcacattagttaaatataaaatatatgtactaaacacatgaaataattgtacatgaaaaaatatggtaaatttaaaattaatttttatatatatgaaaaaagtatgtcactgaactataatttttctgatttttttttagtttttttatgatttaattttttttttctttcatagtaactttttcattttaatttaaaaattgatatggtggtagaaactggttaataatatcaaaaaacgtaatttattttctaaaataccaaaatgttagcagtacacatcactaaaagaaaaacccaatttccgcccaaaacacctaa

SEQ ID NO: 27522 - DNA, 6781 bp, Cannabis sativa
tatatatatatatatatttcccttataaaatagacatagtctagtggttctatacttttcctcacaaagagaaggtccaagttggaatcctcccttctctattatcaaaatatatatatatatatatatatatatatatttcctttataaaatatataaggatattttcataaataattaaaaaagtcaataaaaaaaataacaaaaatagattgtactgaatttttaaaattttatttaaagaaaatacaaatttatattattttcaagttattttatattctactcttattttttactattgatttttgttatttgtatattatttttatatttattttgatattatttaaatgatattttttttattaatttcatttgatttttttattatttttataatatactataaaaatgtcaatgtcaaatatatatatttgaagaaattttttttaccaaaaaaatagtaatttgggtaaatttttcaaatatgtatttatatgttatttcaatagagccatagagtttgagggaatcaagtttctgagtgccaggacaagatgcacagtccagaaattgtttttgtggcagtaagtcttttttaattattaaaataataaaataataataataataaataatcaatttgtttttattgaaataaagattactatatttatttatggtcacagtttttcgtaggtgttgaattttacgtgaataagacaatgaacgaacagagggacataacgacagagatgagacgcaatactcaggcttatgtgttatttaattatatatcatcactcaattcattttatatattaacaaacttgactcttgattttggctcacaaaactcttggatttttttcagcttagaaaagacctgttttgctgggactctttattgtgaagtgaactatgtttgtgacttcaattgaggcctaagaggaggagaaacacatcctgtttttatgcaaattaaggtactatgttatactatacatatgcttctgtttttgttttgtttttattttgggaaatgcagcaacagtttgagaatatgtttatgtttgaatttgtttttttgctaagaaaacatgaagatggagaatatatgggctatgttttgtgctgctgatcaatctggtggttcacaatttgagctttggaatcaccctttttcatgtaccaacaatgctttgatgatcttctttgatgttgttcttttaatcatgctcttaatcaccattattaaaaaaccatcttcaaagctgggtcatgttccatcttggtttcaaggtctttcttttcttcagattgtgtctgctgtcttcaacagctgtcttggattgtcattactgttctttggattcttcatattagaacagaatctaaagaaaaatcatactgttgtgcctttgaatcaatggctgcaagccttagttcaaggtttcacttggttatttgtggccttgatagtaagtatcaaggtaaaacagcttccaagagtgcctgttcggctgttgtcgattctcgcaagcttgtttgctggatttgcttgtgttctgtccttgtttgctggtctttcgatcaaacaagtgacgattaagatagctttagatgttttatcttttccaggagctgttgttttactcttatgtgcttataagagttgtaaatatgaagagagtgatgaggatgttgtcgctcaaaatggtctttatacacctctaaatggtgagcctaatagtattgataaaggcagccatgactcggttaccccatttgccaaagcaggatggttcagcaagtacactttcgggtggctgcattcgttgatgaaaatgggaaaagagaaaactctcaaggaagaagatatgccgaggctgcgagaagatgatagagcagaaagttgctatcaaatgttcttggagcaactggagaaacaaaaactcaaggatccttcttctcaaccatcactgttcaagataatacttttatgccattggaaagagattttcatatctggtttttttgctttaataaagattttgactctctcagctggtcctttgcttcttaatgccttcattttggtagctgaaggaaaacaaagtttcatgtatgaaggttatgtattagccattactctttttatttcaaagagccttgaatccatctcacaaagacaatggtattttagaagtagacttattggtctgcaagtgagatcactgctcactgcatcaatttacaacaagcaactgagattatctaactctgctaggcttatttattcaagtggtgagattatgaattatgttactgttgatgcatataggattggggaatttccattttcgttccataacacttggacaactagtctccaaatctgtattgccttagtgattctcttccaatcagttgggttggcgacggttgcagcattggttgcaataattcttactgtgatatgcaatgctccacttgctaagctacagcacaagtttcaggtgaggcttatgacagctcaagatgagaggctgaaagctctctccgaggctcttgtgaacatgaaggtgttgaaactatacgcgtgggaaactcatttcaagaatgtggtggaaagtttgaggacggtagagttgaaatggttattggctgtgcagtttcgaaaagcatataattctattctactctgggcatctcctattttggtctctgctgcaacatttggagcatgttattttctcaaagtaccccttcacgccaacaatgtcttcacatttttagcaactttacgccttgttcaggaacctattagatcaatacctgatattattagtgtggtgattcaagcaaaggttgcatttacaagaattgagacttttcttgaggccccagaactacagattacaagagacagtcaaaagttcaacttggagagtggggacaaagccattatttgtaactcagctgatttttcatgggaagataatttatcaaagccaactttgagaaacataaatttacaagttagccctggtgaaaaggtggctatatgtggtgaggttggctcagggaaatcaactcttttggctgcaattcttggtgaagttccaaatgtacaaggcagtgtaagtaatctatgcactgctaaccttcctttcattcaatcaggttaaggaaactaaccattatcatcttacttataatttcttgaatttcagattcaagtttacagaaatattgcctatgtctctcagacagcatggatccaaacgggcaccatacaagacaatattttgtttggctcccctatggatggtctaaggtacagagaaacacttgagagatgttcactagtgaaggattttgaactgttaccatatggtgacttgacagaaattggagaaagaggagtaaatttgagtggtggccagaagcagcgaatccaacttgctcgcgcactctatcaaaatgcggatgtataccttttggatgatccattcagtgctgttgatgcacatactgctacaagcttatttaatgtaatcattccttcccaacaattttagtgtcttaattatttatctttgtctttctttcggtttggttcttattatgcttacttgatttcaggaatatgttatggaagcactatcaaacaagacagtcatgcttgtgacccatcaagttgatttcttacctgcatttgattctgttttggttagtcttcttcaattcaagttccaagaaatatgtcttatatctatgactatacttaataataataatactcaattgttgacagataatgtctgatggggaaattttagaatcagctccttaccatgaattattgttgaaaagcaaagagtttcaagacctcgtgaatgcgcacaaagagactgctggttctgaaaggcttgcttatgtaaataccacagagaaacttgtaacatctagtaaggaaatcagaaagagtttcacagaaaagaacttccaagtatctacaggagatcagttgattaaggtagaagaaagagaaataggagacgcaggattaaggccttacatacaatatctgagtcagaacaaagggtacttgtactttatcatcttaagtacaagtcaccttatattcgccattggtctgatgttgcagaactcttggatggctgttgctgtagataatcctcatatcagcacattgaagctaatcctcatttacttgttgattggatgttgctccttaatagttttgcttttgagatccatttctatagtttatttgagtattgaatcctcaaaatctttattttcccaactactaaattccctttttcgatctccaatgtccttttacgactccacacctttgggaaggatacttagtcgggtatgcatctagaacaacagattcaattacaagtacaagacttgttcataaaactaatactcatcttttatctttgttcttaaacaggtttcatctgatctgagtatagttgatatggatgttgcatttggcttattctttgctgttggatcgtccatcaatgcgatctttaatcttggagtactagctgttatagcctggcaagtgctgtttgtatcattaccaactatatatctggcctttctgttgcaggtaattaagttatgcctagttttcttgagattatttcttagtttttttacatttttcatgtcatgtgtcatacttctttgactaatatatatattctttttctcaatgaaaaaatcattagaaatattactttgctactactaaagaacttatgcgaatcaacggcacaacaaagtccttggtagcaaaccatcttgcagaatctgtggctggtgcaataacaattagagcctttaaaagagaagaacaatttttcatgaaaagtttagagctcattgacataaatgctagcccattttttcatagttttgcagcaagtgaatggttaatccaaagattagaaacactcagtgcaacaattcttgcttctgcagcattctgtatggtccttcttccccctgaaactttaagctctggttagtatttaacaactttgctcttggtaccattttcactacctaaaaataaactcattcatccaaaacaaaaatttgtgttgctgcaggatttattggaatggcactaacatacggtctatccatgaacatttcggtagtgaattctattcaaaggcaatgcattctcacaaattacatgatttcagtagaaagactgaaccaatacatgtgcataccaagtgaggcgcctgaagtgattaaagaaaaccgccccccaaccagttggcctaatgtggggaaagtagagataagtaacttacaggtaaataaaagaatctactctttgatggtttaaaatagctcttgaaaatagaaagaatgctgatgcggtgttgattttcgaaaaaacagatcagatatagagccaactctccacttgttcttcgcggtattagctgcacatttgctggaggacataagattgggatagttggtagaacaggtagtggaaagactactttagtaggagctttgtttcgtctagtggagccaactcaagggacaatactagttgatggcattgacatatgtaaaataggacttcatgatttgaggtcacgttttggagtaatacctcaagatcccactctttttaatgggactgttagatacaatttggaccctttatctcaacattctgaccacgaaatatgggaggtaaccataatacaatgttatactaatgtatcagttgaatgaggcttttgttttgacaaaacaaggtttgatcatattttccctttttctgactttcaaggttcttggaaagtgtcaacttaaagaagcgattgaggagaaaggcggtctggactcgtcaggtaatgacaacaaaatttgatacatgacaagtaagtgacacattaagagatgtcataagtgttgttttgctattctcagttgcggatgatggctcgaattggagtatgggacaaaggcagttgttctgtttgggaagagctctattgaggagaagtaggatattagtgcttgatgaagcaactgcttccattgacaatgcaactgatatgattctacaaaaaaccattagaactgagtttgctgactgcactgtcatcacagtagctcatcgaataccaactgtgatggactgcaccatggttcttgccatgagcaatggtaatcttcaaacttgtggttattccactctgtcaatactaatttcggtttgactaaatcattttcaaaggggagagtctagattttcattttgaaatttgattttggatttcaggaaagatagtagagtatgaggagccaatgaagttgatgaaaaaagaaggatcactttttggaaagctggtgaatgagtactggtctcatttgcaatctgctgaatcacattgatactacttagaataaaattgcaagtcaataggtgacattgcttagctcttatattgagatattaatgagtatttattggatgaaataataagttatcttctataatcaatcaattcacagttgattctctaatcttcatgtaaccaatatagaaaattgttggcctttttatgaatagcacatgcaatattttcattccatagtaaaaattaattacaaatgctatttggtattttttctttctaagtttaccttttcggaaagctcttttttattgggaaaggtcctaaaattt

SEQ ID NO: 27523 - DNA, 1231 bp, Cannabis sativa
actcttgacttgccattaaatcaccattgtaatagaacaatgcgtatatgggtcatttctacaagtctccattcaagaatagagttgcatacgggggacagggaatacatttcccgcattgcctgtccccatatacacccctattcttaatttttggtcattaaatcatcatcaaatctcttcttccatgcataatttaatttaatttgtatgataaaaaaatatggtaaaaaaatgccaaacttgaactagatcattaaccttgagccagtcaaaggacatcactactcaaatcttcaactcaaatcatcaaaacataaataatatgaaatgaaaaatgaaatacaaaaggtacttgatatgaaaaaaagagaaaaaaaagtatggagatatttttattattctttttttgcattatgagatgggattggaaggaggaggtgggacctttggtttatctttctttgggtgtgaatgattgaaaattttcaaactttattatgcacgcctcttcatgtgctcttcctcctaaacccctaaaatgttttaccctcaaataaaaagtgaaaatatgctctctagtctataatgatgatgatgatttgtgggcattgggggttgttgttggttggttagtggtcctcaacttacatacttatacatacatacatatacctaaaaagaaatgataaaagacacaggtgtatataacactggtgagcaaggccggtcctaaaatttagtgggttatagggccggtcctaaaatttagtgggttatagggccggtcctaaaaattggcccttatttagaataaaatataatattttttaaaatcattaaaaaaattgtaaaattttaagagaaaaaaactttttttttttggcccttgggctaggtggccttaagcacaaatttaacttatttatgcttaaagtcgggtcttgcttgtgagtgttatctcgctattggtcacctttattttattttaataaagattgtaagaaaacaataaccatttataaaacgtcaccttatagtactatttactgatgatgtagaatatagcatgcccttctaatctttttcaccactgttttttttttcttctctagccacctttcggtggttgattcacattgtcaagtctaatagtaggtataggtgccaataagacatgtaaatagtttaaattggaaaaaggaagtgataagattacaagcatatatga

SEQ ID NO: 27524 - DNA, 1715 bp, Cannabis sativa
tcaccaacaacatgggctaacacaacaaagaactatcaaatcaacccaagttttaataaaaccaataaaatttaatgtaaacccaaataaaaagtctaacagacagaagagaaaatcaccccattcacattcttaaagagaaatggaatgctactagtgtcataaaaaaatacatgttaggaagagatgtgaagaattgaccaaataacttattaaaggaatgaggaatcaagaatgcaaagacacattagattccactaatgttttggtgaagattttgaaagtgattgatgttctctctgtcatagcttatgatttttttttttttttgactcttgggttttgaattctacttgttcattccacataaatccatataaggagtcttgtgatacttataaggtatatgatggatgtactgtttgatggacaataattttagctctaaagttgttaaaatataaactattaaggtgaaaatgtttggtggtgttatgagaatactgactagcgtgagacattaaggaaaagcttaatctcttttaaagctttgaatattcgtggctatgattattttgcaaaaaatagttgaataaatatcaataaatgtgggttgatagttatgaattaatggtcaaaaagagtaggatttgtatattagtcaagaatgatattttaggtgggttgttgttgcaaatttatgctacgcaagtatacatatttctttcagtaataaattcttggtaagactaagtatcatcccacgaagactaacttaccaattactagtcaattaatctttagtctctgattaaataaaattttagattttgtgtaacatgaaaaatataattacatataaatgataatgaaatgctagcaatacaattaataatgaaaaaaaataaaacttagaattttaacaatgagtaaacaattaagcagataaattataaatcatcattcctattaacccgtaatagaattttccaattattcctcatcctattcaattaacaaatggacaatggcaatttattatcatgttatgaattacaaatacaacctaggtaaaaattcccaatatttgtgatagttagttcccgtgatctgtaaggaaaaataccagataggctgtgtaatcccacaccgcctggggaaggtcaagtgtaatgaatctaagactgtgtaggtatgagactacacaaaactgtgttgaaatagattgattgattctacctatatcaacaagggacatcttgttttctggtagctcatcacgaaagaactccacagttaagcatgcttgatctagggtaattttaggattggtgacctcttagaaagttttccttggaagcatgcaagtgaggacaaaacacattggaaatactcgtgttggtctgtaggaccactcatcagtctaggaagcagccatagtgatgtactcgtgtatacaagtcataaattcgtgggataatgtccaatggaagcttgaagcggggatgttacaatatttctatgaaaaaatttaatcacaaaggtagcattaagaaaaataactcaaaaaaacaattaatctaaatactttcatcctagaatataaaattgtgttttaataatcaaagcatattcaaattgcactttttaaattttaattcaaaaaatatatagatatttactaaatatggacaatcaataattaagcctagact

SEQ ID NO: 27525 - DNA, 3939 bp, Cannabis sativa
tggttttgtttgtttttttcttttactcgatatttcgtttgtatttcggggtcaatatcgtgagatattgttgtccttttcagttgattggacgaggcgcatttgtatttttatattgtattaagttatatgaaacgagtaaaggtcgtatctgttgatacgttttgctgtctctcggatttgagagttgttgttctgtttttgtaagtttattatagcttcgaacagtaatctagagagggatatggaggctacagcaggagttgttagattggatgaggaagaggaagaggtgttaaggcttccggtgagtaggaccgaagagattgtgatcgatactaggtggtgcttggtgggtaaactgttgacggggagggtctcagattttaacgtttttcagaatatgatggctttcctgtggcagccggggatgggaatgtacgtgaaagaactcaacccgaatctttttctttttcaattctaccatgagatcgacatacaaagagttatagacggaagcccttggacatatgatcgcaaacctctcatatttacaagattgaaggagggtgacaacccacggcgggtggagatcaatcatatggatatgtgggttcaactccacaatctacaatcgggtaatatgacccttagcgttgttacgacgctcgggaactttattggtacatttatagagtcggatcctaataattttgtgggtgtttggagagattttctcagagtccgagttcgggtcaatgtcgacaaaccaataaagagaagaatgaaagtgagcaatgatgattcctcctggtattgggtcaattttaaatatgagaagcttccaactttttgtttcatatgtggaaaaataggccatgcggagaagttttgtcccaggcttttcttgaaaccattgcacttacaagaaaagccttataatttggagctgtgggcgtcgacgcagagaagacattctacctttggggcacagtggctccgatcaggggcggcggtaaggggtgagtcgagccatgcttctcacggtggcagtggtgaacgaggagtcaacttgcctcctatgattcaggagcaatcagtgggatcggctggcaatattttgggatatggtattaataataacttgctgaatgagaggcatcaatatggggaaaatatcatgggagtcaatgaagaagatttgactttaaatgtcaataataatgggaatttttttgattccacaattactacaatcattgattcaaaaagaagaagacctgattcaaacgtgggtgtgtccatgggcctacaagctaaggttacttctggaagtgtagatgaaatggagcaagatcgtgtggggttttcaaaaaatgggcctttggtgggttatggtttccaggcccgcccagaattatgagttgcttgagttggaattgccgtgggcttgggaacccgcgggccaaacaattcttatcggaccttgtattccaaaagaagcccaacttgctttttctttgtgaaactttatgcaataagttaaggatggaaagtattagagcccatttgggttatgaaggttgttttgtagtagaagcccatgggcatagtgggggtttggccttgttgtggaaagaagaaaatgaagtgacaatccagggcttctctgctaatcacattgacgccatgattcagaaggtggggactccatcttggcgattcactgggatttatggagagccgagaagagagttgcgattccaaacttggaacctttttcgatctttaaaagaagataatgatcttccttggtgccttatgggagacatgaataacttgggttctcaattggaaaagaaaggtggaaggaactatccagaccagttgataaccgttttcaacaacgctttgagggactgtaatttgatcgatatggctctagagggttacccgttcacttgggaaaaaggaagaaacaccaccgattggattgaagaacgtttggacaaaacattggtcaccaacgaatggctgtctttatttccccaatctatcctgtacaacttggagctctcttcttctgaccactgcccattacttttaatccttaaaggtaattttccaacaacaactcatcattctttccgctttgaaaacgcatggatccgtgaacctttatgtaagcagattatagaaagctgctggacagggtcaggttgcaccaatattcaagagaaaatttttaaatgtggggagatgcttgggaagtggggcagagatatcaccggaaactttcgtcaacgaatcaaccattgtaaaagccaaattcgtaactcaaaatggggccgtgatccggtatcagttcaacaacacaaggaaggaaaggagaaactagacgaagtgcttgcccaacgagaaactttttggaagcaaatatcaaaacagttttggctaaactcgggcgataaaaacagtaagtatttccactcagttgctagttcaagaaagaggagtaatagccttagtcaactaatggataataatggtgtttgggtgaattgggaaacgggccttcaacatgttatcactgggtactttcaggatttgtttcagtcttctaatattaacttgggttcggtcttgaatggggtccgtccaaccattacttgtgatcagaataatgaactgctagagcctatttcggaggatgaagttaggaaagctctcttccaaatgcatctggataagtctccggggccagacggtatgaccccggctttttatcagaagcattggagcattgttggggcggatgtagtccaatttgttcgtgatttttttgtcataggcaagttttcggactctatcaacgatacccatatcgttcttattcccaagaagaagaacccatcacacatgagtgacatgaggccgatttcactttgcaacgttctttacaaaattgcctcaaaggtggtggctaatagaatgaaaggtgtgttgaatcatactatctctgaaactcagagtgcgtttgttgctggaagattaatatcagataatgttacggtggcgtttgaagcaatgcattacctgaaaaggaagactaatggcaaaaaaggctatatggcactcaagctcgacatgagtaaagcttatgatcgtgtcgaatggaggtttcttgattctattcttcgagtaatggggttcagcgatcggtggataaacttgactcttagttgtgtgaattcggttcgctaccatgttattaatagtggtcaaaagatgggaccgattgttccttctcgaggtatccgccaaggttgtccgctatcaccttacctgttcattgtttgtgcggagggattctcatccttagttagacactatgaggctacaagacttataacgggttttaaagttgctagaagaagaagccagccatgtcttacaacttctccaaacgtttgaaggcgcatctggtcaaaaagtaaatctccacaaatcatcagcttttttcagctccaatacttcggccaataccagaaatagcatttgtaacttgatgcatatccaggaagcgggggaagacagtatgtacttggggcttccaagtatagtgggccgaaacaagaacgttgttctgaggttccttaaagaaagaatgaggaagcggatcaatagttgggagggtcgttttctatctcgggctgggaaagagattcttatcaagaccgtggtccaatctcttccttcgtatgctatgaacgtatttcttttcccgattggcacttgtaacgaaatagagcggatgatggcgagcttttggtggaaatcaaacaactctaatggtaatggtagtggtatcacttggatgagttgggatagaatgactaaacataaacatgatggtggaatggggtttcgaagtttgag

SEQ ID NO: 27526 - DNA, 2685 bp, Cannabis sativa
tatttttgtaaatttctctaaattaatgtttgtttgtaattgtagatacattcaagttgaaggtgaagccaggaaagacttatctccttcgtttgattaatgctgcacttaatgatgaattattttttagtattgctaaccatactctaaaagtggttgatgttgatgctatttatgttaaaccttttcaaactaacaccattctcatagcccctggacaaaccactaatcttcttttaaccaccaaatctcatgtcccaaaagccaaatttctcatgctagcaaggccatatgtcacgggtctaggcacctttgacaactccaccgttgcaggaatacttgagtatgaaaccccattaccaatgaagaaacttcaactcttaaaaccaatattacctgctctaaatgacacttcatttgcagccaaattttccaacaaacttcgtagtttggccaattctcaattcccagctaatgtccctcaaaaggttgacaaacattttttcttcacagttgggcttggaacaaatccatgtaatagtaacaaaacatgtcaagggcctaatgggacaatgtttgcagcttcaatcaacaatgtttcttttgtacttccaaacaattcagcccttttacaagcccatttttcaggtcaatcaaaaggggtttatagtccttactttccaagtagtcctattattccatttaattacactggaaatcctccaaataatacaatggtgggaaatgggactaagttagtggttcttccatttaacacaagtgtggagttagtgttgcaagatacaagcattcttggtgctgaaagtcatcctctccatctccatggatttaacttttttgtggttggacaaggttttggcaatttcaatccaaataaagatccaatgaagttcaatttggttgaccctgtcgaaagaaatactgtgggtgttccatccgggggatgggttgccataagatttttagcagataatccaggtgagaattcagttataaataaaaattgtatgagtattagaataaataagatttttacctctactatacaatgcttgttgattttttctccataaataattttcttataaaaaaaaaagttaattcttcttcaactatgaaaattattgtaaattttcttcttcggttgcttttcatccattttcttcttaaaaaaatacttgtatagatagtactttagtgaaaaaatttaaggtagctaatatttgtatgtttaagggcattatgtttgtgtaattatacgtgtaatttacagctgcatcaataaattatcttaaaaaatcaattaaatacaaacaagtaagtatatttacaatgataactatagttcaagggaatattttttttaaaaaaaaaaatagctttggaggccgaactctaaaagtgagttaaaaatcttatttactcttaacatgtctataatttaataatttgatgatgattttgaatgtattggcaggtgtgtggtttatgcattgtcacttggagatccacacaagttggggactaaaaatggcttggttggtcttagatggggaattacccaatcaaaaattgcttccaccaccaattgatcttcccaaatgttgatttatattctcaccatcacttattcaacatttattttaagagtcttgtttctttaaattttgtcaaacactttaaattattctttttgaataattttttgtccacatgcatgtagttcattgatatggagagtcaaaaaaataatgaaagagaatttgtttattatgtgaggttgaattagccaagaaaggctcaataaaattggcaagaaagatatttagatcactattgattctattacatttttgtatttatcttttgttgttggcttattgcacaaaaatttagttctttagtttagggtggaaataatattattgtttacttaactaaatcaaataacaaagtagattagaatttattaaaggcaaccataatcttatgtgagtaaatcaaatttagttttggataagcatatatttaagtaaacaatactatcgttcccatcgcaaattacactatttactagatctttaattagaacctaatttttttttattgaacaatgaactttagctcctaattccatcacaacaattaactttctaaacttgatagtccgataaaaaaggttcaagatgaattttagtttcattttatgggacaaaattctacaaaataattcaggataaaagaaattatttactcaattatctttttaaaatatattgacaagtgaattttttctctttggaaaatcacttcttcaataacaatttctttattaaaaaaaaaatcaaggctataacttttaatatttggctaaaaacgataggtctaatatagggtctgatagatctgatgtcaacgagataatattggatctatcgggccctatgtcgggcccatcgtgtcataataaaactaaattatgaggaccatcaagcccattatcggaccctatatcgaacctatcgagctatcttcttcaaccgtcaatcccttcaacattaaactaccatcgggttctatatcgggcctgcatcaaacatgtatcgggccaggcaaaaatcgcagattcctcctaaaatgcagatccgagcctaaaaatctcaa

SEQ ID NO: 27527 - DNA, 4104 bp, Cannabis sativa
attaaacgacatgtcgtatgttatccgagcgctgaccccacaaaaactcgtttttgataggatagctcacagaaaggtagaagcttgttctcacactcccaaacgaaaatggcgactctttcactctcagctcttcattcaatttccacccgcaaacccatttgttccttcatcgttccgagctcttctccggcagttattccatgtcgaaacactcgcttccggagctacggcgttgctgctagctcctcaaaatgttggatagctttaatgccgaactcgaacatgtcccgtggagtgagtaaggtgaggtctgtggaagaagaaaccctaattccggagcaagaagaagagcaagctactacccaaccagaaggggaaggagaaggtgaaggtgaagcagcctcgtcgtcggaccagcaagccgtctcagttcctgtttcggcctcggatactctcaccatgttctttcaggtgaatttttcattgttgcatttgttttattatttaatattacccataaaaatgttatctttttgggtattaggaattaattatgtagtacatagtcatttctaatggcaaggccatgttaaattttgtgtttgctcattttgaaagtaccaatgcaagtgtttaagatttcgttgggaattttggtcctgtctcattagctttcaaatacttgaattctgtctcttcttcttgataaatggttgttcatgttgataatactggtctgaattggtttgtttagaaccaacttagtttgctgttgtttaattaatacctaaattagttctaaattgtaccatttcactagttttggtagatatgtctaaatctaaaaagaattttagtgaaagaatttaaaacatatttaaaatttatatatatatatatatttaccaaaactagtgaaaggagtacaattttgaactgatttggcatatccaaggtattaaaatggtgttaagtatacaacaaggtactgagattgttcagaaacaaacaccaaggtactaaaatggtataatctatttctttcttgttttgaatattcaagtttaaaaaatttggatgtatatgacttatgagccttgtctcagcatcattacagagtgcagttgcttaatttattgagtgacatctttcttttgcatatatgaaggcagatggaacaatgagtgaggcaggtattccaaaggtggtcgacgccttagaggtatattaacgcagtccctaacttttcttttttgtttacctttatggtgcaatgctacattttaaagttacatgtatctctttttcaacaacatgagctataaaaatgatgctatattgggtttcaatgggagaggagaactgtttttatgaagataaattccatatgaaatgctgtcatacaagatatgcttagtctggatcttatttctcatcatgtaaaactgcatattcattttcaaaacgggtgtgttggttgatgttctgacatattgaaatcaatagataatcacagtttgttaatgtttctatacaaattagctggaataaagtcgagaaagccaaagtatatgatgtttgaaaaccttggactgacaataagcatatcttttcctttgatctgctctcatggatatctttatatctgttccttttatgtactacatttcaaaattgaaattgctgactcatgctttatcttgcagcaaattgagggtgtttccaatttgaaggttaatgttattgagggcattgctagtgttgaggtatgtatagattgcttcttatgtttggcccactgctacttacttcttttgataacagttacacatccagttgtccatattttttgactaaattattaacatacctaagctatatgttatccgcagtagaccataggttaggaccacgcatagttcacaaattaatttgtcaaatctttctctctaataatatcataaatggttctcatcagtgaacattattcagctgcttagatttagagagtactccttatgttaaccttttacatagtttacttgattacttttgtaattaagtatagatacaatgcaacttacttcttttgataacagttatgcatccgatagcccaaattcttcgactttattattagcatacataagctatatgttatccacagcaaaccatagattaggaccacacttagttcacaaattaatatgtcaactcacattattcagctgcttagagtatatatatttatgttactatgcacttccgcaaacctttctcatattttacttgattacttttgtagttaagtatacatatttatagttcccaatgtatatcattatgtttgtcactgtttttcagttggaaaaacagacaacagttcaagctactggggtggcttctagcttggttgagaccatacagggttcaggctttaaactacaaacattgaatttaagtttcgacgaggaagaaagtctcgctgctgtgtagatcatgtttcacgaaaagtcctctcgcaatttaaggttcgaacaaaatgaatgaacaagaaaaagtataattttgttactaaagttctgatatcttgactcttcctcctcatgaggcaatcttgtagttatttagtgttgatagtttcattgcctgcatttaaccttgtatgttatcctaggaatgcacattaattgttattgaggataaacactgtcattctggttgaaagcagttttaataatcaaataatgtgattttgcaatttggtaggtatggatggatatatgctgatttaatatttatatagtccaacgtggacctgaaaatatatagtataaatttgttaagatatctctattggtacaactcaatatcgggttttacttattttattgtaataaatattataaaaaatagttaacaaattattgagttacacttcatcactgaaaaagattagcataaaggaagtaggagagatgagatcattactttgacaatgtaaaaaagcagatatagaataaagacatagcaatttgacatggtcaggctctctctgtattatgattttgaatagctggatcacagcatggacaagattctattctctccaccatagccattagataatgtttcatgtttcatgatgatcaacatgtagtacttgtttgtaaggttgtatttagatttaatatgtgggccataagccgccgtacagctgcagagatatattatttcctgacctggttaaggctggttttgaggaatttatttattcatatccacaacattagtcttccaaaggggaaaatttactcaactcagtctcagtctagtctagtactactactaataataactactaagttttgtgttttctttgattcatattaatggctatcattaactatatcataacaaaaagtaaactttaatttggacaattaaattttggtattttgcataacacctgaaagctaaaaagaaagagaagagtcttactatcaatcttttagttaatatttatgttcgaaaataaatgttagaatatattttttttaattttctttataacggtattcgttaaagttacaacattgattctctaaattttactttttgaattaggttacagtgttgaaaataagtttaaaattttttaaatacgcgcggtaaacttaaatattagaactctatttttaataccgtaaattattcaaaaattttaaaaaatttacaaaaaaatattataactataataaatattgacataaaaaaatattcttatctataattgagacgcaaaaattaattaagagattgcaattaaggttgctccaataaaaaaaaaaaaaagaaagagaagtgaaaaaacatatacaagaagagggaccatagtcaactaatcgtggagatttgatgatagatattttgtcggatccacacaaacaaacccaacctaacacgtttgtaagcaaaataaaaaaaaaaattaaaaatcaaacctttttccttgcagtgtcctaacctaaggaaagcataggataccctaatatttttgttgtacaccattttaaaaacccttttctctttttctctctc

SEQ ID NO: 27528 - DNA, 964 bp, Cannabis sativa
  modified_base (640)..(643): a, c, t, g, unknown or other
gattaaacaccaacaagcaaacaaaagctcaacaacaaaaaagaagtctataaaaatagattctttttattaactaaaaggggatcacgtggtgcagattctttctctattcattctgtctttttgatgatctcaaaaatcacgtgttagttataggagtcttatactttagccaacttttattagatcatcgtatcaaatataaagtactataaaaatagatttaaactttgaaatggataatctctattagttgtttgtaaagttgtacactcttaaatttctttggtgtgtgtattggaatatactagagagttggattatcatataagtaacacttgtaaagttattatgaggagaattttgttccaaattgggtaacctttaacatatctttgtgtaaagtgaatctaaagcttttcattattattattattaaataaatagatgacaacaaatttatgttttttttggataaattaaacaactaatttatgtttttaataattataacaaaactctccctaagtcaatatagtgtcaaattatcaacaacaaaaatactaagaattttttttaaaggcaaagagaagtttttatttaaacatttaaatatttatatttatacatatatatatannnntatatatatatatatattaggtacaggggcagccattattaatgagtggagaaatgtggtggctccattttcaaaagggtttatatacataaaggccatgaaacatcaccatctttagagggtttgtccaacccaatccaatcaattttttttttttttggctcacttaaaaatttgaaattgacatttggaataaaatgggtccttattgaaacaaagaaaaagcagggtttttattattgttgttgttgttttttgtttaatgaaaagaaaaaagctggttttaaatgaacaaaacacattgaaaatttgtcttatgat

SEQ ID NO: 27529 - DNA, 2648 bp, Cannabis sativa
atctttattaattagtaaatatgataatattgaaatgggttttatttagggcacaaaacccaacataaacttcttctatttttatttcattgtatccgagggtttacataaattagagaattgtacaaaaattaacctaatacttaagagttatatcaagccttagtcaccttagcctacttgtagtgccgacacaagtagtctagaatccatgcatgagggaccctcgatccatccatcctcttaaaaggttccttgacccaccttttgaagtatttcatatgggccttcctaatttaggccaagtacccccactcccaattcttacaaattttggaatactctcctcaagacgaggtcttcaatatcaaatgtatgattcttgactttggagttaaagtgccaggtgatcttgccttggtacattttgaattgaacttgtgatttttctcagagttccttgattaggtccaatgattcttggagcatggaatggttccgagaagggtcataggtatcttgttgatgagagggtgtcatggcctcaacttggattactgcttcacacccataaaccatcacatatggcatgcgtcccgttgaagttctctccgtggtcttataggcccagagaactcacgaaagttcttttggccaataagctttgcatgcttgtagtttcttcttcaatgttgttttcaagattttgtttatggcttacactagtctattggctgggctacagttgagaaactttccacaattccttgttgggcatagaattcggtgaagtgttcactttcaaattgtttcccattattagagataatcttgtatggatgtttctaataatacacgatgttcttgatgacaaagtccaagatcttttttgaggtgatagtgttcatcaactctgcctcaacccacttagtgaagtaattaattgcaaatatcgcatatttaactcctccttttctcgtggggagggatccactaaatcgataccgcaaactgcgaaaggccatgggatactcatgagtttgatttcagttggcggtgcacgtggaacttttgcttatctctggcactactcaaactttcagacataccctatgcaatccttcttcacagtgggccaaaaatacccttggcaaaggattttctttgataaactgtgtctggatgtgtgatctccgcaaaagccaccatgaatctcatggattacagtgctaatttctattacagcaatgcacctcaaatatggaattgacagtccgcgacggtaaagcttcccgtccatgatcacataatagggagcctggtactaaaccttccaagaggaagctttgtccgcgagaagctctcctgagctcaaaaagttgtaaatgggtgccatccaagaatgagagttgtcgactaaggaatttacccactagacctcaatgcttggtctttctaggtgaaaaattgggactactctatgttgggtgatctcagggtctattgtaagtttggctagcatatccacaaatgaatcttggtccctcaggacttggcggatgttgtagcctttgaacccttgcaacacccccgggacatcatgacatatgtagccattttttcaccatttatttggtactcaccagagatttgatttaccaccagctgggaatcactatgcacttctatttgataagctcccacttccttagccaattttaagcatgctagcatagctttgtgttctgcctcattgttggaggtgcagaaactaagcagcatttgcataacagacaggaaatttttgagatggatggatgaccaagagtacgtccttcgatctcatctggagaaactagaccgccataacagagaagctagtgacctggtcaggcagtttaatataagaactgccagacgaggtcaagatctcattagagatcctcttaaagggagactaattggtagattagggagggtctactgataaactatccaaccaggttcctctggaaccaggaaagaccttcctctgcccaaaggaggacaagtcttcccatgaaggtctactgacgagaatagccaaatcccagcaaccaacagtctaggggccagccagggatctgtggcacaacaacacgcccgattagccaaccttggctggccaaccccttagtggtgcacctctggccgaccaaaaggtgaactctcatcctagaacatccacgagtgagtaacccaaaggctaatatttaataggctaggtccgagaacgagttcaaacactcaaaacgaaaacaacttgagaagtgagaccaatcatttcagatacttagatccacctaactcttgtaaatggtgtgatttgccccatgtcaatgcacatactacaccagccaattaaagaagagtgggcggctaggccctactgagcatagggttggtcggccaagaataacttcccagagtagggctagccagccatggctagctcccctacccagggcttgccgaaaaaagctaactactaggcttagggttggccaaccttgaacataccctctccccaggtatgattgaccaagctctggaaaaatctagggttgcaacccaatcaagaggggccaatcaaccaagctcctgccaca

SEQ ID NO: 27530 - DNA, 1921 bp, Cannabis sativa
  modified_base (146)..(150): a, c, t, g, unknown or other
cattcccaatgtctaaactattgtccctctatactaaaaatactaagatgtgattctaatagccatacgccgtgtttcaatgttcccggacacaaaatatgtaaaattataaaatttctatatgtgacataaaaatgcattctgannnnnaataaatcatcataaataattaattcaatactaataaatgactttcataattaaagcctaattatctgctaattttcaaattaagactaggcggtctttacaaatttgcattgtgattacgatgttcctggtttgaagattccccaacaagaagagtaggtggttgaggctgtaattgtgtctgcaatttaggcaatgtagcagttaatgatttaagtgctagtattgtaagtaaaggtcaagcattgccgttaaagaagtttgttctgtaacgatcgcaggatggtgttggaggttttgaacccttcaatgcagggtcgtaagccaattctggttcaacacctttgtccaatttttccaaaaaaatagggcatttctgatagaggtggccgtttattccacattccatacaataatcggggagacgttcatatcagaattcaacccaaaatttatcattgactttgagcagagtaatcattcttcctcgcagaagaggcttcgtaatgtcaattcgaactctaaactgtagaaaaggatcccatccttcattcaaagaatcttcatgaacagccaccaattcaccaaggatagatgccaaagatcttgctaaagttttagatttactcaaaaaaggcaattgatatgcttgtacccagaatggagagtaaatcatagtttcaagagtaacattttgcaacaaagttggttgtacgagaacaatatggtgattttgaaaatcccgtggctccttgtctaaagccctaaattgatcaccttcacaaccaaagtaaaggaggaacaaaccagaatgatgttctttgatattcaccttgaaacgaccatcccaatgctcggccatttgtctttgaaatgtacttagccacactttcttattagtaagaatacgagccactggaatgaattcataagactcttcaaactcagaaccatcatcagcaatgacaagaactgtacttttattttcagttagggagatagcagatttcattttattaacaaaaggatccattggtacactcaaggaagaaaagatacaaaaatttaaagattaactgttgtagaactgctatagaacaacgtagattaaaccataaaaggaagaaactgaatgtgaaatgcacaaaaccgaatggtaactgacaacaacggccacagagcatgaacatgggcagacactctttaagcaagaaattattcttatattattattcaattcatagtatgcaaataaaaatactctttctttttctcttctttttcattttaattaaaactataagaacaaataattaattatacatatataatggcatacattattatatatgatcactgttccattatttgatacacctcaaagacaatgtacgaaaatcaaatgatactagttttgggacttgtttggtacgtagaattagactgaattagacacgctaatttgttcagtctagtgtttaggcataatgaaagtctaaataacttaactaatctcatgtgtctgaaattatttatcctaccagcatggggggataaataatcccatataggtgagattttttttatcattattttaaattttaattttggtaatatattctaaacttattataaatttattcatatattttttataaaaaacttactcatgaaaattaataaaaatatgtaattttagattatcatacataaatttttaaaattcaaaataatattcattaaataatagctacttaaattgattttaaga

SEQ ID NO: 27531 - DNA, 2532 bp, Cannabis sativa
taattaatatataaaatgtaaaaaaaaatataatatattaaatatgcgggttggcgggcggcttcgggtacaacccgaaaaacttaacccgcgaacccgccgaatctttttttaaaaaataaaaagttgctggttgaccgggtcgggttcgggcaagttgcccgggttcggatcgaacctgctcaaaatgtttaatcctaattgccgcacaagactttgcaatccaccactctcgctctctgctcctccaaccattcgaagaaccactgcgagttacaaaagccactgccagttgacgattgagatttatctctggtcaagtcgtgtctcactgtgttttcttcgtatggttggtgtcgatgaatggtttggaacaacatcgaatcattgctcacaagctcatgacccttttcttctttaatttttatacagatcagagttttgtttaaaatattaaaaagcattacttctaattatatattattcttttagataattaagttaatttgggagtttttggagtatattatagcatgtatgaattttcataataaaagataagactttcttgctaaaattttgcttttaattttgaatggttgagacatagatttcaatcgaatgcttgctgagaataatgatatttatttgaatttgtgttgatttttttttaaatagatgggcattttactaatttgactagttgaaagttttaaactaatatgaggatggttaggtttagagtgtttgatcttccgaacaacaagcttattttgatagtcgcgacaatctttgtaattataaaattttataaattggttgtaattttaaaatgggatcctgtattatgtagattattatatacatttaagattaaaagcttaattgtaaaatttttaattattcacgtttttcaataaatctgttgattagcaatagagtgcacagtaaatcaaaatcacgataacgtgcttaatatagtagggcaccgttacaatacaaacctttttaaggcgaatagactgactcgtagagtaaggctccttaacgtctgaaccacataaaatctccatctcctttattagggtgtttaattatttctcaagctcttattatattagtttccaaaattcttggtaaacaactgtgtttaaagtttcaaaattataaaaatactgtgtttcagtaaaatacataattaaccctagaaccacttaacaaacaacatgaaaacaactaaaacaacaaaaatataactacaaagcaacaaaaaaaaaaaaaaactttgacctaattgcagtaagtaaaataatataaactccttaatatctttttgtttacaattttttttaattagttttgacaacttgatttatctttgggtactattatatttgtttttcatggaatttattgttacaactttattctttcaatctttgtttcgtttttctttttgagttagtgatagttaaaagacaactataaattgaaaaataactaaaaaataacaaaataaatgcaacatatacaagaaaaatattgtctaaaataaattaaaaatatacacgataacaaacatataaattaaacaacaactgtatcaaaaaaatacataaaaataactataaaacaactatataacacataaacaataatataaaaaataactataaaataacaaaaagataactataaataaacagaaaaataacaagacattaatcttaaaatatgcaaataatgaactacaaaacattcaaagctgactaaaaaaatataaaaattaaaaaaaaaaaacttttttgaaactttaaacagtaaaaatgaaaaaaaaaaattaagtaggaaaagtataaatgtaaaaaaaaaaaaaaatcaatgtataaatataaagtttggaaaaaaaaattaattttttctataaatatctcatataataattattttaatattaatcatcttttaacatatttttcattttttttgtttttgatagaagtttttagcttaattagttataaataaattaggtccaaatatttaaaataattgtctaatttagacgtaaggcaaagttttaattatttattttaaataaatacatgtggacatattatttggatcatccttaacttcgtccatctacaaaaaccaaatacaaattcatcaaatatacgaaagaagaacagaatcacttcctttattcctccaagccatccttttccaagttttacatcccaccctacccaacataactttaatttctccctaaacaaaattatttacttatataaatataccataaaaattcccaacacctaaatttcttcaaagcaaaaaatgtcttcattgagtggtcgtcctcgtgtaatcgtcaacggaattagaagaacaagaacctttcattactttaggtgctttagctgccaacgcaccatccgtacagtcctttcaaatgcatacgaaatctcatgtccttactgctccaatgacgtccatcatcacgagctcgacttttccaggcccata

SEQ ID NO: 27532 - DNA, 2186 bp, Cannabis sativa
  modified_base (1717)..(1719): a, c, t, g, unknown or other
gaacttaattgccccgtgcgttgttgcccccaagtgtaatgagcgcaatgcttggaccagacaaatggtcagtgcaacttccatctacacatgtaacttccaagctgaatttttatgtctcttgcttcttctctagctcttgcttttctcttaaatcttgggagattttaacagatatgcctgtacattcagccacaaattcagcaagagcttggccttttatggccattcttggttggtatgtgatctcaaattggccgagcttgatgtcccacttgagtagtcggctagatgcttcaggtttctataacacccattacaatggctggtcagtgtacacccttaaggtgagcttggaagtacgaccttaactttcttgatgctaagagcaagcagtatgtcagcttctccatgagtgggttttaattttcagcgccaataagccttttactgatgtaatacactggatgttagataccatcttcttctttaattaggactacactcacaacatattctatgacagccaagtatatgcctaattcttaattgtccagaggtttttataggagaagaggttgagctagttttttcttatgctctttaacactcctcaatccattcaatttttttgtttcctctgagtatgttgaagaaagggacaatcttgttcatggattttgacacaaatctgcttaatgctgcgatgtgtccagtcaggctttctacttcttttatttttgttggtgacttcatgtccaaaagggcttggatcttgtctagatttgcttctatccccctgccattgactatgaagcaaagaaatttgcttgagccgaccccgaacgaacacttgaggggattgagcttcatgttgaactctcaaaggatcttaaatcattcatttagatcctccatgtgcccccaatccttttaaagatcatgtgatcgttgtaaagttttttaaaaagcatgtgattgttgcccaatacattatgtctggtatactcaattaatggtgtatacaacactaagaaactaagcattattggaaatggagtggagtctgcatagcaaactctaaacttttctaactcttcatcaattgatgatcttcaatggtagtgtacagatcaaattgtgttctaacaaagttgtttctgaaacatattttgagttgtgataagattgcaatctgactttatgacaattacacattttaaaaatacatgtatacagttagagtacaattatcaaagaaaataattgggcccaaataccaaaaatgagcatttcatcagaaatgttataaggtttaagtgttatattttattatccatctcacaatactagaattgtggaattaagaattaacttgatcaatgggagtgatcgatccatgaacatagtttctgagaaaaatcattcatattttttcaaacttccaccttaagtattagattgattgtgattcacaacaacccttaatttaatggttattaagatttcacaattagtcattaaagatccacaattcattgataaaattctaaccaataatagtattagtaatttattgcaaattactaaataacatacatgttgaaccattcgctctataagagagtgtgttggttcatcattacgatgacttattagaacaaaaagatcaatagtttctagtaattacattatgtacaataagagttcaactacnnnattaatttgagacacaaattaaattgtgaaatgcacaatgttaaaattgtggtacaatatgccatgaatgaagaaatgaatatcctaaagaaaaatatagtttatctttagtaaagttgtctaattgggtggagaacattaattataggttttcaccaataaatactcattaggaaacatagagaaatataaaccaagactcattgttaaaaggttcatttaaaaagaaagaatcaattacaaagagatttacattctcaattgtctttataaatgattctattatagtaacattgacttttgttgatcgttccaattcatgtgtacgtcaatcgacttggttgatttttgctacattttattcaacccaatttaaatatcaagttacaaaaatctaagtgcaacccgtccaattaaaaaaatagtaatccgcccaatgaaactcgtcggtttgatcgggttaaccc

SEQ ID NO: 27533 - DNA, 4229 bp, Cannabis sativa
catatacctcgcgtaccacaaacataattaagaatgatgacctcgccatacctatttgcaatatgggggattgatttgattggggcatttcccacagggtgaggaggagcaaaatacgcagtagtggcggtcgacttcttcacaaattggacagaggctgaacttgtcgtttccataacctgcaagaaagttctcgactatgtcgtcaagagcataatttgtaaatttggaatacccattaagatagtatctaataatggaactctgttcgatggtgatttattcactgaattctgcgagaggaacaagattattaagagcttctcgtcagtatcaaggcctcaagcaaataggcaagtagaagctgttaataaaaccttgaaagatactatcaaaaataagttggacattgctaaaggtagatgggtagacgagctaccacaggtactttgggctcacagaacgactgagaaaacaataacagggtacactccgttctcgctggcatttggctcagaagcaatgctgccagtagaagtcaatattgcgatgcacagaagagatttatataatcaagaagaaaaccaagaactcttgaaattgtccttggatatacttgaagaaaaacgtaccgagtcgtaaattactaatgcagtataccaacaccaacttacatgatatttcaacaagaaagttaagaaagagctctttaacatcggtgacttggtgctaagacgagtatttacaaacacgagagacgcatttgtgggagtatttaacccaaactgggaaggtccttatgtgatcgaagtaatagttggaactggggtttataaattagctgagcttaacagctagctaataaaaaaccactagaatgttgaacgtttgtgaccctactaccagtaaaataatgttgtaatctctctttctgatgtaaatttttaaattcaattattaacaaagttgaagtattttccaagagtattttccaagtaattataaaagtaattataaagtttaattataaagttttagttttattctttaaaattacttgaggggcatatatatgtgtatatgattaactagaatctatctagaaatacatgatatattacaaacccactccactttaaatttttttaaagttttttcaaataattgattaaagaacctttcttgtaagaaaagaaagtcaaaagtagcagttttatttaactcataaaaataacattaagctacatgcgaagctgaatgtctaacgactcgtattttataggaatgtattaaaacgaggcaccaagatgccttggcaatgcttaatccaaggtgtgaatagaaggcttaactattcatacatgcaatcaaaaacatacaaagtgattcacgagatgaattattaaaagtatgtttaagtttatctaaaacaaattataactgtttacgcgaaacaaactgataactgcttgcgcacatagtatattactaactacttaatcaatattaaaggaaaacaagatcagtggaaatgcttaaagtattttacatttgatcgaagtacaattttttaaattgtgagtaaaactcaagtaagcaaatatattaagttcaaatgcaaaaatacaaggcaataagtaaaagataaaataaaaaaagttgggcatccaacaatgcaaatttatctttacaaaagtgctgcaaggggcaaactattgtctcagccatatggaaattttcctaaataaataaaaaaagacacaacttaaaaaccaagcctacattgtaggagacttggatggatcttctggttccacttcaacctcttcttcctcgcccagttcttctttcctagtcttcttacaaaatgcaagcatggcataggctttatcacccaaaaagctgaaattcaaatcatggttagttgaccagatttggtagatggtcctcctgccaatgctgttgaccctgtctttggttttagcctccattttcttcattttttttgtcatgatcagcttggagggacttgacagaatcctcaagttctttgatcttattttggtcggccagatgcttattttctgcctcctccattgtgcgagaaacctcggccacagagtcgttccactttttggctaaggtattcctatgctccctgatctagcgaagctcagtcccgagcatttcaacccgctgagacgaccgatgcttggtaacataggagaggagagaagcctacaaggagaaagaaaatcaaagttagtaaaaatgataaaatgaggaaaagtgagaacaaggagaaaaggaaattaaactgatgcaaaagttcgtaaccccttttggccagactctcagaactgcgtcgcatgagaagatttcagtcgctggagcaaagagtcaagctgttacgcgaaccgttagtagcatgttgcgagaagagttgcgagccttcagtcccaacctcaaggggtaggggacacgatggctcgaggaaaaccatctttgggcgagaaccagagagtttcacctggtgcactaatccagtgggttgctcatgggcattccccacagcagagacctcattcactttctctggagacttggctggctctatggtaagctagtttgaggaattcttcttgttggccgtggtttttgtccttttgagttctttggtaaaatttgaggcctcagcagcttgggcaactctcttcttagacttcttgtcgtctgggggaggacttttgaacatgttctccaaatccacatccatatctgtgaagcaagagaggttcattagctcttaaataaaataaataagtgtaaatggggaaaaactcccacttgagaaggttaccataatcttcagaagatgacgagggaggactataatattcactaaactccctagatcccgtgatcataaatatatcataagggtttagtggatctaaatctcagcttgaatctatgtgacctaatctatccaacgtggtcccgtactgctcggtaatcccatagtaagaacaagtgcaactaatctgaacgtgaaattctgggtaccaactatcaaacctatgagttatgcagtctatgaggaggggattccaagtgtaaaattatatcgactatctcagaaagatactaaggtgttacattcgtccctaagcattgtgggtgaccatccacgttgattacctcgggatgctccttcttttcgaggggcagctctctcgagatagtgtgcgtgagccacgaagtcctcgctttcctctttgtctgggacctggaccttttgccacgaagaaattcttctgaggcaagaaggccaacattcttcagattcttctcatttaataagaaatctgctgctcgcagcccaaatggaagacttagcaggattccgtggtgctcaactatctcatgagtaggaagtggtctctgaggaaccgctgcaaacagacaaaagtttaataagcgaccttaaagatacaaattaatacattttaagtttaaatttccaagaaagggaacttacgtataatgcgaaaggaagttgtatttattggagagaggcccgtcatccagaagaagtcttctttaaactctgtcttgttttacaacctaactatgatcttgcgatcaccagtataagtcccaagatagtagaagcctcctgcagcattcttcctcgtagggactgctttgactgagtaaaagcaggctatctccaagggagtagggcattcccatcctaaaatatgttatacgaccttcaagcttgcaaggatcttatacaagatggggtttagttggaatggggcaaccccgaggtagttacggtactccttaaagtaatccctaaggggaaggaccgcccaagccttgatgtgctcaaggctccaagctccaacgcccgaggaattactcgtgctaggcccactacactcctcgcgtattaccctttctagaggaaaacacctaaatttctcaagggccacggaccttataactcaacctttcctctgcttgatgccacatgatttcaagatgtcgcaaacggaggccccaatcgacctaaccttggattcagtgagtttagactcaaaagtgacgctgggatcctatggggtctttgatttgcgaggcttaggagacataatgtcaaactcaaggtcacctggttcaaaagaaacagtgaatttgggtaaaaatattggtctcgc

SEQ ID NO: 27534 - DNA, 1897 bp, Cannabis sativa
  modified_base (1869)..(1869): a, c, t, g, unknown or other
atccatgtgagaatttttttactaaaattagacaaaaagtctttaaatctaacaatctcaatagttcagggggaatttttaacgaccaataaagttcaggggtaggattcggtacatgtcaaagtttaaggaaaaaattactaattaacctaaatataaataataaggttatatagaatggttttatttaggacataaaactcaagagatcttattctagttatggtgactaaaatgtaaatgaattcatgaaatatatataattttttatatagatttccctcttctatttccttttatgtatattgtttaaaggttatttaattatgaaaaaagtatataattaatgatactgaacttaacaaatcggtacgtatacatgcctctaaatatgttttcaacattaatcaataaattaatatgatcgaactataaataataaaccttactcttgcaataataatatgaaaccaatcatgattcatgatcatgaaacactcaatcacatcaactgataacttagttgttcacatatatagactactatatatatatagtcattatatagcataataatttgaattaaaaagagagatataaaaaggtacaagaagtaccatccatgaagaaagaaaacacagcatagcagataataataataataataatgaattatatcctaattaaatagtctagtaatagtagtagtagtagtatcactgctcgtcatcagtgggaaaataggtcttgatgagctctgtgcagccgggcaagggctggtccctcaagaatcccatgttgttgacaatgtgctttctgttaatgacgccgttcatgtagccagtgagcaaggcgctggccctgctgcgaccctcgtccgccactctgcagttggccatggggctactcacaagcacgcactcgcagatctggtcctcgtggtcgtcttccaccattatctcatatgttccattttcgtctgtctctgcctccatcctgtactttaagttcaatgtgtcaccgtctttgcactctattttcacctttgctcctaaataaaaacaaccatgaaaagaattatatgtcaaattgctcaaataaactaaaaaaatcatgatctatcagtatgtatctaataatagtagtaacaatattatgtaccagcgatgtaagtggtggcggtggtctcgaacccagcacgacaagtgtcacaataaacgcggcctttgatgtggaagggtttaccggtgggaagatgagcgctgacaagagccggaagagcgcatagggcgaacaacactaatagcctaaccatggttacaatgttggagtgctcagagtgcttaaactgattgtttggaattgcaagtagtgaatggggaagtgaggagtattataacagtttggggaggctcttcttcttcttggatccatggactgacgccattcacagtcggtgctcactcacgtggaccaaaccgtatattacggcccatttatctataatttctcttttgctcatttattgcatacagtggagtacgcaataataaactgttcttattaatgggccttgtttagtatatgaatttgacttacttaatgacaagtttattatacaatattcccaatctaaataaattaatggagaaatataacagaataaatgaaaaataatcggaatcaatatttataatatgttgtttactaaatttttttggaaatggaataattatgattaaacgtaatcggaatgcttaaattgactaaattgccgttttgagttaaactatattatatatatggtagttttttttgtaagacatattttaaaggacaaaattgttattatatatttaatattaaaanataaaataaaaataattaaaattcatta

SEQ ID NO: 27535 - DNA, 6596 bp, Cannabis sativa
attattaaattttttctcataatgcattggaatggtttttccttctatttcaaaatgaaattgtcattccaccaaaatggtagaaagaccattcgattggtatgacattccaacactttaatatgcaacaaaacaaaggaattgaatgaaaatattgaatgaaaattattttatttcttttccttatttcttttccattcttttccattccatttcattacctccaactaaacgccagagactaggaattttcctccattgcagtgcggttttcgcagttttttagtttcgcggtgcaggtgcggtttgaaaaattgaaaaaaccgcatgtgcgagttagtttgaaaaaataatcaaaaatcgtaccacccgcaccgcgaacacccctactaattagcatttagattaacgttaattttttatcttgtttattaggcggtataccatagtgccatttcttgaagtaattatttttttttatctctctcaatacatcacgttctcttatttttcttgtgcaacaaattctttcactcttttttctttaaacatgtaataaatattgaatatttattaaaaaaagacaattataatattaaaagttctctcctcatttttttttttttgaaaatatgatattttttctgatacatattttttataatattttagtttttctatttatattttttaatacattaataaacagtatttaaattttaataaaatttaatgtatcaaacaatttaataagttactaaaaaatatatatattttttatttttatatttagatattacaagattaaataaaataaatgtattttcaaataaaactattttaataggttttataaaataatttgtaaataaattgaatagtatgttatgagttacattaaaaaaaataataacctaaaggtattttaataggttttgaacatcatatgagttacattaaaaaaaaaataacataaagttattttaaacaataaaataacataataatatagcctaaaaatatatataaaaaaaagtttcttttactatcagtcgtcttcttttggaaactgaaaaatatatttttctcacatattaaaatagttattttattatttatatatgtgtaaaattctaaaattaattttttaatgaaaaaataatcaattcatatcttattcacataaaaaaaaacaactaaaaggttgcttttttttcaaaactcccaaaaagcaaaaatttctcaaaacgagatttttccgcactactcattgacagtgattcatctcacttattatcataaagtgagctcatgcttgagcaccaagcacaccataaataatgcactacacatcaacagtggtctatctcactcacagaagatagcttcaacgtacaaacttcaaagttttttgcccagtcacaaagagatcaacgctggggggcaagagcaatcaagctcaaacagtaacaacaaaatttcaaacatcgtggcaacaaaggttaataatcaagcatcaacagttgttctaagcaaaaagggccctaaaaaaagagtgggtcactccctaataagagtcgaaaccatgcaagcagctcatgtatggtttcaggtgagccgacattgctccctgtgatagaatcagatcaccactcacagttataactacctcgtggcaaacataactatgactacctccatagtgatcgacaccaagtctccttggaaggtcaacacctagtaacctctgagccatctcacttatctaccacctgtctgtcaagttcttgacagcggttggtatcgaccgtctctttggcaatcaaagagtaaaatgcgaatgttataacacatcgttaacatttgcccaaagaacttcttaactatcccagggggataaggaagacctctttcactgtgataacagtcaaggggaagtggaagacctcattcactgtcaagacaaccaaggagatgaagaaggcctcttctattgtgaatacaataaaagggacgatgaagacctctaaggtaaaagaccaaggataaaatggagaccacacctacaatcactctaaggtgcatctgagataggaaagacatcacccccatcttaggcatattaattcgggagttggtcacatcctcagttgaccaaaagaacagccagtgactattacaacacatcgttgatagtcgacaagaagaccttctccattgtaaagtcgaggatatgatgaagaccttctccgctgtgaagccgaggagatgatgaaggtctcctccgctacaaagccaaggagatgatgaaggcctcttccactgaaaagtcgaggggatgttgaagacctcctatgttgtagatctaataagttgacgaaggcttcctccgccatcaaactgaggagaagaacaagactacctttgttgaaacacaactgagggaaatgccaaagacttcaaggctaaaacttaacagaagacaaagactacatcaatattcacataaatagaagtgtgacaagagagtcaatgctaagacaacaaccaaacatcaaagtaaatgttgacattccaatgtcggcatgatttcaaagtatctcaaattaaaggaaatcactcaaggagtcatcaacttaaaatttcaaattccactattcaacaaggaatggaaattcaaaatcctattctcagtaggaatgcttgaagaatagagacaattgtccaagattgtcaaaattgatgcctacttggtagtttcgagagtaacaggcttagttcacgtcattaagtcaactccacacaagtgtacagttgacttggggcaaatgttaactcagaaactagccctgatgatgtggacattaatgtttgacatgtggaaagaaagatgacatcttggagttgagtagtcttgagtcatagcaggtcgacctaggaagagtccctagccctgcacccatgttgacttcaagaactccagaatggaagttcgtattttaataacttgaatccaactcactatcttttcatattctataccatgaagacatggagcaacctaatacaaggtctgggagctgaaattacacaaacctgcaacctagaagccaatttgggcacctagggtttccacccaacacccaggttgacatcctcaactagggtttcaattttcgggactgtcttagtgcaaagtggccaaaacttgcattgggacatcaaatagacataccatagacatgtttaaggcattagaataagatttgaagcaagttaatttttgagcatccgaggcccgagcacctagcgcctaggttgataatttgtcaatctgggtgcctttcaagtgtttgatcgaagatctgacttttgcattgaatccgtcttcatcaaaaatggagaaataggtcattccagaggaaaaacaacagttcttgggcattaaaaacagggcccaatgccaacattgacacctggggctggccctgcgcccaggttgataatttgtcaacctgggccacaagaaatagatttttcccagaattatttcaagaatcatctccgtctttagaaaatattgagaattaactatttacagggaccaaacgaaacttttgaaaggccagaagagggacctagcgcccaggttaacacctgggattgatctctgtgcacaggctgacatttttttaacctgggctatttccaattcaattaaaaaaaaaagtgctctaggcatctttatcttcataaaaataacaaagattcaagtaaacttggggagaaaactacaaactcgagtccctggaaatagggcccagcaccgaggttgacaatcaacctgggacgttgccttcaattgctcaaatgccaaatccaaagtgatcattgaatcttgcatggttaaaaatgggggaggagaccccatcctcaagttcagaagccttagaagtataaaaaaacagactcctgcgtgctcagtttaaagggcctagcgcccaggtcaataaatggcctggttcgctaggttctgcttatctgaatctgatgttgttttgaatgttcatctagtttttcacaagtgaaatgatccatgaagtcaaatcaatcaaatttacaactttaattttcaacaaattgactcactcaaaaattggaagtttcgagtctttcgttttcgcataaataacaacatctcagagaacacattaccagcttcaccaaagcatgtaaaagggctaagtggtgtcaaaccatcacttaggcatatgaaaggacttcctttggaaaattctacacttttacaacgtcaacttgggctcttgaatgccaacctgggcactggaatgccaacctgggtgctaggacctaactgtcttcagtaaaacgaccataactcactcaattttatccgattgacacgattcatcttgcatttgaaatctatttaagcgctatatcaagtcatgtctcacaccccagtcgaaattctaaagatatcatcattaaaattcaccccaagagagttacaaaaataagctccgagtaactgcagcagaacccgccagacaccaaaaattggccatcaccaccaaaggctaattttcaccgttaaatcatcattaacggtggaaaacaacttatttgtatttttctcctattaatgtgggcctccttcacctataaaaagagagctcacttagatcatttttcacatttagaaaactacccataaggtcagaatttctctctagaattcaaaacttctgatacttaaaacactagctataaataaaaactcgaagtagacgtagcatcattactatggcgacataggggttaactactataaattttctgtgtatctcttattaattacttaaacatcttattcattctcaccaatctagagagctgatattggccactttttagcatcaacaaggttaatattacgtacaatacatgtatacttagttatattcttagtttttattttgattatgtatatttttagttgtataattaacttttttgatatcattcaatagacatcatatttttttattaaaaaatatttaatttaagtgatatttatatataaaaaaatataataatattcaaaaaaatttattaattataactttattttagtcataatacttttaattttataattcttttcattttgttagatttatcatacccttttttatttttatttttatattaataataaaaaaatattttttagtaactgcaaaatgtaacggcattacaacagtgaatttttaaaaaatataaacacttttactatattattattttttaaaaaataataataaatatatattcttttagatatgtagattatgtaaaaaattgatagcataaatatattgtttttagatatgaaaaatacacaattaatataaaagataaaaagataagaaatatatttagagtttaaatttaaatgataatattttgaaaaagaacaatactattgccacatttaatataattaggctgatgttacgtacaatacacgtataattagtttttttttttttttaattaggtttaattaggtgatgttaagtgcaatacatgtatgattaatttttttttttaatttttaaaatggggtttgagattttgatctttaagaaaattttttagctattgctacattggtgtgttatttgaatgcgattatatatacacatatttttcaaatttttaagtaacatatataataatgcatatattgtaatttactatatttttaacaaaaactcacataattaaatttgagtgtgtctatatatttgtgaatttgatataaaaaaaatttattcccaaactttatggtgtgtgaatcagtttaccataattaaaacagaaagtaatcaattccttattacaactattttaatttgaaatataaaataaataataataaagttaaaaatatggttaaaaatatttataatattataatatttaccatatttagtatagaaataaaaaaaatatcatcaaactaaaaattcctagcacatttcatatacaatatatatatatatatataaatataaaaaaaattattaaatttattatattttgatttaataattattataaaaaaaaaaaactactaactattttcagattgtgttctaacatcaacgttttttattattatttatttaatttgttttgtttttttttttttttggaaaaaggtagatgatacgatgatggaaggaatgaatgttatgttggagagacaaagaagaggacatgtgtaaggtgcagacacatttgttttcagagcaaaacaaaatcttggtctatatctgtatacacactacaatgtcggtattattaagatttgcaagactcacccatgtgacttttattttattttatttatttatttatttatttttgtaaaagtaaagcatcttatcatctcaccaaatactcatttatttatataagatagatatagcatatcatatcttattttattttatgttataaaatgggaatagtatctccttattcaactaatttaacggtggaaa

SEQ ID NO: 27536 - DNA, 3662 bp, Cannabis sativa
aaattgcataatagaaattacatcacatattcaatccaattctacttttctttcttacctaagttacaaaatacgataatgaactcgttcaaattcgccatgctaactaaaatcaacgaactgaagacgagtgcttgaaaattgatgagcagccaacgatagcagccgtcggttgctgcagacatgaaatagtaaggattgtaatataagcatataagctctaaatcaagatattgacacaaacaatcaaattctaacctctcaatgaaactcatgaaatcgatctggactctgtgtttcggtttatgagtttttagtacaatactaaatcataataaagtgaaagagaatgattatactttggctattggttcactttgtgtttctcttatccattctaaaatctcggaacaatcttctcgtctaacgtattgcctgcacaaaaacgccattttttatcggttatagcataatgttgaagagaaagagtttccttacaactatcccgaaaattgtacctgtttctagttctataggcctttaattcagaggcttctcggtgaccagtttctttcttcattttaagctcgtcgggtactacaatgtttccacttttgtcgttgtatgcatcgtgaatgaagttaagaaccttgtcctgtaaaaatcacacacgaaaaacaaaatgagagtcgtaacgaggagtaatgtcaccggttttcgcagcaacttggccgaaaaagactgatgaaagctcaagcttcgcttcagtttacttgtgtgatctaccgtgagcacgagcgctcaagaacaaacaaatagtaaaatacatgcgtctattttctttaccgaaaccgaatgggatgtaatgcatagaagggggcatgaaaataatcaatttactttaccgaaatcgaaaaacacaactccattgacataccaaaggtctagaagcgtcgagccagtggtatattttctcattacgaaaccatgtcaattggcgtttcgcaaaatttctgcacgaaatgtgaagtttaaataagacaagtattaaaaaaacattcacagattgatagaactcgagttatcactcggttgttgtcgaaaacctggaagagcataatagaactgtatctcatcatttgagattccaagaaacacagaaaacacaatgcaatattcatatgagattccaagaaagtgaaactatctttctgttaaattcacaatcgaaagtgaaactatctacaacaaatcatacagacggatcatccacaatcgaaagtgaaactatctacaagatatgtctcgttaccacattcatataaaatgtcgatgcccatgaaagaaagttcgcagtacgaatcatacagacggatcatctaacgaaagaggcattacctagatgctttctggaagtcagctaaaaaagaataaaactctctaggagaactcccaccaccttgctccctacacatcaataaatactccatagcctgaaatttgtgattcatatgaaacaaaatgaatcttacatctgtaaacacttccctattacagctaaaaaaacaagtaaaagtttgtccactaaattgtgaaaaaatgggacaaggtaaatgagttatacttgtctgtatccgattgctcgggtagctgaatttgaattgggaagaaggcctatatcaagcaaccatctggcctcggacaaaagtccttcatctcctacaatcgaaacacacaacgaggttagttccctagcattatttcataatagattaggataaatcatcaattggacaatctcaaattatcattgaaattcagcttaggtgacacaattaccagtcagcatatcctcgcagcgataatcgattgatttgtagagatcgagtctttggctagtgaggaaaaaacaactaaagtcatagtccaattccttagatttaatatcctccacgacatcagcagaagagtcggtgtcatgagtatcgtcagttgcagtaggaatcctttgtttccgaaaagaatcatagggtacttcaaatgcagatggaggggatccactagactgtcattccataaaacacagtaaaaacagtttcaatttatgttgcatcttaaaagagtgtagtccaagaaaacgaatggtaaggttgatgatcgacaacacaaattgtatcgatcttgcttgtctatgtttgcatattatgagaaaaaaaaatagacatcgagacattaagggtccgtttggtgcatcgtgttgtgttgaattgtattgtatagtattattttaatataatactatgtttggtattgacttggattaataggttgtgtaaaaaattatactatctttaccataaactggactcggctccggcccccgacctcgaatccaaagcccgtcttcaaaccatttctaagtaggggtgcacatttacatccgaaacccaaaacccacccgagacccaaaacccaaaaaacctgaaaaaaaaaaaatgggtttcaattttagtaaaccgggttcaggttttattaatctaaaacccgaaaaaactgggtcacacctgaatccacccgaaacccggatatatatataattattttataaattttctgaaaagataaaaccaaaaaaaaaacctaattctaaacaatgattacatttttattttcttcttcttcttttattttttttcttttcattttttctgtgttttttttatgaaaaaatgtataaaaattatatctttcaaagaaaaaaatgaaagaaaggtcagccaaacctgaacccagtcaaaacccacccgatgtgcacccttatttctaagtgttacaataaaagctaatctaaatcattcttatgtatcaaataatatgatttatattgtattaaaatttgtaatcataataattaatacaatacaaccttttatacagcctgcaaaatggaccctaaaaaccacaagaggaacaaagagataacacactatttcaaggtagccagaaacaacaagaggcctaccttaatgatttcaaggctgcgtcgaagtcggtaccaatcattatgagctaaaagctgggccttaggatcacctgcatttacaaccaactgaactgcagcatcccagtcttcagttctttgtaactcagctagttcggagtacacttcagcagccacctcttgagaagctttgggaacatcaggctttccgtatacaaaccttttcgacaacaatcaaaattgtatcagttccgccagtagtataccagtatgttaaacaacacaactgaattataagttaaaagaaaacccaaaaaaacaaaaatgcatataacacaagaacatcacctcaatcagcaacattctaattgtaaaaatagcaacaacatcgatataatcaatctttcccgttctttttctttatgttttcgctatgtctttcgatgtttctaactcaagtaattatgaacttttcataaagacgaaattcaaggaaattgaaaaacacatagaaatacaacctaggcaagcaattaacaagcaaatctcattgaagaaacaaactaattgtttagaaaaagaggaaagaaacaagaaaaaatcgaagactgatttttattaaacaaaacgatatcagaatacataccatctcaagtacaaa

SEQ ID NO: 27537 - DNA, 3482 bp, Cannabis sativa
ttttcactttgttggcatacatactaaggaaatcacataagagttgctaagtaaaaacggaaaatacttgaaaacaatgaaagattagagatccacatgctaatttcacaaaggcgaaaaaagaaatatgaataaattatccacatttacttaaccccaaatttctgaaaaatgtaagagatgggttgtgatcaaatttgcatacttgaaaccaaaccacatgtcattatgaagctctgaaagaaaaagtcaatgcccaacagcctcaaaacacataaacgcaccaagtgaagatacgaaattcaaagtacaattccaaaaaataaaactgatacgcaaaatcccagatggtcaaaaaataatcgaaacccactaaaaaatctctaccaccaaaccaatcgaaccaaccaatgacaaaaatcactcaaatacacaaaacccactaaaaagttttgaaattgagcaacaaaacagcaaagatcacatggaaatccaaacccttaacacaaatttgaaaacacaccccaaatgacacaaattcagtgaaaattacaaaagaaaattcgcaccgtattcaaattggataccacaatagagtatcgacgaatcccaactgactttcttcgcctttctcttataaattctcggttagaaaagggggaaataaaaatcaacagcgtcagcttttgtgctccattgctcacgcaagctcgtttggttagagacgagtaaaacattcagatcatatgagctgtggcagtgattaccagatgatctataccgttcgattatgaagtttgatacgatcaaaatgatcgaacggctatcgctaactttatttggtttaggaaattaggagtttgcactttaattttatcttgtgggtcctagttacttactgttgagatggtttataaccgtcggatcttcatggatattcctttcaattggtagagaggtttgtttaggtatttgatccgacgcttcatattgatttttgtgaaaattcattttggcttttaagcttttctagtttcaagagtcgttgattttgggccgttggatcattgttgtccaagtaacgatacgattgggtcaggacaaaactacaaacaaataacaagttgtcgttttcaaaaagcaacaaaagtttgaagttcgaacgacgagtcgtttttacacataaacgacgacgaaaacatgagaatgtgtttgtttacccaaacaaacgactattaaattaaaaatcgataaaactagttgggccgaaatgttatttgtaaatttgtaatgattttatttttacttttacaaaaacaattaatattattaaattagtaagtaatttgtggtataaatatttaaatttaatgatcgatataaataaatacttaaatttaattttttacgctaaaagtacttaagttattatatttttgaaactcttataagtacgataatattaagtcaatagtcatgtgatattaattaattcagttcatacactaaaatatttattatatatttatttctttgttagtttctttattaacagattgtacaatagaggatgatctaaacaacaacataatcaattaagccgattacattgatagacaaaactaattattaacaatgaattatatatataaaaaaaaattgtaaataagggttcataaaaatcttagaattaagcgatagtggtccaagtagggaaattagaggagtggtcatataaaatgggcaaaaacctaaagtctatcgcaattactattagtacaataataaaaacaaacaaaaacagaaagcaaactataaaatcaaaccaaataaatctgaaacaacctcaccactacaatctcacttctctctctctctctctctatatatatataatataatttatatatatatagagatatgctagttccattggcctgtctagattcatatattatatgaatatatatccgacttgaagactaacatctttcatctcaataaaaagaaaatatgacaaattgagagaataaagaccacatcaattaaaatacaaagcaacatatatattaaaaaaaaaacatcattatttaaaagaggataaaaatcatgtgtagcatgactacaaaaatctatcttattatatatatatatgtatctaccctacgtaaatgcgattacgtatatacataaataaatgatggaaagttttaactgctatggctggttttattatagctaaaaaattatatatatatatatgacaaaatattatctcaaaaaaatatatatttcaatataaatatatattataataattaatatttttactattaaattttttacactattgagttgtactgttattcgggacggacccattcacaataatgagcccccactaacaaaaatattgtcttttaaaaaattaaatgtaaatttttcaatttaataattataaaccaaaatagtagaatagcccccataaaattagataaatttaataaaagtaattataatgtagttataaatatttttttatgataaataagcccccacaaaataaaaatcctaggtccgtcactgactgttatatcgaaatataatttttacagtaacataaagagtaacctgttaaaataatagttgataaataaatataaattaattaatacatttcacgcttaaatctaaaaatataaatataaattattaaaaaaaaatactttactctattatttttgtaaaaaggatgaatatttaatttagacatatttatcagctatcatctattattttattcattttacgataaaagtaaataaattatagtaaaataattgtgttaatataaaattatatttcaatgagtattaataatgaaccatatactataagggcatataactttatagtgtaaaaagtttaggaccaaaaatattaaggagaattacttcatatattattcttttaatttttttttttttcaaatttacggtttgagtttctaaaaaaatttctctagtggtttatatgtaggttgctatacaatttttagttatacgatttaggttgttccgttagttgtaatatgattttctatgtagaatttcgtaaaaataaaaaaaaaatatattttaaagtgtaaaaattaaaaattaaaaaataccaaatattaattattttatggttcatatatatatatatatattattatcaagtcaacaagtttgagatgtacaatatacaaaaactgctacaaaaagtagcaacacaattatattattaataaacactatatattacatgtaattattattaatttagctgtatatatctataaactatatgattaattaacgacatatggataattatgctttgcctcttaactcttgtcacatgaaactacagtcgaaactatataatttacagcgtgacatatatatatgatcaattgtacgttcaacactttttttttt

SEQ ID NO: 27538 - DNA, 8451 bp, Cannabis sativa
  modified_base (100)..(113): a, c, t, g, unknown or other
tccgctgccatcactgtaagttattcttaacttttatgtgttttgtttatcgttttagaagttcatgtttaggtcgttaaatcaacatacttgtgagtannnnnnnnnnnnnngtaaaattaattccaacatattattatgctgaaaaaaatacctctaaaggcttgttttgtagtagtgcctaatgatgaacagccaaatgatcaggctcattgtcaagaaaagtctcgaagaccccagggacgcacaacccagggtaatggaaatcatgatttactggaatcttctcgcaggaatgctagtaggaggcaacctcgaactagggaacaggaaatctctcgtggcaacgagagagatcctagaacttaacctagggcaagtaggttgcccccgagacatcattaacgtccttctcgcactaataaggaaagggcacatataaaccccagcaggggcatgtatcaacccgttctcaaaagagaaggccagtacgtgacaagataagttcaagttctagacatacaagaactcgtagtggatctatgtgaggaggagatagaacttgtcccagtactgattgagaaagtaggggcacaagtagagcacaaagttactcagagaagaggtttgtgagtaactttgatccacaacagccagatcttcgtaatcaattgaaccagaaaaagctgaccttcgtcaacaactcaatcaaaagcaagaggatccgaaccaattgcgaatcaacgagttggaggataagttcaggaggtaccaagatggggaattggggaaactacctggttacgactcggacgaggaacccgaacctttccatccaaatattatgagtgctgaattcccctagggatttaagaaccctcacatcttgtcatatgatgggactacagatccggtcgcccacttaaataatttcaacactataatgtgagccagcaatgtgacgaataatttacgctgtattttattccttacttcactagttagggcagcgagaagctggttcaataaatttacccatcattcaatcacctctttggaataaggacttcaagaatagtttcgggcagcaagggacaggcgacccaaagtgtcttctcttactaacataaaacagcacccgggcgagacacttaaggcttacttaattcgcttcagtacagctgatgtgagagtaagaaatttgagtgacagtatccagctcaccacccttcaagcagggatcatgactgatctctcaacttttggaggcgagttgtgggatgacttgtagggtttcccggtgaagaacatcagtgagttcaatgagagggctcaggtgtttgttcgaaaagaggaagcaagaaaagagatgaagttgttaaggattgactcgggaagtaaacccagcactgtctcgataagtaccgtctcgacgaaggctgaaaatctaggaggctctaagagaaaagatgactctaaggaatcagctaaggagaagaaaaaatggaagaagcatgacaagtacgtgccaatctacactaattataccgagcttaatgaaactcgagaaaatatctatctcgcacatgagcacagggtcgcattccgtaaaccgtagcccatgaggaatgggagacgtaatagagatgcaacaaaattttttaagtatcacaaagacattgggcatacgacagaagaatatcatcaactaaaagacgagatagaaagccttatctcgcgagatcacttctagcagtatgtgaaaagacaaggtgatggacaaaaccatcctaatccgcctaataacctaggcaaccagagattacaaactcctcctctcgaaggagagaatattctggttatcacgggaggaccacatctcgctggagaaagtaacaacacccaaaagagatatgtaaaggaagttaagaatgagcagtttatttttgctttgaaaccttctaagaaagctaagaccgaggaacccccggctgtgttctcggaggaagatgcaaagcacatgaggtatcctcacgtcgacccactagtaattaccatccatctaaccatcaaaagggtaaaaaaggtgatggtggacaacagaagttcagtgaatatcctgtatacggatacactggaaaaaaatggggctagaaaaagcaaagttataacctttcatggtaaatctatgtggatttacagaagacaatgtcgttagtcaaggaataattgagctcccattaaccgtgggtgaagcacctttatccaccactataatgcaagactttttagttatcgacctaccatatgcctaaaacctactactgggtcgaccaacattaattggactagggtcaattagttcaattaagcacttatccctgaagtttctaacactgacgtgtgggagtagtacgaggtgaccaaatgcaggcttgcgaatgctaccgcatagagctgcaagatagaaaggctagtcaccagctaatggcagtcatgactgaagaaggcgagaagcaggataaggatcttgatcctcagattcaagatgaacggaatctattgaaaccaactaaggaattagaagaagttattctagatccagcaaatcccacaaagtgtttattcattgagaaaaacctggatgaaaaactaaaatagcaactaataagttttttgagggcaaaccaatatcagtttaccttgagccactcagatatgattgggattgaccttaagattatcggccaccacttcaatgtcgacctaagttacctagccaagagacaaaagagacgacccttgaattctaagagataaggggcactcaagcaggaagtggacaagttgttagctaatgactttacacgcgaggcgttttatcccttgtggatatccaaccctgttcatgtcccaaaactaaatggaacttggagaacttgtattgacttctcggacttaaataaggcgtgtccaaaggattgctttccactaccaaggatccacgagctagtagatgcaactgctggacacgagcttatgtcattaatggacgcatattttggatataaccagataaaaatgtatgtccttgatcaagaacatacaagctttgtaattaacatggggctttattgttataaagtcatgacgtttggtttgaagaatactggggcagcatatcagcgactagtgaatgaaatgtttgcgggacagataagaagaaacatggaggtctatgttgatgatatgttggtaaaattgataaatagtggagatcacacaacagaccttgtcgagtgctttgggacacaaaaaagtacaatatgaaacttaacccgaaaaagtcttcctttcgagtttcctcaggaaaaattttgggattcatattcaacgcgaggggcattaaagaaaatctcgagaacatcaaggcttgatagatatgccatcaccaactaacccgaaagaagttcaggccttaacaggaagaatgacagctcttaacagattcatttcgaagtcaactgataagtgcctaccatttttcaatgtatcgcgaggcaacaaaaagttcaaatggacagtagaaggcgaggaggcctttaagagcataaaaaggcatttgtcaacaccttcagttttggcaaaaccaataactagagaaactttactcctctacttggttgtctcggacaatgcgattagtgcaacaatagtgcgagaagatggaaagcaccagcaacctgtttactatgttagtaagaggttactgggggcggaatcaaggtatcccccacttgaaaaactttccttatgcctaattcacgcatctcgcaaactacgaccatacttccaggcacatctgattaaggtattaactgatcaagccctgagacaagttttatcaaaaccagatgcttctggaagattgataaaatggtcaattaaactagggcagtttgacacaacttatcacccaagaatatccattaagggccaagccttggcagatttcctaatagaaggaataactacagaagaaaatctgcttattcggcgagacgcacatacttggaagttgtacatggatggggtgtccaatgagcatggctcaggtgcagggatgatactaatttcgccagaaggcttcaagtttcactatgccttaagatttcagttcgacactttaaacaacgaggctgagtacgatgccttgatcgctggtttgaagatagctgaagtgttgaaagttaaaaatcttatatgccatagtgattcacaattgattgtaaattaagtcctaggggaataccaggctaaggggttaaaaatggcaaagtacctagagaaggttcggaagaacttgaaaaagtttgataatttcaaaattgaacaaaatcccaagagaacaaaactctaatgtcgatgccttagcaaaactagtctcgcagaatgaattggatgaattaaagttggtaccggttgaggtattaaacgagccaagtatatgtgagaaagaagaagtcgagatgatagatagctcgcctacctggatgacacctatagttaactatcttctcaacgggcaacttcctgttgacaaaaatgaggcatgaaaactcttgtatatagtgactccctatagaatcgtagaaggcaaattgtatagaatagactattcgatgcctatcctacagtgtgttcttcctgcagaagtaagcaagatcatcaaagaaatccatgaaggcttttgtgggaatcaggtaggttggcaaagcttgtcaaaaaagattactcgactaggatattactgaccaactataaataagcacacccacgaatttgtcaagaaatgtgataaatgttgcccctaaaagtcaaaacatgatttttgacacgcttttttagtgcaacttttaggagttttaggggcgacaaaagtaaacgttagatatttgtagattatttttaggggctacagaagtctctcctaactaaaggtgacttttttgtcgcccctaatagtacttttagacgtgaactagtagggacgactttttaggggcgacttgtcacctctaatagtgattaggggcaaatttgtatagttttagcctaatattcatatttgttgtagtgttttgaccctatatacccaattgtaccctatttctttccttctaagagtagaggaaccaaagataagtgaaattttttgctaaagccaatatttcatcttttcattgctatgagtcatatctagtactaaagagcttcttaaactgaagcaggttctgtagacacaatgaaggtctttggtttgcgaatgacttgcttagagtgagtttgcatatgatgtctaagagctggatcaacagaagcaaaagctggtgtgatagacaaacatgctataggcttaggaactggttttgtagggtgacaaacaggagtggaaggtcaatgtgagttgctttaagctcttgaactgttgttccaggactaaagagttagtgctgttgagaatacttatacgtgatcatattattttccatgtaattattgtttaacataaataataattaccaataacgttttatctaaaactttacgaatataaagtttcagaatacttacaatggtctttgctcagcagaatatgtctcctttcactgtaatctatgtgttatattagatttgtgtgagaaagtgttacatcatcatccatggattttgaaatttcagagagagagagagagagagagtggcgatttcaaggagagataatgagagagctttttcaaaaattttgagactgaaatctgaattgtaaaaaaaaaaaaaaaaaaaaactctcctatagcattccttttataaccaaacgaataactattttctctaaataattaaataaaaaagaaaaagaataaatacaaaaggaaaagtaaattttcttgtcttctgagtaaatagatattgaacttagactatttctttagttcacttaagtctaatggacttaaaacgatgacatctttttatttctaccatatttaattaaacttttaatatttaaacacttgttttattttaataattacatctaaataattatttaataaaaatatattttaaatacttagtattaattactcacaaaacaatgtataattaataattataccattattttctctttcttttaaatttcatcaccttagtgaaaattctcaaaattgacaaaattaataatgtgaaatctaattgatgaaataatcaattattgtaacctactgttaaatattatcctaaatattgtagaaattatgggcctataaaatcaagctcccaataagtagatctaaaacttaacaaatgaattttctaaacttattaatttctcatgactctactatagactcagaattgtactcttaattttatagaacgctctatattatgtcataatatagatacgctgtaaattatctattatttcaaccagatcaatcaatgatcctttatagagggtttatagtgagtatgaactaaaattatcgttttaccccccaattgtatattatcctagtttcttgtaaagggatttcagtaaactaatataattaccgaaatgatatctcttctgtaacacctttaaccaagatcgaaggaaactatcatttcacttctaacataaaagttatagatgtccatatatatgattaacaatctcattcaattatactaccaagttctcaagatataagtatgggctagacctttgggtaagctaaaaaagaacaaatcaaagaactcgaataatataattaagtttaaccgtgattcgagtttaattgatctattatcaattgatattgactaataatattatagcacttaagattataatatatgttcgtttttcaatatcgatctagtccaatgtaaaccaatacattcgatacaagtctacataccactttccatagtgtaagtagactacatcattgattattacgtcagtgtaaatccagtacactgataaatcttgagactaaaattattcaaaacatatactcataattattttttatgtgatgacgtcaataaaattatgaataactatataatctgaatttaataaaatttatacattaaacatataaacatgtaaataaacatgtgaaccaagcgattgactaagtcgaagtatgattctgatctttattgaattaaaataatattaaattaaatttaaattttatttagggcataaaatcctacaggtgttgcatgctcagtaacagtatttggaggctcattatgagatgttgcaggctcaagcactggtagtgtaggctcagctggaggagctaaaatagttctagaaagcacatttagaacactttgaaaaacttggggcacttcaaaaaatctgttagcatgtagatgaacttggtacacaactgtggttaagagtggaagacaaaggcatagatgtgagatcgggaattgtatgaggaagcacaccaaaaccaagtagaggattgggctcagcaaaccctccatgggtaggaatattgacagaagtgaatgattcttttgaatagacaagatttagagagttcttagtgattgaaagatgagcataagaaaacagatgttcataagagatgacatctcttgaagtgtatagtcttcctgacacttgtaacccttgaaatttagactatacaaaaggaaacggtgaggggtggacctgaattctaacttgtatctattataatgtctattggatagcatgtgtaaccaaaggttctggatttagcgtaatctggtacattatggaagaaaactactagaggtgacttatgacctagcacaagtgtaggtagcatgttatgaatatagacagaagttctaatggtctcatcccaaagttttaagggtaacttgagctagtaagataagagtattttccacaataaatctgtgttgtttgaaaaacttatacaagatttttattatttttcatgtaaataattatttaaacataaataattatttcatttaacatgttaatctaaaatctagtaatgataaattatttttagaatacttaagtgggtgttgcacagcagaatatgaatcctccctttcaaaacataatatttttaaaaacttggtacaacaaaaataaaataaaaagagtgtgaaaataaaaatataaaatgacaaaaaaaattgggtattattgtaagatccccaatagtaaaagagaaatttaaatttctatacttaattgagaaaatacataaaaaaatatttatttttataatatatcaaagatataattatatacaaaatacttaagtcaaactctacttttctttacctttccttttttgcaaaaaaaaaaaaattcttaattttttttctagccgatggaacaac

SEQ ID NO: 27539 - DNA, 1359 bp, Cannabis sativa
ttaacaaaacagagagtccaattggtaacttttactaaacacagagtctaaaatggttaactttcatttatttttattttattttataatattaaatatgcaatgacaattttgtcctttaaaatatgtcttacaaaataactactatatattatagtttaactataaaggaaatttagtcaatttaggcattctgattatgtttcctaataaagtgaataagataaattattattattcaatttttaaacaattttagtaaataacatattataaatattgattctgattattttttatttattctattacatttcttatattttattccgattaatattgtatagtaaatgggccattagtatttatcagtgtagaatatagatatttatgtttttggtattttataaaattataatttaaattttttatttgaccatctacattatacttaaaacttatagtaagtatttcatctatttttaaaaaaatgtgaataatttatgctatcaaaaataaagttcaaagattagttacacatgtgctctttctttttgtaaatgtgtaacaaacatgcacatgtttaaattgttacacacttaatcccttaattttattttttttttgccaaaacccccttaagtgtcattttgtttgcaaaggtaaatttcacttttaatgtttaattttacacaaatgaaaaaagacaaactttttggtaccatctcaaatatatgcacccttttgtgtaaacctaaaaatatccttctttaccctaaaacttttacaatcttctcttttctctttctctcttctctacaccaaaaaaaaaaaaaatatatagtcattacactaatttttggagttattaactctgaaagataaatatatttctatcaaggaagaaccttattacaagaagataggaggagaaggtcaatattttcaagattttaggtagtttttgggtggaaaataaatgagtgtgtaattttatgttagatttattgttaatgttaatttttttcaagtatattgttgttttgtaccttaaatatatatttagtggtgagttttgttaattttttagttagagcatcaaatctgcatttttctcaatttttttcttgcgtaaaattcgatgcttactcgatgattagtattttcaaaagttagagatgatatttcaatcagtgtttgatacttggttgatatagattagttatagtgcctattcgattattacattgtcatgaaaataatgtgtagataccataagttaatttataatttgttgaggggccaaattataaatacccaaaactcattatatatcgagtctataaataggtagtggtc

SEQ ID NO: 27540 - DNA, 1502 bp, Cannabis sativa
cactctcaattatatacaacgctctatatgttccacgatatagatacgctatgaattatccatttggccgacaataaaattttggggtccaaaaatgccactgtgcttcaactttgtgcgaagatcatgtggctaccattgtcgaggtggagccaggttgtgctgtcgtggtcgaactggaagtgctttgtggtggtcgatgtcggagtggaacttggttgttgtcaggtaagaagaaaagaaagaaaattaggtcgagaaagtgggaagtgagagaaattgaatattaagtttaggaggggtaggtttgatattaaaataaagattagcatatttttttggggagttctatttgcaccctataaaatgataagcacacataaggaagatagtttgtggatgaaatggatccactatgtctatattcgaagtgagaactggtggagttacaagtctcctgaccaaggcagttggtattggagtagacttgtaacattgaaagaccagttcattgagattattgcaggtcaatacacttccattcaaccttattgtgttgctaaaggttatcatttgctttggccaaatctggagaaagtaacttggagccagcaagtttgggggagattgaacactcccaaatacagtttcattacctggattgcaattcaaaataggctcaaaaccagagatatgttgctacagatgggaatatcaggggaagatcagtgtgtattatgctgccaacacagagaaacaagctgccatcttttctttgagtgttctgttgctgcagaatgtttgaaggctttaaaggattggttgcaatggcatgctacaactgtctctttatctcgattaataaggtggataggaagagctaaaatgagcaaattcaagaagcaagttcttgcagcctcaactacttgcctggtgcatgttttatggagagttcgaaattccagactttgggaagactctcatgagggcacagattgcttaattcagaaaatcaagcacactgtcaaacaaagaatcactcaatgttggcctaggaaagttaaggaaagggacaaagaatggtttcaaagtttgtaaataataagaatatagattacaaaaggattatgctagcatgttttatatttgtatagtttgatcttgccccttgttggattctaatagcttgtaaatcttgattttgggcaatacaactttattgattcatcaaaaaaaaaaaaaaatgataagcacaccttattattaaaaaaaataaacttaaataaattttaaaaattactcttaatatattttttttaattttttcctcacattattttatttttatttcaatacttatttttataattttttctaaatcatgtatatatttttctaaaaaattttttctaataaaaatttcatataattttttattttaatttttatcataatcttttaaatataatttatttttatttgtgtaacgccctgtccaacag

SEQ ID NO: 27541 - DNA, 4996 bp, Cannabis sativa
  modified_base (4945)..(4951): a, c, t, g, unknown or other
acttttttgtctcctaagacaggaaaatgtaaacaataaatcagatttcttaaaacttgtgcaaatatatctaaaataagtgttgtaattagattccttcttttttttttttctatcaaagtaaattggatttcttttagtaatgtgctatccattgtgtatgttttttttttttggtgacaacgtgaccatccatattatgtatgtattactaccatttttatttttatttggttaataaaatgggattaaaagtgaaacacaagcattctgattctatctatatctgacatatgtatctctatgacatttgtactattaataaaagagtagagtacataagcagcttttttttttttttttaggaaagtgtacttataagagattggtaaaattagagttttgggtgattacaaaataagtttgtaggaatagttgatagcggaataaaatcaaacctctaatgagtaaaagtccaatttattacattattatgggttacaaagttacaagatctactaatatttgtgaaactacaaccaataaacgaaggagaagaactattaaaaaatgagacatagttttcaataatccagtgaaattcattctcattaagcgcattgatgactatcatcgagtcgctctccacgataataaatttggacccgaggtccttcgcaaccgtaaatgccaaacagtcgtaatgtggcaaattgggcattagcagctcttaaaccaagtttttagaccaagattacacctatctttgtgcataagcagctcttcaaacgactctttacaccaagattacccttcttttgtttgatatttactaattggtttcacacaaaaaattacccttttttgttggtatttatgaaaaatatatattgttaaagactatttactacatctttttttctttttatgcactatacttaattacatatgacattaattacatatgacaattgtgctaagaaaatagattagatatgactattactatgactatatattatcaaaataataataataacaatacatttgactttttgaatcatttcactgattattgtattgcactattctctcttactttatttcaataaatggatagtatacaaaataattcttatttacttcaataattatgattatataattatttaaattggatacttcattactatattttaaatgaaacttgtgacatgttcccacttgaaatttttcgtttttttaacaaattattatgacatgattgaagtacaacaaaaaaaaaatactggagtagtcatttctgaatttaaataaaaattatcatttgttacaaaaatttacatattaaaatataatatcatagataatataaattttatttttgaaaaactcctatttatatacagcttagagaacatattttatcaagcaaacaaaataagatttattacctttcaaaaaaaaaaaaaaaagatttattatgtattataattttaattaaactatgctacttaaataattaagacaataaaattttattttttagtggtgttttataagtaaagttttatcaaccatgctaaaatattagatatcggccaaaattaaacccacataatacacataggaaagatattctaatctttcaatttattttttaaattgcccctctcacttcaactttcctcattctctctaactcccttctctctcctctttctatcaatctcatagttctctctcctcaaaagaacccaacaaccactcgaacccacttaaaccagtgaaccaagcgtcggaccttcgagaaccacttaaacccaacgaacccactcgaataaagatatcgtgaaccacttgaacccacttaaaccaacgaaccagcaatcgagtctctaatcaccgtccgaggtccaccaccgttgtttgaacccacgagaaccaataaaccaagttaaaggattttttgtatttttcatttaatttctctttttaatacgcaataaattagtttatttgaggctagtttgggacatgagttttctctaatttttgtatggttttacgatattaagcgatattgtgcgagtaatcatgccaagtggtggtagtttttgtattgttttgcgatactatgcgagtaattatgccaagttaggatagttatttggggtttgtattgttttgcgatactgagcagtaatgagcaatcatttgcgggtgatagcccaagtaataataattttaacgacgattatgcgataattaagcgatttacatgggatattgtttgcaattttgatgtaaaaaccttctacaggtcttaagcgattttaagcaacgtttgtgtgatttgtaagtgttgttttgcgagttgtgccgatttatttgcgacatttgcgattcataatcatctttttttttgtaaatgcagatggttccagagctcattcttccattttcagagcatttcctagggcgtatcacttacagaaggaacggacactttaattcaataatagttaagttcgaagacttcggtttaactgacaaggtcaaggaaattccctttgaatttttttggaatgctaatgatttgaaattctctagggtgatagtgcatcaattattattgaggaaaaagaaggtcaatgaggttaaaatcatgaagtgtgattttacgtgggtaaaacggaggccagatttaggtgatttgcatttggtttgatcaaatgcctaaagatgagcgatgggtctttgacagaagaattgaatgcacaatgcaattctgattagatactacgagaccatttcaataatgtaaaaacagtgacatttaaaacccattaggtagattttaaggcgtgtgatattgcagacgatgtgtacaagctgagattatgtacttttgttgaaggtgttttgttgtcatggtctgaggatgtgtatatttggacagatatgctaaagttagtaaaaaatgtagataacttttttgagtatccttagagcctcccttcttatcagatgtggttgtcttccacaactaaaaatatgttgcagttacgcaaaactacatggataagttgtcgggtaagaaagatgagaagaaaaaaaaatctaagaaggagaaaaaagtcactcaaccaaaaacaaagtataatgtgtatgtatatgcatcatctttataatattgggtttgagaccatgcaagatgtagagaagaagtatggccagtgcaaagagataagattctctcaaatgttgaactggagcacccctgattcgtttatgaaacatgatgtgaagcaaactgatgtggtattactatttgagaaaagagtatgtgaatctttctctatttgtcattgttgttctgctatctattttattatcagtgttttttgcaatttttgtgcgactgttttagatgttatgcgatatttaggcaacataattgtgatatataagtttttacaatatatataactttttgtgatatatatatttatgtttgtgcgataatttatgatttttttacttcgcaatttacattataatttgcacaatattattctatattttttcgagtttacctctcaaatcgtttttgatctttgtgcgatattaatgtatttttttattcgttttgcatatagttgttcttcaaattttgtatcctcggaattgggaggttgattattggaagtctaactgtgagggtgaagtcctcacggtggatatgggcttggatgagatagaagaaacagaagttggtgcacaagattccacagtattcgagatacaagtaaaatagtttatcgaacatgttcaaagtgtaaagttcattccaccatcaccactgaaagaaccaacaaagttgttggcatcaaccactatgcctctaacctcaaatcctgcatccaataacgtcgactgcctagggttagccaagagattagagaaggttgaagcccaacaacttacgattctggctgcacagattgagatgaaggctacatttaagagtattccgataaaggtgaaaaatcttatcatggatcaacttagaaccatgaaaagtttattgtagaagcaaccatcatagccatcagagctaacataaccatcagagttaacagaggaagaaggtcgtcaatatcattgtaatgttgatgacaatgtgtacccaaaagattgggaacccaacgtagataaagttctttctactcaaacggatgccattattgttgtcatcgatgaggttagaggcatttgtgagggggaggaaaaaacagaagccagttttcttgaaggattacacaaaggggaagaagaaataacaaactaggctagttgaggtagatactttgaagtcaatagacccacgactttacaaatttttccaaaggtggattacttactcgagggacaacgatcgttctagagatgttcacaattgtagtgttgatcggagttggtttgtcaagttaatggtggaaaaagaatggcttggtgatgttgtaagtagttgattcttaactgtttaaatttagtatttttagacttttgagtaacatatatcaatgtttatgcgatatttttgtgatattggtgtgtctttatgattcatatcaatgacttttttgcgagatcaaacctatgtctttgcgataaacaacctatatgtggtttgcaaattgcaaatgcatcgcttgaactcgcaaaaagtcgctaaatacggttcataaaattctaatgttgcgtgtgacgtgtttgcaatttttgcgagttttatgcgatttgaatgccgattttttgctttgtgtgacttatgtgtggattttgtgcgaacttattctaactttttcatttgaaatccaaaaaattgatgccatctttcacttgtttagaaggaggaatgtaaagcccgcttagttannnnnnnaattagcagttgtttatgtttaaattatgaaattatttatagcta

SEQ ID NO: 27542 - DNA, 1366 bp, Cannabis sativa
acgaaatgtgccaaatccaaattttgaatggtgtccgattcatcggaagctgttccaaaatctcgcagtggactcaatctccgtacaaatgttgccatccgtccggaccgcagaaggcacagcggccttatcgactgtcgtccttcccatacaattgttagttttttagaatatgtaactttttttgtgacttatctttttggatatgtattgcgtatatgagacaccattaaataaaaatcagttatatattcactatataatcggttagagatcggacgaaactggcataattttacacgatttagatatttgtttaggtttttaaacgcaagagaaagactacaaacagagataccgttataacgtcagaaaggagaatttaaactctctaaattaaatccttatctacttgtaatgtatcttttatgggcattcccatcatcacttctcaaaatattttaaagaaaaatatttaaaaacttttgataagaattcttgaattaatgtaactagtttagatagtgttgatatgtccttccctttacgtgggatcttaaactaaatgtaaacagtcagactttatatatgtgattagaaggttgattgtcgaacaccacctaagagcctcgacgagagcttgtgcctcaacatacataggagaggaggctccagttttagggatcgataaacctgcaacgatttgacctctccaattcctaactacaactcctaatccagtaggaaatttttttgtatcaagggttgcatctgtgtttaatttgaaatctctttccttcaactgttgagcaatcgacgggcttccttcttaatgggggctcgagatcgaacctgagttgttgtccccttccacagtattccccgatctgagggattgaccttcgtggtaatcatgcaacaaacctttgacaaaagcttccacagataatattttttttgttaaaaagagcattattcttccgtgaccaaatccgtcataccaaactgataaaaataacaaaatcttctttactaagttggtcaaagcctcttcaaagaaattccttaatatcacatttttaattactattgtaaaaatggttaaaagaagagtttctctacacatatttagctctagagcaatctaaaagggcatgggatacaatctccactttattcatacaagatgaacgattagggctgctaagcatatttttgttaaagaggttcaaggcacacgataagacatgattgaaggctttccaaatgaagtattttatatggggggatcttggtgttccaaacagttttccaccagagattgaaacaatcatgtgttgatgaaaaggagaaagtgagttagcta

SEQ ID NO: 27543 - DNA, 2808 bp, Cannabis sativa
gaagttggccgcaccccacaaaaccgtccccaaatgatctctagccaaagccactatgcacatggactcaccaccaaccttcacatcacagttaattttgatctagtcttcaggaggggtcgaccaaccatgaggaaacacctctattgtcggggaaagcaagcaggcagcataatctgtaaaacaattagagatacagtcaatagcagttttaatgttacacggagaatagttatgaactttctcatttcaggttgcataaagaaacagcttgtacgtatctacccctttcatcttcaggttccaaataaatgttacccaatcccagaccctgcccccagagtcggggatcggaaagattccccacggggaagctctccacaaatggtacgcaaaatcataatgaaggaacaagtgctccatagattcctcatctgccccacaaaggggacacgatagctcgtctatgttgattcttttcgcaaggagtcccctaatggggagggtatttgacaagatgctccaccacatgaccttatgccgctccaggatttcggagctccagagtttattccaaagtcctgctgcaacgacatagtcaggagctcttcccaaagcctgaaccaggtgagccgatttagttgagaagatcccattttgctccttagtccatacccacctgtctcctcctactccaccaggtttacctcctttgattatgtcgcgcaccgttcccgaatcaaaatgagtctggagtttcggaatatcccactccccatcctccgtaatcagctcagcgaccttagtcacacttccagaggacgaaccactaggtttggcgtaaaaattcttgctatgcaacacccaaggttctgaccagacattagtatctttcccgtcagtgattagtttgaacgctcctttcagcaataagtctttggatttcaccacatttttctagatccaagaatcggatcccttataggatccctcaaagaacggttttcctttaagatatttggccttcaacactccacagcaaagcgattgcttgtcattcaggagatcccaaccccactttgctaggagtgcctggttcatctccaaagttttacggaaacccaggcctcctctagacttcggaagacacagacggtcccacgccttcaggcaaagaccccggttaccctgttcgcacccccaccagaaatctctaaacataccatcaattcttgaggtcagcttcttagaaagcttggtagtttgcatcgtgtaaattggtaaggccattcctactgatttgatcaacgtagcactcccgaccttagatagggatttcaatttccatccatgaagcttcgagaaaaggttcacaataatgaaattgaaatcagcgtttttctgcctggatctaaacaacgggaggcctaggtaatgatgtttgattcgaccatacttatacccagttcatgcatgatccctcttctcataccttcactggtgtttttgttaaagaaaatcgaggtcttaagcttattgacacgctgtcctgaccactcacagaacttctccaaacactgccagaagcccttggcctcgacaatggttgccctacccacaagaatgagatcaccagaaaagaataggtgagagagtctcggcccatttctacttagcttaattcctattaagttactcgaatccaaggctctctccagcaggcgggagagaatttctgcagcccaaataaacaaatacggagaaaggggatccccctgtcttaacccacactccggcgttaaactgcatacttttcccccattaagatgcaagttaaaggttgttgtcgaaatgcactggtgcacccagtagcagaacttgtttgggactttaaaggtgctaagaacatgatcaatgaaagcccaactgagtatatcatatgcattaaccaggtcaattttgattgcgaacaaaccctctttaccttttttgagcttagaggagtgaatgatctcctggaccaaaacattattatcattgatgctcctccccaggacaaacaccgcctgagtgggacatatcaatctcgggagaatcggtcttattttgttggcaataatcttggagatcaccttctaaaccacattgcagaaggagattggtctaaactgagtcactttctttggattgagcacctttggaatgagaattaagatagtcgcattaatgcccttatgcatttcacccgtaacaaataagtcttgaacaacttcacagaaatcctcgcctaccgaggtccaataatgcttatagaacaaggcagacataccatcgggtccaggagcctttaaactccccataaagaagagtgtctggcgaatttcctcataatcggggattttcaaataggtcattctattcattggccgagagatgatctactagaaggtggtccaggcgttccagcagtcccttaacagtattggtgaaaatacttcccaaaaaattggagaattccttgcctatgtctcctcggttactaatccacaccccatccttgatcaatatactctccactgcattatgtccatttctaatggtcgccgtagtgaagaaaaatttggagcatttgtctccctgtctaatccaagatatacaggctctttgctggcagtaagtggccctctgcctaagtgcctcattgaaataatatatatatatttatataatcctattagggtaagtgaagtggtgctcactacaaaaaaaaaaaaaaaaaaaaaaacttttttggtttctttttttttt

SEQ ID NO: 27544 - DNA, 973 bp, Cannabis sativa
tgtcttgaccgtgctggtaacgaacttgtattgaaactttctgactctggaaagtttcatttgttaccatctcgataaacatttgaatcatcttcaaatgctttttcttttcttaattcattttcatttgataatttagctgaaggctttgaagtacggagcagctccgattgcgctaacctccgagaattacaaattcaggtaacttcatcttcttcataataacaatgaactacattttttttccctaagctcataaaaaatgaaatgattcttaaccatcttcttctatttgagaagatattttgtagatcatgattttgagtcaactaaattctcacggttcatcagctctacttttggaaatttgtctcttgacgaagcattgaacgaatttgtaagttttccacttatcaatagtcattagaattattattcaaaaaaaaaaaagaagaaaaacagttaatagaatgagatcatataagttataatttgttgtatattattaaatttatatacatatattaaacaagagtaaggtggtgtatttgaaacttgttgttatggcctgttttctgtagaaaaacaactcatcaaattggaagcaaaacgtaatggaagggatgagaatggacttctcatgggatgccgagtgctgtgacatccatgtttctgcttatacagccttaaagaacttgtaaatcgttttgtcatgtaattataaaattgtatatatgggtacattatttttattatttgagagtagtatttattattttagttttaaacataattgttcctattcctaataacaaaaacactcataaaatatggaaattttaattttttgataaaatagaaatttgatgccttcttccctcacattatcaaaatttcaatctgatgattcctaaaagtgatacaatcacaataaactacattcaacaacataggaaagcaaaaagaaccacca

SEQ ID NO: 27545 - DNA, 3156 bp, Cannabis sativa
aaacaagggttaaggttcataagattggaaccttgtacctcaatgtgttcaaaggatggtgctttccactaatatagctggcacttaggaggaagaattgttatagcttggaagccactttgatttattattgacattatcaagtgcacaagtcaacttatgcaccttaaaatttcaacaataaatggaagttatagcggtttcatgacagtagtttatggctttaatgacagtaatgggaggctggagttatggacggatctttcctctctagagacaaaagaaatttggttgattatgggggactttaatgctataattgccaaggaagagaggattggccacagagtataataccaagttgacactgagtttattgagtgtctgtttgtagcactggcaattggaagatgttagggcttctagatgcttctatacttggtccaacaagcagcatggtcaggatagaatctattcaaaaattgatagaattctagctaatcatgtttagtttgattgctaccctaatgcagaagctctcttcttaaatgaggggacttttgatcacacgccatgaatcttgtctttgtatcctaaatggaactgtggaaaaaagctttcaagtacttttgtatgtggaaaatagatcctgagcacaatagaaggattgctgaagtttgggggaaagaaataagaggcaccaacatgtaccagatagtttgcaaactaaaggctctaaatcctgtcatgaaagagatcaagcttctctgatctgcagactgcttcaatacaagccaaaataaagttagaagatattcaggaaaaactacagaaagagccattaattcctatgctgcatgatcaagaacttactgcaaggactgaactaattactgcatagaaaaactaccaatcattcctgcaataaaaggccaaaattagttggatccgagatggagatagtaacacatctctattgcatgctggtattaaataaatgaacagacagaatcagatcctttcaattgaaacagatgatggaacaagggtatttgaacctggacaagtcacagaagccttcatttcctactacaagatcttgcttggatctaaaatggcaaatagaaggaaggtatctaacaagatactgagcaaaaggactgtattaaatgctgaacaagctgccatgctaacaaaagagtttattgaggaagaggtaaagaaatttgtttttgagatacctgggcgcaaggctccagatttagatggatactcgagcttcttttttcaagataattgggaacttattaaagaggatatctatagagcagtaacctccttccttgaatcaggcaagattctgaaggaaatcaatacaaatgccctaacaattgtccctaagatgaaatttacgttaaagattttagaccaatagcctgttgcaatatcatttacaagattgcaactaagcttttgtgttctaaaattaaaggcattctttagaactggtatcaagatctcaagggggttcatacaaggaagattcattgaacacaacattataatatgtcaggatctagtaagacactatggaaggaaatcaagcaaggctaattgcatgatcaaacttgatctacagaaggcctatggcattattgaatgggattttgtggaggagatgctacatggtctttaattcccaaattcattcatccaaactgtaatgaattgtctgagaacacccagattttccattatgtttaatggttctgtgcatgggtttttttgaagcaaaaaggggacttaggcagggggacccaatgtctcctttgctttttgttctagagatgtaatacctgtcaagaattctgaaggaagttggtaacaaaagggacttccaattccatgagagatgctctgaactaaagattaatcatctcgcttttgcagatgatgttatgctgttttgcaagggggaatttaaaagcatctactacatgttgcagggtttgaagttgttctccttatcatctagtttacaacctaatccccaaaagtcagcaatttactgcagcaacatgcctaatgaggaagtaagtagagttcttacagcctcttgttttactttaaaagaaatgcgtttcacatatttaggagttcctatttgtgctaaaagaatttctcaaaatgaatgtgttgcccttgctgaaaaaatgacatcaaggataagaacatggagttcaagatacctctcttttgcagcaagagtagttctagttaatttgtactcatggccatccatgcctattggtgtcgagtgatgcttttacctaagaaagttgtgagacaagtagagtcaatttttagagcttttctttcgaaaggttaaactatatctaatggacctagactggtagcatgggatactctctgtcaaacaaaaacttcaggaggtattggttttagggggatccaaaagtggaatgaagtagctatggggaagtatatatgggcaattgcacacaagcaagatagcttatggctgagatggattcattgtgtctatctcagggctgtgattggtggagctacaaggcttcagtacaaagtagctgcatctggagaagccttgtaactcttaaagatcaattcaaggacatagcatcaaggcagtaggtttttatgcaggattatcaaatttccaaaggctacaatctgctttgtccaagtcaaaccagagtgcaatggtgtcagcatgtttggggtagctaaataccccaaagcacagttttattacatggttggcaatcaaacaaaggctcaaaactaaagagagattgaggacaatgggaataaaagtagatgaacattgtgggttatgctttttgcagaaagaaactacagcttatggttacaatggcatgtagcagctaacatactacacagtctcaccatgtggattggaagattaaaaattagcaagttcaagaaaaatatattctcagctgctctcacatgtctggtgtactcactctagagagctcgaaatatcggcctttgggaaaacacaaaagcaaacacatggaagttaattaaaggactaaagcgagatgttattcaaaggattagtatttgttggccaaagaaagtaaattc

SEQ ID NO: 27546 - DNA, 2793 bp, Cannabis sativa
gttaaaggatataaaaaccatgacatttcactttgaccaaacaaagtagccatgtagaggggtgtcattccttggccaccgcgtatgagtggtaaactctcatttttctggatcataatggttgcaatttctatgcttccattcagagctgcatggcaaaatgcagtgttccctttagagtcttgcaaagccacatcgatttcgtccatcaaatttatcaattccttcacaaactgtacgtgttttgctccagtggcaatgtgaagaacagtttcttcagcccaagtaattgctgttcttaataattggctctgcttttgtatcattgcttttgcagctctccaatcatttttcaatgcagctttgtaaaggggaagaccaatttgtagatattgttgtcttgctagttctacgttaaattgtagtagttattatatttatatatatctgcaataatatttttattattgttggtagaacatagataacttaataaattttagtgaaaaaaactatgggagctctgtagacccctaaaagaaggctacatcgatttaatagttatgattctatttttgttatatgacaatatataatcataatatatataaattggtaattttcctaaaattcaatatccaaatcaaagtgaaaagaagttttattaccaaagaattttgtaataactataatatcgtgtttttgttaaggcatgaaaaacccctactaatttagaaatcagaatgagacgccatttaagggagccaaaatgtagaaatttatataagtggtgcaaaatgtaaaattttgaaaataaatcaaggaacatttactattatactatttaattttcagaagaaaaaattgggggtggccaaggtaatgagcatgtattcaagagcttattttaaatttgcaccgcaaataattttgatttatttattggcatttttgtcactaattaattttgttcaaattaatttaaagtttttttttaacactttagatatgtgaattttgttctccacctctttttgaagttatttttgtcaaggcatttaattctgttagaagtttgtacgagtttgttagtgctgttgttcttgtttttcgtttctgttgaatctgttattgctttgtttgttctgtctataaactctccagctctctcaatacaatagaacctttacaatctttcaattctttctttctctttctctctgatctttctctcctcttctctttctgttacttgttcttgatactgtgtatcaatggtgagaaaagcttcaaacaataacaattttgataacatttatcttcaactaccagccatcaccaaaaacttataatctttaataataaattataaatagctactcatgaaatctctaccttaaagtacttccaaaaacttatcagcaacatgagttccaacaaaaaaaaacacaaagtatatgatagagtaggaggtggatagttagggatgtcttgttagtagaagtgttttgagtcatcgtataggggaagaatttgagtcagtgtctagatgtgacactattgttgttgtgggggctcatcagcatcacctccacggtgattcaaataatacaagtttaaaatttcacttgttaaggtgacacaaattagtgacaccaaagtctaaatgaaaataataatttttttccaagtccaataatgttagatataatatcttcttaaaattatttccataaaaaatagttattaaagaggtaaattattgtaatagtagtatggtctttactctatattcttgaaaagaaattattcaaataaccgaaacccttctattttacctcaaaattttatattaccttgtaaaatttctttaaaatatatcattaagactttatttttttaatattttcatattttagtcattaccaatatataatattattaaaatactatgttaacatatattttaatttcattcattaaattcaaggtgatattcattaaatactatgatcatagtttagacaatatttttgttagtgatattcaaaatcttattatgcatgtttctttgttaggttggttccaatcatttcattcctggcgagaagaataaagtgacccttggttcggcaaagattaatctgcaaaaaaattgttctcttttgtctaaggttgtaattgacaaatctattgatcattgttgatgatggtattaataggaatttttctactcttcagaaataaaaaataaataaatatatatgtccatataaaagaaaataaaatttaaaaacaattagtaaaatatatttagaaaaataattagtattaattataaatatagagcatgttgaatttttaatttaaaataaaggaattcaaagcatacttagtgtagagtatttgcaatttggttgttccattaatatttttaaataaacttaaaattaaaatagtgaagttatttagatgtaattttttatcttttaataattaaaaatatttatgtattgtttgtaatatgtaatatattttttttttgaggaatatattctgtaataaatattcatatatttaatgtgtactatttaattttgtggttagaataaaaaaaattactgaaatattatattttttttgttggttcaacactaaatttgagttttaatattagagataaccttataagagtcaagaatatatatttttgtttttatttttgttgctgaaatacaaaaatatcagttagtgcacattattagtgctttttttttttcaggaaaaaataag

SEQ ID NO: 27547 - DNA, 2859 bp, Cannabis sativa
acaactatcctaatatttaaataaattaatctacacaaaagaggtcactttggcgacatattgtttcaattaatttactcaaaatattagacataaaccaacaccaaaatttgaattaaatcatttaaattaaaatatatattatttatcatatatatgataactaaatatatcacatcaactaaaatgatggcaaaataaagcgagacatatatgtatatatatattgaagccatcaacccattaatcaaaacatatatataccatgctcacatacacatagttaattcagtagggaaaaaaaatatgtatatatctgggttgggatggtttaaggtatgtaaatgcatttagcaattggtatatatttatcatagataaaagctaccgcacaaaatccaacgatatacattttgtcatacatgatgtgatataaagataatagtacatggagattctattgtatttgtcgatataataatggcataggcagtaatattaaaattgaatttctaaagcataccttaagccattatgaaccaaaaaaaataatggccgattatatctttatatattaaaagtgtttatctaacggcaattcttgatttaacgattcttttttttttttgtaacgccaagagaacaattcttaattttttaaaacgttttcttttaacgccgttaacttattattctttataaaaaaaatgtaaaaaaaaaacaatctctctcaatcgcagatggactctgccgatggactcttcaccttcccttccattctcactcctaatcgcagatctcccttccattctcactccagcccgacgaaccaaagcttccttccaccgactcctccatttcactctccatggtatggatttttatttattccaaagcttggatttactccgattatggcaactccttcaatatcttgaagcttgacccccaacgtaccagttcctcaacccagagaagatcaggttctcatcaaggttgtggttgcctccattaatcctattgatttcaagagaatgcatggtctcttaaaagccgtcgatgacctacctgtgagtttctctctatttccaatctgggtcactctgtattttgtaaagtaattcagaagaagagcttttagtttaaagtttcggtttttatatttccaaatatctaatctaagctcatctccaactttaacaaaagtatttgtggattacagttactctgcttctccacctcaacaacctcctattaaggtctcctactcttactcttaattgctttttttgtaactgttaaatgatcaagaagaattgattttattgcctaatattatcaaatagagtattttgaaaaaagaggcttatttggtttttttcatttgtgaaattaatggattttatgtaatcaaatgggttgaatgcattataggaaaagccttctgggtttctcagcattaacagagtcatgcctcttgacaggtttgttctaacttgtagtttcaagtgtcattcatgaatgtttttagatctttgtatgtttgattttgattttttagtgttcttaacttgtattgtatggattttctggacattcttaacagtatggaggttgatctgagtaaagaactcacaactcctaccaagcgtgagatataatgtttgattttgaaattttagtgttcttaacttgtattgtatggattttctggacattcttaacagtatggaggttgatctgagtaaagaattcacaactcctacaaagcgtgagatataatgtttgattttgattttttagtgttcttaacttgtattgtatggattttttggacattcttaacagtttggaggttgatcagagtaaagaactcacaactcctaccaagtatgagatagagctgcaagtagagcctacaactgaggtacaatgcctatgtgagttgctattgtctaacttggttatgctacagctgcgcatattcaaatgtatcttattttatggaaaaatattgattgtcagtttaaagctagcacggtgaccaaatagagaccagcaccaataaggtgagagcaagataagtgggatagagctgcgaaggctgcaactggaggcactgtgagccttttgttctaccatttcttttgtccttcgagaaatcgcttttatttgtgattttcacttaagttcttattgaaatcctaataacctccagaatagtcacttcatttgtagttttgagtctttactcacatgttttattattaaataaatattatggtgtttggttgtgagtacttagttctaatgctagaaaatttcatcgatataatataagatggtttgtacattcagaaccttcagagcggcccaagttgaagttacttccgagaatgaagccacttgaaactacagcaccttatagtgttgatcctattcaggtagtaataacattaacatatgttaccccattttcgggagaaaaaaagtagagaatcacattgggtccaacaggtgactgaatatttgtatttggtttattgcagggccatcaacatgtgactgaatatttgcataaagatggaagattttaaactggcaaggtctaaatatctgtcatatgaaaatataaattagtttacgttcagatcattttaagtttttgatctcattcttattcacttgatgagtctcattactctgtttttctgttgccaataaatagaatagttatagtcttctatttgagtttcagttcataatttacacactttattgcttgttaattgttaattccagtgcttaaagtgttgggttttatgccctaaataaaactcatctcaatataatcagatt

SEQ ID NO: 27548 - DNA, 3876 bp, Cannabis sativa
cccatctaaagcttctaacaacttaacaaaagtaaaccccacagaccaattcttaatctctttatgtaatgaccgcatgatttagaaatagaaataaaaatagattagtggggctatagatattaattttgttattcttattaattatatgtgaatgtgtatgataaatacaaaatatgttatttttatgattctagctcggtggcgatagaaaataaaatagagagttatcttagtcacatgggtagacttagaacctttttatagagatgtatagcatgttaagagtgaaaagttgttttaggcagaataatggctttggactattttacccctacgccacttattgatatatgtgataggataggggtagtttggtcattttgaactttaggatacatgtctctctccataagtggaaaatggctttatttttattaagcaaggtataattaaataacatattacactattacgtatccaattagagaaatttaagcaaaaagagaaaaaaaaataccccgttgtctttcttctttcttgttcgaccagcaagaaccaacaacacaagagaagaaattcaatagtttcagaggttaattggtggaaatctaggagcttgtttaaggtaaaaaccataagctaattctattttagttttgttatgtgttggatgatttctttggaatttagggtttaaattgaggactttggttcagtttagtgaattgtagttaggtttgctttctatggactctaattgatgtttttaactggtttgtgatgttatagttggttgattttgaggttgagcaagtttgagttcatagaactcgaacttgaataaacaatgacatgttgagttttagtgaatttcttttcctgttattgtgtgaaaactactatagaatgtgttaacaggtgttttggaaagtaagattggatttagagaagttttggtcgagctggggaatttttaggggttcttggtggaaaccagtcgaccagttttacaggacttgtaaaaccggttaatcgatttacaggcaggactcccaaaaattcaatttttacagtttgtgctattttcagagcctagtttggtgtcttccctgatatttagtgcagtaataggttataggtcgtcaagactaccctgggttatatgtttagggttttaggaaagtttacttgagttatttactcgtttatgtaatgtgactttggacctcgtcaatttgagaattttccattcaagttgaccgacacgtttgaatttagaaatgaggtaagattagcataaattatgtatatgtatgtgtgtatgtatgtgaatatatgttgtttatattatttagactaccactacaagaatagttgtaatactgagtgtgtgtggtatagtgtatagtgtttaagggaatgttacggtgttgccaacatgagtaaaagtgagtagggagtttatgtggtacaacacccagtagcacctggaagtacaatttggccctacaaacactagtatggaggtggtactttagtgcatgtaattcataggtcggacttccattaagaatattcttgactatttggtgagccttgcaattaggcctaggagggcataagtacaagtttgtgctacttagtatatatgtattttatacttatcttattgagtctgtgactcatcagttgctatcatgtgtaggtaaagaaaaggataaagtggaagaacagttagtttgaggctcgagaattattgtacatatcgcggcagtacaacctgaagggtttcgaccatattgaatttcgggtttagcttttgttctaaccgtgtgacatgtaaataaaattattatacatatatatatatgtatgtattgtatttttcaaaaatagtttttaataagggatcccagtgtgcaaaagtttatttatgtatctatatttgattataactagtttataaagttaacgtttaaattcaattgattttcatgttttggtgtaacaattttggtatcaaagccaccatgttgtccactaggagccgtcaagatatgtacaatcatgaccagagatgagttccactcacggttccgtaagcatgtcccagtggtaactagtttaatttatagttggaagtgtgctagatatttttttttatgctgcctaaaatcaataaatgtggtcttggaaatgtttcgaccactatctaacctacatgccttatgggttagcaggctaagtcctagattatgaattaggagtcaaggaaaaatggttgagactaaagattgtcggggaggtagaaacccccaaaaccctcgtggatgcggcagaggccgtggtcaaactccgaggggtggccaagacaatctaccccaagctcctcctgatttagaagagaggtttacatagatgcaagtccaaattaataaataactagacgaaatgcgaaggctcagacagcaagatactcctgtggggcctcttctgcaaccacaagctattgtggttttagcggtaccagcagaaaaaccggttgctggcaaccgtgtggaacctttgtatgaacggttccagaagcaggcacatctagtatttttgggggggtcctggtgttttgaaagcggagcagtggttgacaattattgagtgaattttgaacttcatgggatttacgagaaatgacatggtggtgtgcgccacattttagtttcaagaggacgccctcgtgtggtgggagatggtgtccctaactcgggacgtcactagaatgacctaggaagaattttgaaatctgtttaaggacaagtactatgatgaggttgttcacagtgcaaaacagaaagagtttgttgacttagttcagggtgagaacatgtgagtaacggagtatacgaaaaaatttgatcgatcggccaagcaagcttctagaatagtacctacggatttcagtaagaaagagaagtatttgaccgggttgaatgccaacatcaagcatgatttagtgatcacaaccaacgatatcacaacctatgccgaaatggttaataaggctcttgagcagaaggtccagtaaaatttttgcaagagacccaagagactactagcgctggtatagccactacccttcctatttctggtccttgtaaggagagtggtgattctaccattgagcaaaaaaaagagaacttttctgactactggtagttcgggtcaaagtaaaagatttgtgggaaccagggtaaaggaggacgtcaaccttactcttaccctgggtgtttgcactgcacgaagcatcatcttggggaatgtaactgaagagcttgttttgagtgtgggttggtccagcatctcaagaaagattgtcctcagctgaagaaagatacacctaagcaagaagccaagtctactccagcacgggtatttgatatcacccaagctgacgctgcagcgagtccttcagtagttacaggtcagcttcatgtcaataacatcaattatactatcttgtttcacttttgggttacacgttcgtagatacatcgagagtaattagtcagttgggtaggcctaatgatattttttgaaatgggtttggaatcctgctacccaatagggagttgattatctccaggaaatgggtgagatctgtgccagtcaaaattgagggcagagaattaagcgttgacttggtggaataatccttggccgagtttgacattatactcggaatggattttctatttaagtactcggctaatattgattgtaaacaaaaaacggtgacctttcaaccagaaggggaggaactgtttgtttatgttagattaattcaagcttctcaagttccaagaattgtagttttca

SEQ ID NO: 27549 - DNA, 2599 bp, Cannabis sativa
  modified_base (48)..(54): a, c, t, g, unknown or other
  modified_base (637)..(644): a, c, t, g, unknown or other
atatttaaaattccgtaaaactgtaattttgtaattttttttattatnnnnnnntatttgtgaaataatccctttcaaaatatatatatagagatttaaatatatatatctaaaaaaaactattaatgaaaaaattaaatcttaaataagaaacaatattctcaatgtaaataaaaaacatatagtattactagattatatgccggcttatcatcacaatgatgttaaactatgaattcttagtttaataaattaaaaataaaaatttgttatatacccgctctaaaagtaattaatatgcatatttcgaaaatgatggttctcaaatgttttggaataaaaactattttgaaacatttttgaagttaaaattgaatctttagtaagcaaaacattaatggatgatgtatttttaatagtatttaattttaaccattatcatatgctaaattccaatagattaggtgtaatttaaggattgcatgattggtttcctactattgaaaactcatatggatatgactaacaatttttatgtatatgaaaactttgtgtaggtttggagaatttgtcatgattgagatcacaactaataagtcgagaaaatatatgatttatatatataaaaaaaaatatnnnnnnnnatatatatatatatatattaagggcgggtgtgaatgaattcaataactaccccaaagatttcaacaaattcccacccaccttatgtatgaccaagaaaaatagggtttaattatagataaaaagaaattgaaatgtagaattatatatcttatcagattatttattatttgaaagagaagacgaaggtgacagccacacgtacagtagtttggtttgggatattcattacattaaaatgcatcttataaacaacaaagacaaatagtcaaatacatatgatatatagtactgagttgatcatgaccatgaagtgataatctcaccctcttatcccatactccttatcatatataaatgtttgatatgataagagcacttaaacgtaatattatgtagtaggaccacagtacaccctgtactatactcctttttttcgtggtttcccactatttgacaattttcttttaaaaattatttttgagtctgagccagctcatgcagtattcaatgaatttttaacattcattgacgtggaaaagaaaaatgaaattgcgtttcgttttctcaatatagttcattgaaatagatcccttgtatcttctattagagaaggcaagtaagaaaagtatatactttcattagtatgattatgattaactttaaaattaactagttaaaatcaaatttaaaaattagtatcaaaatgattaaatttaaaaacattaactagaaatcaacatgagagacttattttaagacaacgcatatattactaaaaaaaatgaaagcatatgtatatatatttaaatctaaatttaaaaagttattgggggtatcaaccaagtcctacatgagaaaaataagtgttgcacttactacattagtatgagatattttgaaaaaataactaaaaaaaaaaaaccgtgaagatttaaaaccccaatatagtagaagaacgggaccaatagacttaggcccaaaacggacacagtcaatccaataaagtggaagaacggaggcagcaaaagtcaacactaacttccaatgaaagctcaattccagtaataataaatttaatgtgaaaatttgttttcttgttgagagtaagatcagggaaattgtatagttcattttcattcttgtaactaaatgaagagtttctgcactgcaatacactgattcaaaagacaggaatatattccaacagcaaaaacaaaagtaaaaacaaatattgggacaaagacaatttatagtctagtgatattattagaacattatattatatgaaaatagtaattagaaatgacaaataacttattaacttattaatgtcagagacttcaaataataataattaagtacttaagttaacaacgtgggtctcactctcacctattttttgtccaacctttctctattatatatcaacttgtatgtactatatattctcacccaactcaagagtactatcaatacttattacttaatatcttttctatattgatattcttttctcaatttatgagatattagagaaagaaagaagagagatgagtgtgttggtgttggtgttgatattgtgttgtgttatatatgggccaaaaatgaaaagtccccacccacgtgaccctgcaatttattattcccctcagttcacaacaatctaaattacactacactaagttattatataattatgaacttcttggtacaagtggtcctatctattttcttaaagctactttagtggtcgcccatagtaaccaaccataacaccaccaactactattatatatataaaacatggacttgtcactataacataacatatagtatcttctttggaagtaattaagttggtgtggttatctatcactttacctaacttcttgttcgttttacaaactatattaaagagagatgagcatcatgtttttgccttgctaatttttat

SEQ ID NO: 27550 - DNA, 2374 bp, Cannabis sativa
aatccatatcaacattattctatagaacatactctgactagaatagcaattccacttgggtaagttcttgctcacactttttattttttcatggctgattttggtctcaaaaagagcacaaaaaccaactttattattcctgcaaatatctaacaactcaagttgcttttcttttttattcagtcctctaacattccaccctaagacattttatttatttatcattaagaacgattttaaatagtaccaacggccttttcttctacttttttaacacctcatatccgtcactaatactggctctagtactcagattttgcacattttttgagccttatttcctaggagtgatccattggtttgaatcatttaatctgtcagagtttatccccctgctgttctctgtgattacatctattgatagcttctgcactaccctttcctcatttagggaccctgtaatgttcgcaccaacagtgtgttgctgaaccgcaacactatgttgaatttcctactgcatagaatcactctgctgctatatttcaacataggaattgttcaagtcataagttccatgctgcattggttcatctttcttaacaacatgttgtttcttcttccaagtcacatgttttcctttgatgcaattagctaaaatgtgccccaatagagaacaagatgtacatcttgattgctgccattcatattctacaatttattccattagttgctttctctcattgaccaatgcaatagattttggagggcaatccgaaatctcaacatcaacaaggactctcgcaaacttgatcataaacctctcaagtgttactttatccagcatgaaaggcttgcttatagtgctcactaaagcactcacagaattcttgccctaatattaaagacttaagccttttaacctaatgaagactggtacagatcacaccatttggttagtatccaaatataaagaccacgacctaagaagcataggttttttgtcaaaatcgatcactcccatttcaagtatgatgtccctattcgtttcatccctgaagctaaccaatgtgaaaccataatgcatcctaacaatcttatccactcctaagttcccccaaattctcttaataaaaccctcaaaaactttgaagggcgggttggcacctaatacaatacagatgatagatgatttccaataggatgtgtcaatttctacttcctcttcatcaagttttaccacaaactgatccctaacgttcatgggttcaatataatcaagccttgaggagggagttctaactttgtttacattgaaattgctccacatatccttggttgaagcttgaaaatgtgttgtcgtaacctcatctccccagctagtagatcgtggatttggtttcaaggcactcagatcttcatcttttccgttcaggatgttctccagttcttcgcacgggtctaggaagattttagcagctggttcctcttggatcaaaggaagctcattctgattagcctcatttccaactcctaaatcaacactcatctgtaacgccctaatgctaaggcacgctacaatgctttttcaattacagtgcagtctttgctaatcacagaattttcttgaaaaacgtgtcaaattataacttttgtattgaaaattaaactttatattatatcaaaatatttacaagtgtcgggatcccgctttcaaacttttaaacatattataccaaaatacataataatcaggtcgcacagtgactacaaaatacaatccccagatgtctcgagaccgaacactccaggtcgagctgcttcgacatgtacaatgttatcctagctcgggttcactcctgttcatctttcacctttcctttacctacacatagaagtagaactgtgagtcgacagactcagtaagaaaagcatgtaacatattgtataatttccgacttgtatttaggcgcccatacacctattttcaaggatcaacagatgagtaagaacgttccaaactagggtatagtcactataccacatacactacgtacctcactgtacgagttatggtagggtttatttcataccctgagtaccagtgcgtgatgtaccacacacacttagtaccttcctgtacttgtgctggtatcactgtactgtactcctaaacaatattcactatcccaatgcagtctgtaccatactgtacaagtgttagtagtgcaaataacacgtaaaccatgcatatacacataacatatacatacactcagatattgatgtcgcacattatattcagttcttatcttctttccgaattcaagtgtgatggccgacctgaacggaaatcttgtgctagatgggtgcccta

SEQ ID NO: 27551 - DNA, 2623 bp, Cannabis sativa
tataagtggaatttactcaacaatcatgtttggctttttcaagaccaaaatttttcaccaagttatttgcatacttactctgagaaacaaatgtggcctcatttattgtttaacttagagacccaaaaataggtgagttcacctaccatgctcatttcaaactcttgttgtatttgttggacaaaaactcgcacttagagttagaagtagatccaaatacaataccatcaacatatatttgtgcaataataacagcaaatcaaatgtttttgataaatagtgctttatcaacatttcctcttatataatcatgacaaagcaaaaactcagctagacacacataccaagcacggggtgcttgtttcaagccaatcaaagtctcatctaacttataaacatgatcaagaaggtggggatcctcaaccactccattttgttgaggagttttaggcacaaaaaattcatgagaaataccataagatttttaaaattcaacatacacagtattttcaaaatattttccatgatcactcttaaatcgaactatcttaccaacgttgtaatatttttgaacttttaatttcaattaaagagacttaaaagtatcaaaagtataaaatttttatctcaaaaatactacccatgaaaaccgagagaaatcatctacacacacaaaaatatctcttaccattcaaactttcaacctgaattggacccatcagatccatgtgaagaagttcaagaacactaaaagtgttcacatcaaggacacttctgtgagatatttttggttgatttccaaactaacatagtccacattttcctacaggttctttacccaatttaggtaatcctcgaacaatcctcgcatcggataattttttcagatttttgtaatgaatatgtccaagtttttcatgccataaatcagtggtgttatcaatagcatattgacaagtggcaaaggtggtgatggtgtaataattatcattagatctaaatccttgcaagataatttcatcacgattattaagaacataataatgactactatcaaaattaacagtgtaaccctgatcacaaatttgactaaccctaaggagattagctcttagtctttcaaccaacattatgttcttaagtttgggtagacattagaaattaagaatttcattccctatgatttttctagctataccattaccaaaagtaacttctccaccttgcattggtctaatgttgtcaaaataatctttttcacatgtcatatgcctagaacaactactgtcaaaatatcacatttgagaagcaatagatttaaaaccagaagaactaaccaaatattttttttgacaacccattattgtttttagaagcatatttttttctagaatatttagaattatacatgtttttcatggtaatacatccaggtcgaatgtgaccttttactctacaaaaatgacatatatgaatgaaatgattcattttacctttgagagtgccaaacttgccaacctttttcttttctgaatcagaaccctgtaaagtaatgtcagaacatccagaaactaaattttcatatttgacaaatttagtatttgatttagactgaggtttaacaaaatccaaaccagcatgactcgtttatcctgaattttgaacctcttcaaaaatgttagaacctaaatttagaattttaacatttcttctcaattttttaagttccttggttaaagatacaattatagaatttcttcaaatcaattcaaattcacaacattatttttctttatctttgatgttgtgagataactctttataaacttttactaagtagcaattttcatcacaaatgtacaactacttaccaaacattaccttataagattctgccaattattcctcatcaagttctgactcatcttattctgaaaaaacttctttatcattgtcattagtcaaagtattgtttaaacacaaaacttttcttttttttttttctataaatcacttgacaaaacacttgttaaagcaacattgtcatcttcactatttcaacatcatcatcactcaaagtaacattaaaatctttttttattctttttcaaggtattagcactttcagattgaatatgaccatacttttcacattccctacattgaataccctttttattattggagacaaaaaaaaattagatgtattgttacctttatgagtttttgagaaattctttttatttccaaccttcattatgtacctttgaaaatttcttaataaagtcatttcatcatcatcatcattattagaaatatttttttcataaactttataggcaatacctttgcttttctcatttaaagaatctgacttaccctttttcttgatttgttgatttaactcaaatattcttaacccatgagttcttcaaactttatttttccgaaatttattgcctcttccattgctagtattacatatcaaatctatcaggaagtacacgaacaatttttgaaccagtacaaattttttttatttttttccaaagcaaaaaactcattagtaatatcagataatctttcataaaaatcagataaaatttcagtttttgacattctc

SEQ ID NO: 27552 - DNA, 3473 bp, Cannabis sativa
aagtctgccctggacatttatctccgcctagatgcgaggaatgcaggacacatgtcacttgtgtattttgccacgtcattgtgcaaaaaatgggataagtattaataccagagataatactacacacatcacaagtgttatggactataaagtagctttcttatgattacaatatatgaatcatgtagaaaaatctcaagtgagagagagagagagagtctagggcgtatagaagagagagagaagagagaattagaggcttaggacttagagaattagaattaggttaatgcactttatatagtagagcttacatgaatattaaccactaatatcccttaaaaataggaagataaagccttatttacataattaagtaataaataataaataggataattatcttttaaaaataggcaagttgctgatattttcctcctctttttgtgggctgtcaaggtccaaatcgccacatagcttgttgtccacagatgaaggctgtgcaccaaaggcttcctaaaaaaaggctagtcggccatgttcttgccagggcttggccgaccatgtgcttacaaggtttggctggccatgtgcctataagggtcttgttggtcgtgttcttgccaaggttttcatggtgtacatcaagtgcctaccaacctccaggctacatgtcaagtgatgacgagcctttgtaagtgatgtcgaacctttgtaggtgatatccaaccattgtaggtgatggttagcctttgtatgtgatggccaacctttgtaggtgacggccaacctttgtaggtgacggccagccttggtacaactttcgttgcaatggtcaggcttccttggtcaaacaggcccattcttagtctgacaatcacccttttggttggccaacttgtgctcaaaccctagctgtccatataagcttatcctagctggcctatacactccttttggccaggcagacattgttatgtagctccttgatggctcacttaactcctttttcttgttgcttgacgattcagccatgccttgtaaagatactttctcttgctattcgcaaggttgtattccatgtgtacttagtcttgtcttacatgtacatgcaacattaggtggcaaaaattttggatagcatttgctccccatgtccctattcaaacatctagtcagataaggactagatatttgatcttctctctccatatatgcctcatcttcttttctttgacatctcttctttgaacccgccattgataagtttcaagctttttaagcttttagaaactttttgattccacgttagattgtaatctttttggtattctaatcttcaagacaatttagaatataaaatgtgtaatttcctaatggaaaagacttgactttggccttcattatgattcttgactctttgagtcataaagaacatgaagaacatagtctagttatgaacaaacacacctttcaattcacaactaacaccttggtcggccctaaggatcttatttgtgagacttggccagccctaggattcaatcatgggagttgtccatcactacggtttcactttaggaagctaacttgttcatgcttgggtttagtagccttggccagttcattggtgagtaatgggccctggccgacccttttaaggctaggaaacactagccgaccaaggccttggttccaagtgggtggccaattttctgtccttttttgacctcagtgagaatcctatcatggctttgtaggcatatacaaccttattcttatgcatggtttccttagaaactctgtatgaaacttaatggtgagtctattatagtcaaatgttcaacttaagactcaatatttatccaacttgtgacacttaagacttgtacttcgttgatacttagccatgtacaatgacattatctagcaattacccttaggtatggttgccaagagttttatctgtggcttggaacctacaagaaactctaccttgccttatagatttagctcaatacatggttcttataggaactctgtctagctattctctggttgtaaggttcttccaaggccttggccttatgcatttgaaccaattttttattcatattcagccttgaggctttcatgttcttatttttgacctataatcacactgtttcaaacacttctattatttagccttaaaggcttttactatgaacatatgatcatcttggctatcgacttattgccttgacatgtaagtatccaaatctagaacttgactcagaggtaggtttagtagcttattctaagcgttaaaattccactacataagttctccgtgctagttcaatgcattgtatggtgtgggtgcccccaaagtgagcatgcagacttatggcatcttggtcacttgcaattcagcgaatttcatagaccttgcctgggaattttcttggggatgctaccaggtgtacacatgtggaactgaaaaagaatatctttaagaagttatctttgttttagacacaattttatataacgaaagcttacaacttagtgtttgcttttgaaatcacgttttggctacccttgtgtgaggtgtcgggcataggccatcattgaagagagatgggaggccatgctaacaagtaatggatataagctctttttatatttcgctaccactgtagggcttaccgtggaaaggccatcgctgaagagtgatgggaggccatcgctgtagagcaatgggtatagctcttttatgaattcctacacggtgaaatgttagaggaaccactatacgaggtcgctagtgagagcacttaccgagatgttttctattctcgtattttggtaaaagaggcaactccaagctcttattgtgctcaccgggattgtatgcaccttttcttgttatcttgtaacttggtgcagacctttttagtttggtccaaacatgcttcctgcaggatctttgctgttaaggaatgctcttcaaagcactaagtctcttatgaagaattaccactctctaacttgtttgttgaagcacctggcaactttttgcaggcagacataccgctttaagttggcttagcgtcttcctttttcccttttgtttggggattctactactaagatgtgacctacttcttcgtcattgtagaaaaaagtatgagagcagactgttggtggattgggccaactagcgtatagaccaggtggccatccacgttgagggagcattgcctggccagttggataaggctatggctagctagcctgtggaggtagtggtcggccaagttgtggattctatggtcggccagcttgttgaggccatggttagtcagccttttggaggacaagtcgatgttgcagtttaaacccttttgcactcagttggctttgcccctagcatgattaccgtagagcctttatgcactcttgtaaatagttattcagcttctttcttg

SEQ ID NO: 27553 - DNA, 1983 bp, Cannabis sativa
caaaaatcatatttattttaaacattaacatttgtcacttatagagagtgaattagagtttcttgataagacaaacacacaaaattgtctaattactttcaatttaatcttggctttccaaaggcgtcctaaaagatttcaactgcagttttttattttcctttctttgaatgcttctgaccaacaaattagggaaacaaatttaacttctaccaaaagaaaggataagttttgtccttgtctaatttccctcttgacacaaaaacatgttttatatatacatatatatgcgctactgaacaccaccaaagaaacaggtgtgaatagagccaatataccattctcctatagtcaacaagagacagatgcagttattaagaatccattttgaactgctcaatcacctaattcttttgttttgtttcttagaaaacctccctaataagaatgataggtaacgggtactcttctagacaggacaaatctccgaaatgcatttttcgaaacaatatcaatcttccaattgaaccaaaattctattttctcaattcatattcaaggctttcacaccctttacaaattactactaagcctttacactattttcatagtgtaacaaagaaccaaagtcgttcttacaccagaaatggggctaactacaccaacacttccaatacaaatttcatcaccttgatctttgtttggatggacagaaagaataggaatgaaaacttaaattgcaccagcttataataacagtatatccatagccatattacatagcaaaatctcatcttagttgtaaactctgcttagtgtggtatggatcaaatattagacctaccctttattttctcatacttcatctccacagaaaaatctacctaatagtatacttttcctctctttttttcactttcatacgagcaagaaatgtctattgtgctcatacacaaattttgatcatactgctttcttcttcgcataatattctttttctttttctcaagtaagaaaagaattgcctcataaaaatgaaattttctaaattaaatgaatatatttatataaatatattgaaatgaatgaatttaaaatgataaaataaacaattaaataatcgaagcatacacatctttctcatctttctcctctacatacctatacattgttgattttttgttaatataattttcttcttgaaatcatccggaaggggattgccgtacaccgcaagcaacaatctgagcccattgcctcaatctcatcttcaccatctctgaatcatcacctgttcatttttaaaaataaataaaatgtatcagtcgacataattttggatcaagaatcgcattttatcaaaattagggattaattcaaacctggatcgattatggtgctagagttatcaaattcagtatcggagcatatcgaagaagacgacgaagatctagataagctcttactgtactgcttgtgaacagcgtaatataaccctaacgcagggagtgtatccgttagcttaggatccgactgaggcgaatcgaacccgaatccaagctcaaaacaagccttcaaatcctccatgtcctcgtcagacacgctcttactgcgattaacttctcgaccggctttataactgtctttccggcgaagccaggcctcatcgcggtgggcgtccggagaccacgatttgtgcttgatcagtggcttaggcggtggcgcgtggtgtttcgacatcggaggcgatttcacgggcggttgttgaggaggtagtagaattgttgtattgtatgaggtttaggggtttggcggtgatggtattattatggttctatgggctctttttactaatgggccgacaaggctggaatgtgaggtggcattggtgggccttggcccactgaaaatattctagtcaaaagaaactgccaatttgtttgttcacatatacgttgaaaaaaaagtaaaacaataatattt

SEQ ID NO: 27554 - DNA, 1424 bp, Cannabis sativa
  modified_base (1392)..(1396): a, c, t, g, unknown or other
gtaaaataaattccaacacatgttatactggtttacaacagaataatgtctccaactatatcactaatgaccttgattaggatctggtgtctcttcaaagagatttctcagctgtagatgtggccaggattctcaccattccacttgccgcttctgcaacagaagacttttgggtgtggaaccatcatatttctagtgaatatacagttcaatctggttaccacttcacttgttcgattgaaaatcagcagcaatcttccacttcagatacttccagctcttggtggaaagctttttggggacttaacattccttcgaaagtgaaaatctttggttggagggttttccaacaatctttacctgttgctgcagcactatttcaatgaaaaataatcacttcagctgcttgtagcttatgctcggtgcttgggaatctgtggggcatgctttgttcagttgcaaacatgctaaagcagtatggcattcaacaaattttgtttttgatttccaagctgctagtcgaatgaaagatggggattatgttatgttactatcacaaacttataccaaatctgagatggaaaagattttatgcactatgtggtacatttggtttgataggaacaacatcattcataataaaccaccccaaaaatttgaggcaattgctgctaaggccacgactcatctctgcaactttcagtaggccgtgagtctctctaaacttgtccagcaaacctccccagttgctagtcatcaaccatggacaactcctcctccaacaaaattgaaaatgaatgttgatgctgcaattgactcggccagcaataagataggacttggagctattataagggactctcgtgggcatgtacaagctactctttctaaacctttgcctgggaatttaaaacctcatgaaatggaggctaaggctctctatcatggtctccaatgggcaaaaactttacatgttcaatttgatttggtggagtctgattctttactgctagtcactagtttaaatggtttagcatctacaaatttaggttttagtgatctcatttcagatgttagaaattgattgtcctatttccctaatgtttgtgtgtctcatgtgtcgaagagatgcaaatcaagctgctcatggcttggctaagcaagcattagtgtttgataattattgtatgtggtataaggatattcctcctactattttctctgttgttgtaactaatgcttccaattattactaacagaaccttttctcaaaaaaaaaaaagaaattacaaataatcttaaataattataatatacttaattaaagaaattcgactaaataattttaggattttttcatttttacatttcaaaaaagtttttttttttttnnnnnttttgtatttttacgaaattctacgtag

SEQ ID NO: 27555 - DNA, 3236 bp, Cannabis sativa
tttaccttttcaacaacggacacaaactgtctacaatcatctccacccccaccatcctcatcagcatctggaccaccaccaccaaagctgtcattggcattatcatcaacatcatcatctctaggctcatcgtcttccccaaaatcaatttcttcaccatcaccaacaacatcattatcattttctgaggagcgaagcactcctctgtttggctcgaacgatggtagcacgcgaatattaggaaaaaaaataaatttgaataaaaagcgtaacaaaataataataaaaaaatacaaaaaacaacacaacaactgcattaaaaaaagaaacaaaaaataatatctcaatatccatctttctgttcaaatcagcaaaaacagacataataatccgttgctggctaataacaagagacacatccttttttaaatcctcgtactcaatacgagttacatgctcatgagccttagacgatgatggaccaacttgatcaccttccacagtatcattgggccacatatttataaccgaattcacaattacctttacatttatccttaataaaggaaggagtagtgtcatcagaaaaataatcagtcaaatttaaactggatctctcaacagaagttagagaaatattttcaagttgtaactataacgaaaaaagccaaaaaaataaaaaaagaaacaaaagtgaataaacatagaattcataaaaaaaaatgaaaaaacaacactaaaataactaaaaaaataaaagaaaaacaacacacatatacctgctttaaaggccaattgaagatgatgttgttcacattgtccatttttagctgagaaactttaagttttggaattttaggccagttaagaagcctaggtaggccaatgtttgaatacaaagaaattttcccaacgatgtatggacaacactcaaaaaatcaaacttgcaatgaataaggaaaacctaacaacttataaaatctgccatccttatccttctttctaacagtcctaatactgacattaatcttacccttaatagatttaatagtcatctcaaaacacttatttccccacccatactcattataacgaccactatccataatatcaagatccttaatagagacaacctttccaagaggacctccgagcaagtaacactaaacaaaatacaaaatagccaacttgactgcaatataatcattatccctaaggttgttagtagtaaagacaacttgaatcgaattcttggtaatttttttattatcctttaaataatattcaactagcatattcttgtcctatttgaactgaaatgaaaaaaatcagattcaatgtggcaatctagacctgtcactaagacaaattcctatacactaaatttcagaaacttcccagcaacaaatacccaaaatttcatctcattaggttgttgaactttcgacaacaatagaccatgcaagacttggaaatgaataatgtactctaaaatttgaaggaagtgaccaaaaacagtttgagaaaatatttttaattgggttggggttagaatagttttaatatcgttaatgactgaataataaccataagttattactttagaagggagaggaggtcacttctcaaccaatcccagaatcttgaggaaaagagtggtacaggatagttgtggaaagttggcaatgctctcccttggagtgatatttcatgcgagagttgatatgttggtagtgttctctcttggggtgacgtgtcatgcaagagctgtggcatatgggtagcgctctccatggttgtttttatgcattttcttttgtttgcgataacatatttgtgtttatgtctccttttgccatatacaagtttcttgattgcgtattgacacttgtgccaacatgggtgggtttacttatgtccacttggtgtggagaactcgttagttaagactaacaagtccttttcaaatctatggaactttttaagcatatataacttagtttattccatatcttggtgactttggaatttaagttgaacataatttttttgcgcttattttattctgatgattattatctttgtaacatgggattttaaagaaaacattaattttgttaccaatggtggcttgcatttttgctagtttgagcgagttgtcagcatggcccttaacactttgggtactcaattttagcacgagaccaatttgtcaaagtctcaaatgtaggccattcgagatgcctttgttaagtggaattttttgagttatggctcctttgagcaccctcacttgtcttttatctcatcagtttatcgactgtaccccctgtttgagataaaattttgaaaaaaatattcatggaaaactttttttgaactctcatgctcttaaagtgacgtgttagtaacaactttgagatttatttttatctcattgatttactgacttttccccctatccgagatggaattttgaaaaaatattcatggcaaattttttaaaatttcatgttcgtaaagtgacgtgtcggtattgactttgagatttattttgtggagtggtagagtatagttttgacctatacctatatgcctcccaagttgtaaaagtattggattaaagcctaaataaccaattgtctaaaaaggaaatttaaatggcgtgcctttgaaatggcacttaaaactaaaaaccataaaattgttcaatcttaagaaaataattaaaaactagaaagagtaggctctttgtggcttctcctagccacttttattgtcttgacaagcgtgtgctcaaaggttctatctttgaaaagctgagtcccaggttggggttgtcctttcactgccacgttattgcattctcttgctgccaactggtccccacgtacgattccattcacatggcttgtaggaaatttcacaacgaaatgtctcaatgatgctactacccccagtgcgataagtgttggtcttctcattatcacattgtatactaatggaatgtccacaatgacaaaatttgtcatttttgttacagtttgggggcctctctcattgtgacggggagagttatctttctattactttttatgccctcgcttgtaaatccatatagatatgtggggcatggttacaaattgtgagtctcgagtcccatcttgtcaaggctggacttgtataataggttgaccccactcccattgtcagcaagtattctcctcactctcttg

SEQ ID NO: 27556 - DNA, 2238 bp, Cannabis sativa
tttaggaaaaagtgtggtttaattgaaaacctttgattaaattaaaataagactttcatacaaaatactgtcataatacggggatctcctgtttataaaattcttttatatccagttactaaaattgttattacaaaagtaaagttacattttcaaacatagaaaaggggatccgcttctcggaagccaagacaccacagctaatatgtacatctgggagagctctgactcatggttgaacacaacttctatcctgcttacctgcaccataaagcacccgggagtcacaatgactcagcaagaaaagctactaaatcgaatgcattgaaagtgcaagtattctcatcacaacatagtatacatactcgtggttcattacatattcagcatgcatatatattttaacgcctatacaaacacattcattacacattataagaaattcataccaactcataatcatcaatttcatcttttcactaaacatacattcattcaatacataatcacataattccagtgctttataaagcacccttaccactcgctatccatgagctatgtatgtcactatcgttgcttgataaagcgaactatatgtaagaaacctatccgcgatttcaacgagtaattactcataatggtaatgaccgtatctatattcatttacaataacggtaatgagcgtgtctttccctcgatcataatcgggtcacaaacgataataatcgtttctcactatttcctcgattatagtcgattcacaacaaatacaaatcattaatctcaatcttaatcgagatactaacgattataatcacttcttatttaaccacttagaggtgcataaaacttttcttacctcaaactagtatcgggtgtgcgggcagacctgagtggaaccatgctcgaaagttcggggtcctatgtcacgataacaaaactcgatcaataacttatccaatccccgaaacaaacctaattaacaactagataaaattctaactccccactggttcaaaaattagcttatacatctcaaaataccctaaactaggttctggaaaatgccccgagccaaaaatttagttcgagaaaaacccataattttccccctgttggccaactggttaaccagttcaccagtaacctgtagaaccggttgaccggttctggcaggttggggattttctggttttacaccttgaaaccaatcccgagctcctccaatcctactcaaacttctcagaacactccaacaacataaaatcaaagtacttaaacattgaaaactcagaaacaacctaaattaaccaaatcaccatgtttgactcaaaattaggttcttaaactcaattctttagtttccaacattaacagccatgaaaaccatccaattcacaattaaacaaacccaatttaattttaaaatcatactttgaaccccaacaactgcacagactcgaaaccataagaaaaaaccaaatttaaccataaacctagaaaatcaaagggatggaataacagacttacctccaagcttgggttacttctacacctcactaccacaatcaaatcctgcctgaaatggagtttaaaaccctagtccaagttggttttctagggctgtcgagagagagagagaggagaaagcaatatatgtgtatccttagttatttatttttctttctttggttttatcttaatttcctaatcttattttacaaattaataaacttaaatatatttctaattcagccatcaataaaactgaaatccatataagacaaaactagggtaatacttagtaaaatgactattttacccctcccactaaacttaaactaaacacaacctaggggtattttggtcatttctaatttcctcgatcaaacctacttctcaacattctaacctagtctaatataattctaatgtaaagcaacttcaatcgccgtgacatttctgatcacttagtcgagtttccacggtcaccgaacccaaaaatcttttattttgaaaatggtatctacaatactcttataatcaaataaaatctctgtaattaataaattacgctttatttattcctttactcatatttcactaattaactcgtaattaacttatgtaagattataatcctactctaatacccacttaatcacatatttaataaaatatttttaattaaatatcattatattttttagaatattacaagtatcccctccttat

SEQ ID NO: 27557 - DNA, 2363 bp, Cannabis sativa
cttgcgtagtgatcataatttttgtaacacaaaacttgctcgtttaccatgtggcccacagttcaatccagtggccttagatttaacggtccattatcttgggtctgttgagtatacttggtcagatgttcttctggcccatactacgacatgtttaggtataggtttcttttcctctgttaagatcccgtatgagtggagtgtattccattgattattgtccaattaactaataagctcgttaaatcagcacggttgcctacctagagcgattatcaatcgctgcttgttgggctcccatgatctccatctgttgattcatccactcttggaattggcatttttactgtttgaatgctggattcacaactgatcgggtatactcctgatcatggtgaagagtgttggtatgttatttcatttgccctaaggcatctcgtacgttttggaactcaatatcatcaccgatcaccactcgaggttctctaagagatggatcacaggtaccctgtctagtctctccgctatgaatactagtggttctagtatcctctccacctagagtgaaccttgcccgaggggttgttactccctgtcttgctgatggtggaactcgtggtggcagacgggtgctcggatcaggatttgccaccattttatcattcctattaataggatttttcacattaggatccgtagccatcagaatagttatttcagtgatttgagaccttctggtagttacaaccatctttggagaggatcaaagcgatacgcagtgttctttttgctctcaatgaaagcaccaaaatattaatctcacttttagccaacgacgtcgaatcaattaaagcgatgagaattatagatactaatgagaataatagataataattaataataatgaatacttaagcaaattagaacacataaaaatatagaggttcggccccgtgataatggtaatagcctactcccttttttgttgtattgctttaaagaattaataagatcacaaggagctggccaagtgagttacttaagagttctcaagaaaaagcttacaattattttacaacataagagttctctagaaagtataattttggatccctgtacaatggaattgctccactatgtatatgaaaaaaaaaatacaatagttagatttctcaaaacagataaaagtaaaaaaaagtaaactaggaaagtttcttattatttcttatcggtgtaagtcagtcccacaaaattagggatgtgatcgggacctaaatgatagaatatttaagggaggtatctctgaagatcttcttacgctgaattactctacttgaaagactcggcattcccagataatatggatctgtacgggaaatcacgcacaggttctgctcaaatgatctctattgaagatgtaaccttgacagattcaagtagaaagttctctggcgaagccatgaaggtaaaatcacccatccagatttctcaatgttctccacgtgccaccatgctaaatgccacattaccctactgaatttgggataacaaggctgatctagaagatctggtgtggattcttcatcaagcccataaagttgtggattggatgtttgaacatttatacagaaagattcaaggatcccctattagacatcaagaagtaaaatccttatcccaagtagttagatttaatttatgttatattgtgttgagatccggggtttatgcttcatatcgaattcaacaattttttttttaaaaccttaatccaatttacccttccgttgcgactttgatattgtagcaaattttctcagggagtatggataacttgattgatgctctccctcatggataacttcctttgattggatgaccctccaatggcatattgtcttttagagcgaagactatgccattaaaatgactttaatattgtagcaaattttctcagggagtatggaggattataatcaaatacataagatataaataaagtattacatcaagattacaaaataaattagagaagaaaaagaagaagaataaaacacaataggcttgaccaaggctcaaggacctatgtcctaaaaattatttcctcccttgaatggacacttaggaaagctctagaaggatttatcaagcctcgtatgcctagccttgcgtttaaggatgagcatatcctcacaagcttcttaccacaggaaaaatatttcaaaaaaaaaaaaaagtgtattacaagtgaacaatatggcctctatttatagagtgttcactcacatatgaacatgaataactaacataaagcctttggatgttactaatcataaattaggcctttatggtattaattaggt

SEQ ID NO: 27558 - DNA, 5350 bp, Cannabis sativa
  modified_base (2543)..(2556): a, c, t, g, unknown or other
  modified_base (3833)..(3835): a, c, t, g, unknown or other
  modified_base (4332)..(4336): a, c, t, g, unknown or other
  modified_base (5289)..(5290): a, c, t, g, unknown or other
ggacggcttaagcataaagccggtgttgcattgtttatatatgttttacgcatatcttactgagtcggtctactcatcagtttgctaccttgtgtaggtaacggtaaaaccaagctggaggagtagtgagttaggccttggcaaggattgtacatatcgcggtagtgcaacctcgagggtttcgttcgtacaatattttgagttcattttatggttgccctgtagtttgtaaaaaacatattatgtgactttatatattagtatatattttcaacagcagttttaaacttgggatctcgacttacgagattttataaatataataaaataagcttaatccaaattagtcaatttttaattatggcattacaatcctggtttaaaaacacgattattctccttaaatattctatgtcatttcgaattgaagacacttctttcgtcactgtttgagacaagatgacagttgtactatgagcatccttatcatcttgctcaacgggctttgtccaagatttgtcggcaaagtaagtatcagcacaaacacgctggcatgacatgatcaaaccatcctttcagagattttcattactaaacaaagatcacccatctctctcccatgccttaatttttaacaacatgactttaactatcctcttcatgtcaataagaggatctgatcttttgaaagggccgaatttttggaaggtaatgcatcttgacggaagaacatgagcatagaaatactcctgatggtaaaggtcacaatttcttttggtaatttttttaatgtatgggcaaaattggtgaaaatggtagaagccttcttctttgcaggttggaattcttttcaagttgcaaagaaagtttatttcacgaggagttggaataggccagtttctaaggcagtagaatatgaaaaaggtgacaagaatcctatagccatttggatttatctggtaagggcagacaccaaagaaatcagctatggatatgaaccatggatgtaagggcaattaagcacctgcattcatgtggaatcttgaccaatcagtacagcaagtgttttaggagccattaggaccactgcattgtggcttttgaacaacaattttagggagatagtaatcatctcgtatcaattgagcttgatgctcagtaagagttttaaacacaagaggctttatcctgaagacgtgatctctcaaatcatcactcttaatggcagctttgagaagctaagttgccatcaccttcccaccacacgtcttgtctatgttctagatttatgcataattagcttagctctaatgaactaagccacatggaggtcatattcatcaggaaaccttctacttttcttcatcctagccatctcaagctcaacaatatagttgcttacaactcaagaaaagtctaaattgggttggaaaagtcaaagcaattttggaggaatttttcaaggcactagagaagtgttttaaatttttggagatcttagaagaaatattttaaaggttctttgggagtcaagaattatttgtagtaagatcaacaaaggaggagaagaaaaaaattagcatcaagaagaagaaaaaaatgtgtattttttctatgttaaaatgaaggatgcttgaagacttgatgaagatgagatttcaaagtgctctctaaaagctataggcatgtggagtatgaatgaggaagcgcgaaaattttattgtcaactcacttatttatatgtgagttcaatctcctaatcctaaagctaataggagtcttttaaatttaaagcttttaacgaagaggtaaatgacaagtaaaagatataattatatcttcctttttagctagatttcgaaattcttatacaaataggaataggaatccaaatttaaatggtaacataaaatcctaatgctattaaaattaaggaaaaattgtagaattaaaagaacaagataaacgataaagcaaaagaccaaatttttttctcttcttcttttctctctctgatttcgaatggcacctactaataggattaggatttcaatccaattaatcctgaatccatgaaaaaaatagtaataaaattttcaaatttttaaagaaaaaggtaaaagataagtgaaaaaaaatataaattttttctctttttctttgttaattaatttttgaaattctcaaggactaagcaaaaaagttgaaagtcctaatttaattgggaatacttgaagaacatatacaattgcctaagaatgtcaaaactaatgcccatctagtagtttcaagcgaaacgagcttggttcacatcatcaaggcaactccacacaagtgtaaagttaactttgggggaaaatgttaacttggaaactttcactggtgacctagacatcaatatttgacatgtggtatgaaggataacatcacagagttgagtatacccgagtcatagtagtcgacttggaaagggaccttagccctgtgcccaggttgacttcaagatcttcgaaatggaagtttggacttcaataacttgaatnnnnnnnnnnnnnnttagtattctataccatgaagacatggaggaacctaatccaaggctcaggagctaaaattacacgaacctacaaccctaaagccaacctaggcacctagggtttcactcgatgcctaggttaacatatccaactagggtttcaatttctgggaccgtcttagtgcaaaagggccaaaacttgcattaagacatcaactagacataccacagatatatttgaggctttagaattagaatcgaagtaagttcatttatgagcacccgagaccccgagcactagtgcccaagttcacaatttgttaatctggtgcctttcaagtatcgaatcaaagatccaacttttgcatcttctctgttttcatcaaaaatgcaaaaataggacatttcaaagaagaaacaacacttcctgggtgccaaaaataggacccatcgcccaggttaacacctgggactggccctacgcccaggttgacatttttgtcaacctaggccattgtcgatggtgttttctgagatttctttcgagcatcttctccaaaaataaaaaaaattgagattcaaatattttcagggacaaaataaaatttctaaagggacaaaattgggaccaagcgcctaggttgacacatggagctaggcctagcacctaggttgacgtattgtcacccaggttgacatattgtcaagctgtttccaatcaagttcacaaaaaagtgttcagggaatttttttcgtcattagaaataatgaagatttaagaaaacttgaggaaaaacccacaaacctgagcccttggaaacggggcccaacacctaggttgacttggtgttgggcctagcgcccaggttgacaatcaacctgggacactgcctttaattactcaaatgccaaatttgatttaactagtgaatctcgaatggtaaaaaaagggtaagatcctgggagttttgccctcaagtttaaaagccttaagagtatcaaaaataagatcccgagagcttgggagtaagtacccaacacccaggttggcaaaaggcctggtgtgctgggttctgcttatccaattctgatggcgtttggaaactccatctagttttcacaataacaaagatctatgaagtcagagaagtcaaattcataactttgcatttcttatttccaactcactcgaaaatgaagagtttcgatctctcatttctgcagaacaaaaacatctctaagaactggtgaccaactttgcctagcacaaaaattgactaagtgatgtcaaaatatnnnttaggcatcttaaagtacatcccttggatgtttttacacttacccagcgtcgaggttgacgtcatatgtcaacttggcaacagggatgtcaaacctcggtgctggatgtcaacttgggcactggatcatgatcttccttcagtaaaacaaccataaatcactcaatattgatcctattaatgtgattcaatttgcattgtaaagctaattcaatgatatatgaagttgtgtctcacactctaattgtaattctgaagctattgtcatcaaaattcacttctaaaggagttacaaaaataagctccgggttacctacaatggggcctatcatgctccaaaaaatggctattaccaccaagagctaattttttaccgttatatcattatcaatggtcaaaaatatcttatttgtatttttccctatttttgtgggcctccttcacctatcaaaggagagctccataagcttaaaattcacattcagaaaactacccacnnnnncagagcttctctctctagaaattagagcttctgacacttagtctttttctgtaattaccatcacgtgagaaataaaaactcgaagtagatacagagagtgaactactataaatttgttatgtctttcttataattacttaactacttttaattctcgccaatttagcgagcgggtgtgacttagaagtctaatttagatttttgagtcaacacatacatgacaaaccaattcaaaaactaataaaaacaacattattttagcaacatttcgcagttgggacctcgagtcaatttggctttcctattcaatttcggagggtgcttcgactgatgggaggatacaatttcagggggtgctttgactggtgggaggaagctttgatgtttggggtttgatgtcagggaagatgcatttctaaggtttgtgatctcaattgccaagggaagatgctatctgagtttttcttttatataagtatttgacttttagtttcttctaatttatttttttgttttagttttttttcttatattaatgttttggtttatttagtttgtataaattatattttatttaaaataattttgaaaaataaaaaacataaaatagtgttcaatctgaaggtacacgtggccaataaactaatgaaatagaatatgtatcaatagaagttttgaaagataagattttaagtatttatggtgcaatttttaagaattaaatatctattaataacaaaacaaattaggagtgggcatcatccaatccaatccaattgaatcgaaccgatccattccaatccaattacaaaaagttggatatccaattacaattagattggattggatgctaaaagttggattctaattagattggatcggttattggatgtcaatctcaaaatccaattaagaactgatccaatcgaattacatttatatatattaaaaanntatttatataataaaaaatattgaaaaatataatatatatttattagattttttttgtat

SEQ ID NO: 27559 - DNA, 1986 bp, Cannabis sativa
aatttataaatcggaaattatactatgtgagagcttatttatttatttattttttttttttttgaaggaacaataagttcatagattaatagaatgatagatgggaatcataggggaatttctcttcccttaacacaaaccagtcaattggctagaaactctagcgctcttagctagtccattcgcaacaaaattaaaacagtgtttaatgaaaaagaaactacaattaggaatacgatccactacatttaacatagacagcgataaacttaagcaactccaaacagggggagcaaccttagaagaaaaagcattgaccaccaactggcaatcagaaagaatatgaatgttgctccacctgttagcaaacgctcgattcagggaaagggccaaaagttctgcttcaatagccgactgagcttccactctatctgtaaagtgttgagttggagcaattgatagttatcacagcgataccatcaacaccagttttctaggaagcatccgtaaagataacataatttgtcgtatcacttggaacggaacaccttatgccactatctctccccagccccgcagaaggagttaactcacggttataattgtacctcgacaactcaaagagtcgtgtatcctaagaataagttggtccaccttggctaaaatcatgttgcaacttactctgtttctcatataccagatcttattgaagacacatcctatgaaggtcatgaagtcttcccgattagaaccagagaaactcaccaccatactttcaaaaaaagttatcgtatccccaggaatcaaatcaacccaaacagggaaggggcttccaaaccacactgccttagtaagttggcaatctttgaaaatatgcaggggagtctccatctcaccattacacaaaatacaatatcttgaacacccaaaatccctttccacaaagcagagtcacaattttttggttatcccagaagttttcaaaataacaatacttacttagcaaataacttacccacggtttccgcaagactccaagccaatttagacaacaatgcacgatttatatcttcaaacctccaaagacccaaaccaccacaacacttaggttgacacattgactcccatgacttcagagccatgtatttatcattctccttactcccaagccaccaaaacttcctaagtatggcatcaagttccctacaagtagtgagtggaaccttatttgtggacattgcatacattggaattgagctggcaacaaccttgatctgtgggagattatttattacaaaaaaatgtatactttaaataaaaatattaatcactcatattagattcatttaaatttttttcaataaatgactaaaatttttattgatgagaagtcaaaagtacattgatcatcttaatacaaggaaggaaattcttttaagtaatttcgttttctatttgtagtgtatatctagtggagtaaaatgtaacaaaaacagacatatacttggagaaatatatacaaagaatcttaaattcctaaaaacagcctcataaaaaaaagaagagaaagttatccactagaaatatcaaacactttgaatccaaagaataaaaacttttggaaaagaaaacctctcttatatctaaaattttaaaacgagaagagggaaaacatctttttgagtagaacaaattaaatgtatagatttaaaactcgatactgcttgtttcactgcaaaagaaacaaaaaatatattagtggataaaattacatagaaattttttataaataataatcaaatcccagccccatccccatccccatccccatactctgaccttacacacagattctgaatttttaggtatacaaaatatgaattcacatacgagtttgtaaaattcaaaaaatgaaaatccaagtcaaattcaaaacatttacaatcaaattagagaattcatccgcgctttgcgcggtcttttaca

SEQ ID NO: 27560 - DNA, 2097 bp, Cannabis sativa
agaatttatacattaaatataatcatgatataaattatgtgaaccatgcaacataaaatgcgatttctaatcttttatttattagtaaatatgatgatatttaaatggatttcatttagggcacaaaaccctacaattagggctcccactatatttgatttcaagatcgtcaattaatgtggattcgatccatatttcttgaacttagaacatcgtagacactcatgcattcttcttcaattaaggggttagatgacaggccagccaatcaggttctaggagcttgtcttctttagatgctttagttatgatattggccaggtctgtggcaataacttccttcacctcttttagggcttggtgctgccatagaggttaaaggggttaatactctagaattttggaattaggccagacctaagaagtaactcagttgtggcgaactcctctacttgtaactgctcctcagtaaaggctttgtactaggcctccttctttgttatttcagtagttttggcacttcgggatgggacaactggcaaaaactcaaagtatacaaaaatgccatctgtaaataaaccaaggtaaaggagatttgagaaatgggaaaattaaggttgtgggtcgacaatacctggtaattggaagttcagttggaggagggcaccctttttattgggaacctaaaataaaagaactaatactctcagaggtcatgggtacagttattgtggctaatgggataatgagaaccagcatgcttgtccaatttttagaagcccagtttcttcttatttgtcctcattgggttggccttcacgctgtaaaagtaaaagatttcctctggggaaggcacttccagattgttctacttacaaaaaacataccaccttgccaaaagcttgtatgatgaggggatcatctgaaaatgagctatcctaatcttggcaataatgtttacaaaataggacctcaatggaagatgcactctattggaaatattggaccagctctaagcactgaatccatccatggttgtggacacagattctcctgtggcagacatcctatgccacattaaccctaaaacattgcaaagtccagaaccatttgcatatgccaccaacatttcaaaagaatagaaatatttttccttctgatccatcttctagatgaattcattgaaaatttgggcagcaggaggggtctttgtcttccttttccctttagccttcacggagggttcatgctctgagatagattcaccctccaagatagtctcaagaaccatatcttgttgggatacatcagtaggaacctcgacttacgttccttccgcgagcacctcttctgcgaggttactaggtgcatcttcaatagcttccacgtcactcaggtgaaaatcttggttcagatccatcgctaacaacacgaacatgaagggaaaccaagctactttaagcgacaaactaagaacctaaaacaaaaattcgtcaaagttgaattccaattgacaaaccccaaaaatctatatacatgcataaatctatgaaatataaatagccaaaaaaataatccacacggttctaacccccttttcatgacaaagtgtctctcaaacaggtccatcccaaagttgaaaaaaaattcgcgtagcctacttatctattcaacatgcaaatagtcccaaccctagattaaactagaaatctctatcttaaacaagaaataataaaagtgcaaccagggattaaagtacttacttgctgggtgaagacgagatgaggtgctattgtaaaaatttgcttgaagccttcgagcccacttggttagacggttgcaactggtctggaagtcaaaaccttagtctggcaaggggtatattaggtcaatttgaagggtttcaatatcagggaatagactcacatggagattatcaaaattttggttaaacactcacaatgttcttgcatccactagcaaaggaacaagaagagaggaaaagcttgtagaagaaatttggagtctggtaagaaaactaaggaaatgaaggatatgaaaataaaaattgtggaaaaagagaaaaaaaaaaaaaaa

SEQ ID NO: 27561 - DNA, 2647 bp, Cannabis sativa
tatttcctttccattccattccatttcattacctccaaccaaacgccacgttagtgtttagtattttttcggttttatattcttaattagatagtatatctcatgtattttagtaatttttaaaaaatatcgttaattaattataagatatcgcatataaaaaatgttaggtactattaatatttaataacaatattttgatattaatagtatttagtaccttccttaatattatattattattagtacaattaaatatcaaatcttataatttaagagagtaactttataaaaatatcagtaaaacaccacctttggtgttagaccgtataaaaatatatatgccccaccattcactacaacaagacacattataatttcttccacaaattctgaataataaggtaataaaactaaaaagttggtcataagaacttatgtcttgagacttgagcttagtgagaaaagaaaaaagaagaagaggaaaatgacaaacagccttatattagtgctccaccagagtcagaataagactaaaaaaaaaaacaaagccaaaattcaatatatacatacaatatggccacattcacatacatatatgatatatatatatagagatagatagacaaagtaaccccataaaactccaccttagcttttcttctaatctcttccactccatgagaatataaatatgaaaattccaagagccttggaaaacgggttagtggagttatttgcattccccacaaacatgccctaatagtacctctctctctctccctctctctctctctcaccttggaccaacaattttcaacactttttaaccaaaacaaaaatcaactctttatatggggtaataaaaagaattgttattaagtaccagtagtgtttaatactttctctacatgtcgcgttgcgattggctaacaatactccctaaaagttattatattaaactatatgggacctgatacttagttggaccaatagcaatacaacacataagagagtactaaacactactgctgtcctttcgcatttcttggtaataaaataagagcattgctatattcagcattagtgtgcagtattttttataggtaacgttttataattagttaacgttatgtattaaaaattattttttttttgagttatatgagatctgatacttaattacattaataataatttgatatgcattgctataggcaataacgtgcctaatacctctataatttttattaaattatatgagattcaatattaaattttaccaataataatattacacctcataaaaatactaggtactcataccctttactatttcttgattctattttgatattagaaaaatttacgacattaattatctctattataaataaagtgtttttggttttatatatagagaaattacaattcaaaaatccacatcgttaaaaatagaatttaaataattagttgcacgcatatgtaattttatttttaaatctacatgtgcaattgattatgtaaatcttattttcaataatagtgtaaatttttataaatacatataagaaaattctataatatacaccattttaatagggatatattttatagttatttaagacatcttgtaaaattttaagaaatttgaaaaaatttaacaccctaaaaataaggtttaaacattatgttatacgctaaaaataaattatttgaatattattttctatattataaattattccaaaatttttaaaattttacaacatatcttaaataactatagcatagacacttatgaaaaaaaattaaactaaaaaattcttccaaatatcgaaacagataagaagtacatcggtagacaccttttaaaagtgtgtgttatagaagcaaccatatatatatataaaataataataatataataatttccaaaaaaaatagaaaaaaggttacaattttatgtctttatatatgagtacccatcatgtctccctcttagtcttagccccccctacactcatatacccttaaatcctattatatctaaagctagctaactactactctttactacttactactctttaaaaaccctttcatatcacttactccctttctcctttctttatttaattttctctctttgacattttcacaaacacttaccctccaacacaatcatgatcatcctcaccataaaaaccaaaccccaacaacccaaccaagaagacgacaaagacggcaacggcgacggcgacggcgacggcgacggagacagaaccccttttgtaaatacttgagattatggcaaacaacaaaacacaaacccaaagctaaaacaggctttgcaatttcgtcctttaattttggaattattgcatcgccaggggaattgagggtaaccggtccgatcatattattattattattattaacattttagtcctttaattttgcttttattactcttttaacctcgtctttgtatttttattaagtttatgcccctttttattttaatacatgggaatgggatgtaagagatgcatacgtggtcaaatattaccaggcatgcatagcttacactctataatatatcttgtaatttttgttttttttaattaatgaaattaaaaattaa

SEQ ID NO: 27562 - DNA, 1570 bp, Cannabis sativa
tactatattgaatagtaaataatatgtaatattttatcttttatgtaatttaataattttatacatttaatttttaaaataaattttatttttacaatgggagattccccgtcctgtccccaccccattaggggattccccgccctgtccccgtggggaataagcagggatagggcgaggatggggattaaaattcttaacgggaatggggacgggaagagcactccccgctaattccccgccccgtctgcatccctagtagtaagatttaagattttttgttagagtattattataagacactagtggttataaaatattagtggtgcctagtattatttataggtaacgctttagaattagttaacgatatttgatagaagttattttattaaattatatgagattcaatacttaattgtatcaataactataaatcatgttggaatgaaaggtacttagacaccactaccactagtaccttttaatatctctcatttttttctaaggaacaagattcgatcttatttatttttgaactaaaaaattaactttcattaaatcaaatcaactatcaagataacttccaaaccagtatggacaaaactcccacgtgaaacacagctaggaatagaactaaaagaacgagctaaaaagttagccgcctggttcccggaccgtttaacaaaattaattgaaataggaaataaaagagaggattgcataagagcaacacaatccgaaattaaaagccccaccggagacaacaaacacttcttctgttgcacggcttgcaccagtagaagtgagtccgactccataaccacaccagcaggcacacccccctcaacccacctacccttcacccaactgagcgcctccttcaacgccatagcttcagccaaaaacgggtcgggttgaccataagttttaaccgccaacgcatcaatgaacaaacgattatgatcccgagcaatccaccccaaaccgagactattgtcatcctcaaagacagtagcatcacaattaacctttatctcaccaaaacaaggtttagcccattgctcacacctgaaagtattcaggccagaaattggcgacacaactctacttttcagctgagcatttgtaattgcagcattcattaccctctctaccgacaaagccttattactccaaaccaagtcattacgagctccccaaactccctaaagaagcatagcaagcctctcaatctaatccataggctgaaccttacaaacattatcaaaccaactgccaaacacagcagcttcaccccctccaaccgtcccccccagccccttgttcaggtaactcttagtaaaagcgcagctaaccattatatgaaaaattgtctcatcctctcgattacacatcggacacaatccgctcgcgtgcacccttttagaccgcaaagacacaagagtagggagacaactagtaagacctcgccaaagaaaattcttcaccttaggtggcaatttcaagttccaaaacatcctctaaaaacctgaattgtcctgagtattccaccttccattacttactt

SEQ ID NO: 27563 - DNA, 3066 bp, Cannabis sativa
gaatggattagttgagctctccctacaaaagaaagattcctactggcccagccattcaatttctgtttaggctatccaaaataaccccacaatcagaagctttgcatctagtaggtctaagatgaacccctagatattttaaaggaaaagaaccctcttgcatttgaactaacttcagaatttgaatcttggactcttccttcactcctccaaaatagatgtgcgatttggtattgttaatggagagactagaggagtcagaaaacttaatgaacgcctgttgcactcccttaaccgagctaatgtttcccttgcaaaaaatcagaagatcattagcgaaacacaagttgataagacctagttgcttacaatgaggatggaaactaaagcccttgttctttgaatattgagccaacaaccttgttagataatccatgatcagaacaaacaatagaggagaaataggatctccttgtcggagacccttttcccccttgaaagagccttggattctaccattcatcaagagattgtacttagtaccccttagacagaccattacccaatggataaatcttgaagggaagcacaactgcttaagtaagttctccaggaagttctagtcaacagtatcataggctttgcttaagtcgatgttcatgatacatcttgctgaaattttcttcctgttataaccctgcaagaggtcctgaaagataagaacattgtgagcaagaagtctgtttttaacaaaggctccttggttcctgtgaacaagcatcggaagcacatcagaaagactagcacaaagcattttagaaatgcacttatataatatattacaacaagcaatcagtctaaagtcaatggccgctttaggatcctcaactttagggacaagagagatatctgtttcattaaggaagggaggtaacttcccattctgaaataaacccaaaataacagacgagacttcccctccaattttattccaaaggcccttgaagaagcctgacccataaccatctaacccgggacttttagtagaatgtatgctgaacaaagcctttttaacatcttttctagtgaaaggtgtgatgagattaacttgctgctccaaattcagtaagttaccatattgaatgcagtccaaatcaatctcagctatgactgagctcctgctgcccataaatctcttaaagtgattaagaaaatgatttaccaccttcccacaatcatcttcaacatggctgccaatagagaaggtagtaattctgttctcaagttttcttttcctcatactagcatggaaatagttggaattctcaccaatgcatctcacccaagttattttactttgttgtcgcagatagctaatatacttagcatgagttgtagtaaaagttacctggctgagcttctctttctgctgtaaagtaatatctgtagggtttttagcaagcgcctcttgagcttggtaaagatcctctttggtcctcttgaaatctctagtaacatctcccaccgaatccttgctgaatctacgcaaaacatgtttaactcttagcagctttatgttcacagcatcaagaccctccttcttagtttcacgctgccatcctcccataactgtttcagcaaagccattatatagcatccagtgattataaaaccgaaatagtttgtaaccaacttgacctatttcatggcttttgattatgcagaaactgtgatcagaaacattgtcccatttgaagattgcatctgtattggggaaagattgataccaactattattagtaaacactctatccaacttagagtaaatcctatccccagcatcatgtttattggaccaggtgttgtgggatcccgcacatttaaattcttcaacttcaccattcgagagccattgttgagcatcttcaatatctttagcagacacaggattccctccagttctatcattatagcggaacattgcattgaaatctccaaaaataacccaaggttccacattctgtccaagactctgtaacttgctccaaaggtccttcctttcatttatagaattgaacccatacactgcagtaacaaaaaaagcaatctgcaacccacggattctcactttacaatgaataagttgagggtcctctatcaagatgtccacactaacaaacttcctttgccacaacagaagaattcttctcgaaattatctcactagaaaagatttcccaatttggaaaattatttacaacatcatcaactactttttgatgcttcactttggtcttaaagagagcaccaaaacccaccttattctctctacaaacttcaaggatagctctttgtttatcctttttattcatgcacctaacattccaacccaaaatattacaaacttccataattttttggattagaattagtaagcatagtctcttcattctctccctgtaaaacagtaaaaccattgcttgtttttgctgtttgggactcaacaatgtggccttagaacccttcttctttggtgtcacccaattagtctcatttgccactccatgttgcacaaccttctcattattcagattcgattcagcagcagtacactgcttatcctccctaacccttttcccttccaaattctcattccccttatcaaccttatcatctatactctctaatttttcagtagccacattatctttaacacctgctttttccttcttctcatctttttcttccacttccattttcttcttccaggtaacccttttctccttgttgcaattagcaacagtatgtcccaacataccacaagtagcacacttggatggcagccattcatattcaacgaattgttcaactagtcttttatgctcattaatgaatgaaatggttttcggagggttatccgagatctccatgtcgactaaaatacgagcaaacttgaccattgttctgttttgagtcaccttatcaaccatgattggtttacctatagtactaacaagagaacttaggttgtttattccccaaaattgtagtcccaacccatttaatc

SEQ ID NO: 27564 - DNA, 4864 bp, Cannabis sativa
ttgtaaagttagtttctaaatggagagaacacattgtgaaaaaggaaggtttaaatcacgcgcgccctaaaggaaggagggaacactgaagcaaaatttctcttcgtcaaaggagcgagcgagcaaccaaccaatccaagcaatgcccttacaaattcactaaaaccctcatttacaatcttcactgaaaaccatatccatggacgattcactgttgaagctcatctccgataccggcactaaactcaccaaacgaaccaacccaaacaaggatttcattgtcaaatctcttcgagtaagttcatttcattactacacttctccaatagcttggattaaaccactgtctgctcaattttatttttccattcaatttcttaatggttacttttgatgtttttgtgcatcaatttagtgctcgctgaattcgggatatgtaggatagaacgaacttagagtgtttttttaaacaaatttctcaatcttgatcgattcatcgcttttctttatcgtcgttcttgctggttctttctgtgattcattggtgtttctttttgcagcaagctgcaaatgctttgtcacagttggaacagccttcttctcctgaccccaataaaaagttggaagctgctagagagatagaggctgcgattgagcctctgaaagaatgtatcataatacgcggattgcttcagcataaagataatgatgttaagctcttggtagccatatgtgttagtgaaacatttcggatcctggcacccgacctaccgttcgaggataagtatcttagggtaaaaacgttttcattttcgttgtattatgttgtctgtgcttatcaagttcgtagaattggtgattattttagggttgaaacgttattatgctaactatatcaacaccttaaaagaaaattcatgggggactgattagtgctaggtacttaattccttatttcagggtgtttttgaacttatcatcagcatgtttgcggagctagctgataccacaagcccatacttttcaaggagggttaagattctggagactgtctcaagatgtaaatgttgtgtgataatgttggatattgactgcaatgatttgattatggagatgttcactacatttttctctgttgtgaggtcagcatcttctctctttctttacttcatgtgccatcattttggtatttgtccttgttttttttttctcttttccactatagccttctgtaatattagtcattgcggattatattttttattgtcgcactagttcaaagaaaggaattctgtacttcatttggtggttttgttttcaaataatttaggataataagaaacttattcttatcccaagtgcggttttagatcatttacttttggagtgggttttatttgttttagtagagtttttgattgttgtagtaagtcattcccaagttttcatttaaccaaggttttcctccaccatagttgagggctctcaataaacttgggagaagggcagttctagacatttgacctctgtctccctctctccctctctctctctctttttttttaattcaagaaaagatcattgttggactggatcactgacagtttgctttccaatcgcttaactatttgaatgttctgtaggttatgcttgttctcaaaattttggtgatacaagtacaactataatggtattaattattttttcttttgttattcttaatttttcaagagagcatcaccagcagagtttgataaatgatattttgtctataatgactgatattcttaacgaggaggttactcaactacttttggacgtgattttacataatcttttgaaggaagaaaaggtgagtgtcagtttagtaagcatattttggcccaccctgatttatacaattgtcaatcttcaatttgattttctggaaacaacatctttttacactgttgaaattttgtgatatgggttacaagtcctagggcactgggttgcctttgtgcagtgtaagattcagtaactttgataagccaatgttcattttctagtaaaaatttacgttgtcttatttatatggtgatgaactgggattgttggaaaacctataatggtgatgcacacttgtgcacagttcaattctttatagaactatgataagttattttattgataagggcaagaacaaatacaaaatttcaagtttttgaggaattggaaaaactccctactccaaacaataacacaaaactcctattctcataaaactcaatctctgaatttataggctagactaacaaagaaccctaactagccaactagtagcaatctaagtattaaataactattaaacaaccatttaagccaccaaggagttgacaactcacccaaactttcaccttgttctcaaggtaaatgttttgagaatccattcccaaaggtttttgcaatttcaaacttggaagactcaacataaactagtataaagtcatccatattggacacaaccaattttacgttttctgcaccaataaaattgaaaactgccttctctctcttcacttcagttccaatatgatcaccaaaatcatgcctgccaatgtaaattgatttgttctagagacaaggcgagggatgtttccataggtaattggttttttcaagacaataacatttcaagtataggaatacacaagcaaaggagttgcgatttgatggtccaatatgctattttgatgtttttgatgtggagccatagaacaattacccaataattcgtgtcttcttcacaaatctaacagttttcactttcttccttcattaaattgttgtctgaaaaattgacaaatccttttctctcttccttggtcaccattgatattgtaagatgaggaaataaagaaaaaaaaaaaagaaatttgatagcagaattcacgtctagcacccgttgtcgaaatcccatcattgtatttatactagagcagtacccaaattccataccacaagattgtgcatggcaaagattggccagtcgctgattaggcacataaaaggaataagaaaaaacaaatgtaaatccagagattatgtccgaatgccatattgatgttgtagcaacaaatctcttcgttttgttcaaagaagccactcccacagtttggcgcctcactcgtgcgtaagccttgaattggggcactgttgcggcttcaaagttcgacattgaggattaaggaaagaatagaacgattggttcctggccttttacaaggagaagaaacttctaattgggccttaccggggtctcaagtgcccaacccattttcttgagaaattaggtgaagaggctttcttatgtggagcgagtcttgaacaattttgattgggttggccttttgtgatagggttttagtgacccattcgaagaaaacgaattgtggaagttagaattgtttatcttcgtctttgttctagttgatctctccactgtggtgggcttcctcatcaccggtagtaccctcaccatgcggcttctcggcttcaggcgaaagtgggaattccattgctagccataggtggaaatggcaatcgagctctccgacgccaaagagattcgaggaccccgccgttgcaagcaattttttttttttttttcaggatatctaggggttgtttggtttcataagttaaaaactgtttttagttttttttttttcatcttttaaaaactaatatggtgcatttggccaaattttttaaaaatatttttttgaaactgagttacaaaaaactagaaaacagaaaatatcaaaatttttggaaaagtgaaatcccttcaagggttaaaatttttgtttggctagttgctgttgggaaagttaatgtgcatgatgtcttacaaagaaggcgaccttttctcctcatctctcctgggtggtgtgtatgttgtaagaacagtggagaagaagtggatcatttatttttgtactgtaaattttcttccagtttatggtcaaagctgttggaggaattcgggtagtgttgggttttccctgaaagtgtttcacaaatgatagtttgtaaattaaaaggaagcaaacataagggtattctttggaagactgctgccttggcaacactttgggctatttggttggagaggaattctggagattttgaaaacacagagaattcagcagaagtggtttgggataaaatcaagttttgatcagcaacatgggttttcaaaaccaagcatttcgaagatttatcttttctagatctgagtagagaatggagagttttgatgtaatttaggctgtagcctgtaacttcttatgtttttttttttttgcattttgctttattgttattgtttttacttccttttattttgtttatggcaattttcctctgccaaaagtgagggttttaatctataccagagggggttagtctaaaccaagccaattttggaggagctttgtgataatgaaactaaccagcaaaaagcattaaagctgcaaaaaccaatgcaccaattgcagtacaatagagtttcactagttatttcagaagctcgccaaagctaaaaaaacttagaggttatttgtattcgctcttctcttctcttttttttttttaaaagaaaacatcaaaatgttgttttctattttcaaaaacaatttttttttgtctaacatattcttttttacatattcactcaccggactcgaatcccagacttgaatccgaacctcgaacctcggccacagacctcagtccttgggccccggccctaaacctgacccagaccctggacctcggactctgatcccaaccttgacctggactctgacttggacccgaa

SEQ ID NO: 27565 - DNA, 3294 bp, Cannabis sativa
gtacggaagcaatgaaagtagtgaacatattaccttttaaatctatggtttacataaatttattccatccaatttttatgaaaatgattcttaatattaaatatttaattgtgattagattgaatttttaaatatccaatcaaatcgaatcacatgttcgaagaggtattcaaaattctaatacatctaatatccaattattttttatttaatttagatgagtaattagattttatgttcttatacttaatatatatatgtataaaaattaagattaaaattttacttttttttagattggattggatttctaatccaataaatactggatctaaaaaataagatagatctaattcgatctaaaaaaaatactatatctaaaatattggataaatctaaatcaatgcaaaagatatacataaaatgcattcaatggatagaggtgatccaatctaatctccgatggaatataatatttgaatcgatatgactgaaattaattagatcaaattggatgagatgaaatatataataaaatctaacatccaatatatggatcggatctgaatagtcctacaaacattaaaagttgtccaaaagattcttttttttaaaaatcttttgaaacctccacttttgatgttatttgacagacaataatttctatgtgtattatggatatgcacactttgggagcgataaaccttttggatgttattaaccaaagatatacaactttacactatagttagctcagcaccaatcaagaacccccaaagaattccaaaaattcttgttagatgttcgtcctaaccgtcaactctcttttctaggttctttactagggatgcacacgggtagagaattggcggagagtgcttccccggtccccatccccgttaagaatttaaattcccatccccgcttatttccattagggatagggtgggaaatcccttaatgggggtgggatcagggcggggaatcccctaattaaaaaataaagtttacgataaaatttaaatacataaaaatattaaactacataaagattaaaatattaaacattaattattattcaataaattaattattatctaagacacaaattaaaattcacaaaaagaatactaatatactaaataaaattcacaaaaagaataccaatatactaaaaaaatacaaaattacattataaattataaaatattattaaaaatattaaataaaatattaaatgggtccccgtcggggcagggagtgtgatctctgtcctcgccccgtttaacattcgggacaaaaagtaatcctcgtctcgccctgtttcccatttaaacggggaatctccattcaattaggggcagatccccgtggggccccatccccacggagaaaatatgcattttaaattaaatatgcattctctactcattttatctcaatttaaattaaatattaaagatatatatttctagaaagattattaaaacttacaagtacattttaaaaacaatttacaatatctaaccaaattgaagtggtgtttggtaatatttttatttttttaatcacaaaaatgaaagtacaattttttaaaaaaaaaatgaaattgcttttgaaaaataaaaatgtattttgtaactagttttgttttttaattttaaaaacaaaaaataaaaatatattctgtaaattttatttttatttaattcaggtctagagtttggggtttggggtctggtgcttagggtttggattcgggttgagggtcaggggttcgaggtctaggccaggagtcaggttcgagattgggtctgatgctggggctcagaactgagttcgggaccgagcctaatgtcggggctcggggtccaaaatattaataatagaaaatacaaataaattataataaaaaaatctatttaaaaaacttttgaaagtgattttcttttattttcaatatttttaaaattgtaattttcaatttttaaaataaaaagtaaaaataattctatagaaattaaaaactgataagaaaaatgttataagggcaccctaattttttttaactaaacaaacgaccatacgacaattaaatgttggagtccttccttccttccctgtcgtaaaaactatgtcgcctcgcttgaaaattaagtcgtgacccctgaatcgtgatgacattgtcggctgaaccttacactcttcggttcggatagaatcctctctctctctctctcaatggctgtggctgttctggccttgaaccaccaattgttttgcttctcaaactcaaaaacaagtacaaaaccatggcttcccacctcaaaatccacccttacccatctaaaactcattcacagaaaaacccattattcctttatctctttttcttcttcatcatctacttcacagtcccctgaagccaatacagacactgccgagtcttgtgtcaatttgggtctccagcttttctcaaaaggacgggtattacttttaatttgtctctttgtttttgtgctgtaattccatttgtttaatgctgtattgtattgctagctttcaattgttgggttctgatgccataactggagaattttgaggttttgtggtagatgaactttatgctctcttaaatgttctttgttgagtttcttagatgatgcattgttcatattgattgataacatagaccaagtttagtttaatatgtcttttttagataatgttgtgttgttacgctttcttgctcatttaacaatacagctgcaaaatcaaagtaagttcaacaaccctgaactttggacactcaataaacaatgaagaacatgaaaacaacttacacacttgaattaaagatgtaattctatgctctctagttacaactttctgaaacaaaagaactctcaaaacttctcaacccaaaatttttgatataaccaattgactacgtttttttctactctctcactttacattgcatggtagctcggttttagagtcaatgatcataccagaaaaactcactttctgttagttactgaagatgaaagtcagagcaaagcagagagtgttataactgtaatttattttaaggaccaaccttcacaaatataattaaatgctgaatgtttgtatagaagttggttttaaaccatatacgatcaggtactagtttcttgtgaaagcctttgcaatgtgtattgttttctttacttgtttagatgccgtttggtaatacttttgtttttcaattttttaatcacaaaatgaaaataaaatttttgtttttaa

SEQ ID NO: 27566 - DNA, 1846 bp, Cannabis sativa
  modified_base (759)..(764): a, c, t, g, unknown or other
  modified_base (1459)..(1472): a, c, t, g, unknown or other
aacagaaatgtaacttaaggtatttaatccgtcgaaaaaaaacatgtggtatttaagtgtataaaaccgaaaacgtatggtatttatgccgcaaatacccctaattataattgcaaactttttatatttttgtggatatacttttttgttatataggttaatattacgtgtaatgcacttataattgatttttttttttaattagattcaattaggtgattttaagagaaataataaagtaatgtatttttttttttaaattttcgaaatggagtttgagatttgaatttttttagctataatacaatagtgtgtcatttgaatgtgattatatatatttttttaattaggtaacgtatctgataatacatatattgtagttattctattcttaatcagaacttacataaccaaatttgagtgtgtctatataaatgtcgtatttgtaaatttgatataaatattttttatttaaaaactttacgaaaaatatggtgtgtgaatcgaattctcaaaactaaaattaaaagttatcaatttttcattacagctattttaatttaaaatatgaaataaataataataaagttaaaatagggttaaaaatatttataatattttaaattttttttttatctataaaatatctacataattttttttattttaatttaaagataaattaataaatttaaaagtatgattaaaaatatttttaatattttaactattttaaattaatttttttatataaaatannnnnntaatttttatttttaaatatacataataatattataaaattaataaagaatattcttgttatcccattttttgcatcatgatgtggcaatgcatactagtgacacatgtctgttattctttacacttggctgaagaaaatgttctgaatagacttcaagtaatgtatctgcacagacaaagtctgcctgactaagcaaagtaagggaagatgatctgaacaacaaatgaagtcattcctgcgagttgtgcattgagacttaactacttcaggattgatatcgtgaagctcaagaacaatccctacaatcatgggatcgtatcaaagggatatgacaagctgtcaaaatcccccaatttttgtattctaaatatataatgtatgttcttaccaattatagatgttgtaagcaaaaggaaaaccttccctcatgcatttagccctataaatagtgatccatcctcattgtagaaagggtcgaaagaattgctttagagagatctaagagaaaatactcagagatttcattgtgagagctttgagagaggaaacactagatcctttgttctcaagtcaatacaaactaaggggagtaggctattaccaaactaaaggggccgaacctctttaaaatcttgtgttctttactgcttgctaatttttgctctgtgttaattacatttcttatcgcttatnnnnnnnnnnnnnntcgttggctaaaagcgaagtccacatttcggtgctttcattgagagcaaaaatccaagtttactctttgccttaagttttagcagacacacataatggtagtacaaactcgcagatgcgtggttgaccagggtgactcactactgtcagatcctgccttgcaaacttctggaaagacaagggtcccactaggaaccaatcttgaacaaccaatatgcaaccacctactgtgggccaaggtgtgacatcccctctggctggaatcacacccggtgtgcaagagactgggaataccagtttggtagccgatcagagcactcccagcactggaatcccatccacaaccaatgctcagactgttgggttttgtgccct

SEQ ID NO: 27567 - DNA, 1618 bp, Cannabis sativa
  modified_base (48)..(69): a, c, t, g, unknown or other
tttataatcgttttagaagttcacatttaggatgttaaacaacatacnnnnnnnnnnnnnnnnnnnnnnggtaaaataattccaacaactaaacctccctttaagttaggtgcatgcatactagcacgagtgctttgttgttcaagtaagggaaaaggaaagtagatcagccatgagtaagaggtttttcgacaaagaaaagggaaagtagataagaaatgattccaaggtattttgacaaatatacatattagctctactgaccatgctttattattgggaccatggttttataatattttgtctaagtattaatattttgtaatgaaatgatctagtaatatttttgtaaaagtttaaaacaaggggatccctgagctctgtaactttttaagtaaaagggtttaagttatattttaaaaactaattattaaagttttaattaatccataattttccttaaactattagtttattattataaattaatttataaaaacacacacttggtgcccttacgagttagggtgttacaacatggtatcaaagcgaccaaggtttaaaggtcctaaaactggctagatatgtacatttttttgtgaagaatagttcgactcaatgtatagtaagtgctacctacttatctactatttgattacttgcttatatgatttttggaaaacgtgatgttagaaaagcatgataagaattatgtgtagcaatataatgtatgtgtgagaacggaagtacttattagcattggtaattgttcaataattctaaaatttgggaagtctttggtcacatgtgttttatactatgcaatgcacccaaggtgatatggtaggtttaaccgcgagctttctgggctcagggctggtggtgaggatgcaaatcctctaccaccataaaacttggaacaaatgtatttgcaatgcaagagacaatatgacaacaaggagaccaaattagagagttgagagagtagcaagttcggcctacttatgtccacattcctccagtacctttggttgtgccacaagatgtgggaaattagttagaatcgttgtatgaatgaatcaggaaatagaacccaccagtgtttaagggtaatgatcgtgttagatgtgttatattcatgtcatgggaggatgttaattctatttttggcatatttaattgacaaaaatatattattaattgtatatttattgtatatactatatttcggctggagtgtttaatttggttaccatattttgtgtatctaaacttgaaagaaaagttgtctagctttcctatttatggaaattgaggtaaaaatggtaagttttgactacacatttattcttatctaaccagctgttgattctgatcttgtgtgagtttcccattttcttagatcagatttcttgaagagaaaaccggagctaaactttccttttttataaaaggaaagttgtacttactgcccatgattctgtaggtacagaaatggaaattcctggatttaattgaagaattattttagggaagtttctagtgggctggggtcttgttcagaccgtgtgtaagctgtcaataaggtgtatactgattataaatacaccttatagca

SEQ ID NO: 27568 - DNA, 1307 bp, Cannabis sativa
  modified_base (89)..(98): a, c, t, g, unknown or other
cacttatttagactttcaacaaaataaaaaggaaaaattaacttcacaagctgcttatttgagccataataataataataataacaatnnnnnnnnnnataataataataataataaagctgcttaattgaaaagaatccaagaataaggaatgtatgcctaagcaagtgataaaacgaacatgtaccacccacttatagctagtgggcatagaataataacaattattattaattattctgcattaataattaaaatattagtttggctttaaaaccaaaatctctagaatttctatatatatatatatatagacaaccatgatagtattgacaaaagaaaaaactaaactatggtcatcatggcaactcctcctcactactctgaaaccactgctaaaccccacgtggcagtcatttcaagccccggtatgggacacatcatccctttattcgaactggcgaagcgcttagctgctgatcacggctgcaacatcagctttctcaatataacaacccaagcctccgctgcacaaactaagctcctcagctccactgaattcccaccgaacttccacgtcatcaacctccctgaagttgacgtgtcaaaactcatcccacccgactcccaaatcatgacccgactttcaatcatcgtacaagaaagcttccgatgtctcaagtctctacttctcgacatcggaaaacccgatgctctcatcattgacctcttttccagccatgctttcgaggtttgtaaggagctttccattccggtatattcttttgatactgcttctactactctgttgtctttgtctttgtatcttctcactttagataaagagattgactctgatattgagttcgttaaccttcctgaaccaattcgggttccgggttgtactccgatccgaactgaggacttacttgatcaagttcggaaacgaaaaagcgaagaatgcaagtggtatcttctccacatcagtaggatttcaatggcggcaggtgttttattaaacacgtgggaagatcttgaaccaataacgcttaaagccattagagagaacccttattatcacaacaaagcctccatcgttacaccaccggtttacacggtaggaccgctgatcaaagagactgagcccataacagagtctggcaatgagtgcctggcatggcttgatagccaacctcctgattccgttgtcttcgtggcacttggcagcggtgggaccgtcacttcagaacagctcaacgagattgcatggggtctggaaatgagcggtcaacggttcgtatgggtgg

SEQ ID NO: 27569 - DNA, 2456 bp, Cannabis sativa
  modified_base (1932)..(1944): a, c, t, g, unknown or other
tggttgttcatgtgctccggcaactcaccacattctttatgcatacgatacggacaccaactgcattcgtaacacttatctccccgtgtgagtaattgattgcacaagccgcaagtactccaatatggtacatattgataatctcttatttgataaaatggatgatgtggatgactgaaatgatatccttctggattcattgctatattatgtttatatatatatatctcaaagtctttctaaatttaaaataagttagctatgcgcatattcagtgttgaagactacctatatttatatatataatactcacatataggcaacgtgtatagaactaaacatttaataatattctatatatatacacttttttctaaaaaaaaatgttctatatatacttttatcatcaagttttctatacatattttttttaaaaaaaaaagaaaacgttgattgaaagccataaaattagacctcacggtcattacacaggatagtgttgggtatagcagagggttctacaatacccgagatattctgagcataagcccatctagcgacattatgagccgcaaagttacaacttctagaaataaaagaaaaattacaagataaaaatttcttggagagttgattacaagcagacaaatagttaacaatcttccaattggattggacacctttaatggcatttataaccacttcagaatcactttcaacaaggataaaatcatacttcctgtcaatagcagtttctaaagcaagctgacaagcaagttttctatacatatagtaagattatagtagttcttatcataaattttttatggatagagaaatttttttagttattaattttagattgtgttattataatataaattgaatatttttataataaaattaatcgtatacgattaaaattttataaatattataataatatttaattatatattttatttaaaaataataatatcaataattaaaagaaatatttatttttaatttgaattattattattattttctaaaaaaggttacttaaattgtttttatacatgtatttattttcaaaaaataaactttatttactattttttatatcaatttttttatattaatagttaactataacaaaattagttaattaagtattttttgtcagtaatttatttacatacatagttctactttaattattttttaaattaattagttttattattttttttatcaagaaaaataaattgtattaatcatacagagtcaattacatccacaagaggattctccttcaaaaaagaaatttacaactcttttacatttttaagagcaattttattttatccaacttattattctatacaagatcagtctacttttaaggctctctttaatgctactatctatacaactcggattcatacattttttcttatttatacacaaatttttgtttagccaaatgccataaattgtacccgctaacatattcttatgaacataatataatttttatgacacattctaatatatattttttttattttttaaattatatatgtgttttttaacatatttatttatttattttttcaataacataaaactaaaattaaaataacaaaacccatttacttaaagcaaaaaaaaaaaaaaacaagctcattaatgtatatatacacacaacatatataaagctctctttttcgtttttatttttaacaaatttttttttacaaaacaactactttttttaaccagaaaaaataatcacatgcgtacgtacacactaccataccatgtaacttctatttaactttacttttattggctaaaaaaactacccatgccataagatacaaacttaggtggcgtttggttggaggtaatgaattaaattggaatagaaaggaaacaattttcatnnnnnnnnnnnnnttggttgcatttaaaactattggaatatcattctgatggaatggcctttccatcattttggcggaatgactattccattttaaaatagaaggaaataccattccaatgcaagatttgaaaaaatttaataatttttttaatcaatttatttatgcatttaaattttactacattccattcctatcactacaacaattatatgtattaggggcgacaaaagtcgcatctacaactatagaaaatcgctcctaatgactattagaggcgacaagtcgcccctaaaaagtcgcctctaataattcgcgcctaaaagtactattaggggcgacaaaaatgtcgcctgtatttaaatatcaaatatcaaccaaacgctaccgagtctaccgtaaaattaccctacatataaatatcaaatcaataagaaatatttaaatttaacctattaattccatgttattttttctatattcgtattttgtttaccgattaaaattactttgtctactaaaatg

SEQ ID NO: 27570 - DNA, 1750 bp, Cannabis sativa
  modified_base (723)..(733): a, c, t, g, unknown or other
attttttaataatacatatttatagataatacccattaatatatatattaaaaaaaataagctaattaagctatacataaatatatagtatctcattgaggaacaagatctttaatgagaagcaatattttattaaaatgaaaaataggaatatcatagataagatatagtctctttctttttcaactatatgtatagcttttaatcctttcaccaattattattatcaaaaaagttgtacctcttgagtgtttgaccctaatggggccctttggtcagacggttagttggtttttatttcagttctgctttgttgtttgtttatacattagttttcactatgtctctttttcttggttgatatgtgataagattcattattggtaggtatatagtgttaatttattaattcaaacttaaactcaattaataataattatgatattatatttactattggttgttgaccatttaaacaaaattttagaagctctctatgtaaatatattatagaaaaatgttatacaatttaatattaaatttcaaacaaaaaaattattaattacttcacgttatatatagtattgagtacattaaagtgtttaatagcaatgctctattttataaggagaactaaaccatgtgattacccaccaattaaattctaaattttctacccaatctcaaacttttggttgtacactaataataataataataatnnnnnnnnnnntaataataataataattctatcataattaataatgtttcaaattcaatagaaagtgactgatttttttaagaaagaaagaaagaaaagaggaatcttcttatctactatgacacaagtactatagggttcttagaaatccttagctttgtcatataaatgagccaattagaagagcaacaaaaaaattaattttgaaaagtttaatgaaattaaataattatatagtattagggtaaactaactaacttgaaaatataagaagctatagaatgaaaaacattctcctaattagataatgtaataattgttaagtaccttttttttggcaatttagttgtcaaaatattgtttaattaatatatgtttttttattaagaatttaaattatttttattatattgattttgtgcctctaatttttcttttcttctaagaaaagattcattctcagctggttttttttttttttttttttaagaaatttcttgtaagagaaagaattctcttatgaaaaattgtcaactttggtaatcttgatttttcttttttctaattgatgatttcgattttgcttttattatgacaaatcaaataaactttatttggcaggtttgaagtctaaatttgtgatcttggttcaatttaaaaaatttcctttctagtcctgacctgctgctgtagagctagagtctgatgctgcaaatcaagaattttttttaataagttttctacaactagaaaatcattttgtagttgtctctatggttgctatgttctataaataggacatagagagcaatcaaacgatttatctcttttagtctcatattttcatatctttctttgtgagaagaatgtttcatatgtaagaccatttctaattgaaaatgtaaaagtttgggtatatttagtacaaaaagcaattttgtgatatttttacatcaatttttgtgctctaatatataattataaatcttaatacaaaatttaatatttcatttaatatttacttaaaa

SEQ ID NO: 27571 - DNA, 2500 bp, Cannabis sativa
aaaaaaaaaaaaaaaaatataatccggccttctttggaccttggatttaatattttttttcatctagaagacttaaaacataagtatggtataactttctaaaatttagtgcaaaagaagaaaatgagttttccttcatttttagcctactttcttcataaaaaatttcaagaccaacaagtttcagagaactaactaaatcatcaaacccttctcatagacgagaagggtggttaaactctaccctaggtccttaacaacaaatttagaccaactattactagaaaaaccaccatcacgaaacatctggagaagctgtttcacatagtttcccaatcccaaccgagattaaatcactcagtactgtaatctgctaaatgaaaaaaataaaaaatgcagtatacaacttagtactgttatgaccggagaggctcatttgagattaaacgttatatacaacttctagcgaattcatatattgacatctgtgctttgtaaggaaaagaataaaacttcatttagttgtacaagtcatgcaataagttggatcatgtcaaataaagtagttgtttccttggttcactgaaggctcataaacccgattgaacaagctccaatgacattaataatataaaatgtgatcatatgaatatacatatatatgtatagggagagagagagagagagggatttgaattaccacatcggaaatggaatgggcagcatcggcaatgatagcagtactcccggataaataaccagtaagagcttttccggtggctaaaacaacgtctgaggcgaggccgagcttgaatatcttctcactctccccaccagaaccatgattgtgatgagagtgaccaccatgccatcttctgggaatgccgtaaagggggtgaatttgcaaagggttttgggcaagggaatttgaaggagacaaaagtcgagtgtttgaacaaaatctggtgatgcaaactctgtaaatcggattcaaattacggaatctgaatcccataattgatgtccgatcaaaattcaaaacaaccttcctcaaaactggttttccagtcgagtgtgtagtgaacaagagagaactctctctctctctctctgtatggaacagtcagatcagaactgaaagcagcagttaaaaattaacgccgttaaccttgggcgttatatcaacgctgccacgttagagtaaagttaccttggtggcgccttatttacgcgctgtttctttctattgtgttatattttttttttttttcttccaccgttccttttttattttatttaaaattttattaattgggcattttcctaaggcactaagagtatttttgagaatctttaaaagaaaaatatttgattacttttaatagatcgctgacgatagacttatctttgtgaaatctaatagagaggagtgctcacaaattaaggagattatcttgaaatatgaggcacttcaggtaaaactacaaatttcattaaatatgaaatgtgtttgggaaaaggattagtgagcattaatacaagtctttttcattagtaatcaaatagttgtatttgtttgactttgaaacacacctcatttattattgacatatatttattgaaacaaccttatccggtccaattgattctgcttctccttttcacaagaaacttctatatatggcgtcatttattttttaaagaaacttctaaaaaagagtggcaattttttaggtaaagagtgttgagtactaagacaagcactaggggttgccaatttttgtgggaaagaagaagagtgagttatttaatgcaattaagacttgggttggaatagactaagagggtggaagcgtagtttgatctcttcggtgggcaaagagatcctcatcaaagcagttgttcaaactattccgtgctacactacgggagtttttctcctttccaaaaaacttattccaaagctgcatagtatgacggctagattttggtggggatgtcaaagaaaaagaataaaatgcactgggaagcatggtctaagttgtgtaaactaaaatggaaatacagtttgagcttcaaatatcttaactttttcaataaagctctccttgggaagcaagtttggagagtgttgagaaaccttagctctttagcgggaagggtgctgaaatgtaattactttcctaatttcactattctggaaggtaaataaggctctcatgcagtgaaaatatggagaggattattatggggaagagaagttattgagttggggtcaagattaagagtaggctcgagaaaaaatattgatattgttaatgataagtggctgtctagaccgtcaaggtttaaaccattccttaaaccagagctccttcatgctatcaaagtggttgacttgagactcgctaatggaggatgggataaggagttcattaagggttcgtttggaacgttgtattaggtcgtattgtattgtattgtattatattaaatttga

SEQ ID NO: 27572 - DNA, 1674 bp, Cannabis sativa
tggtcttaaattgatggatttatgtatttatggtagacatcaattattttgttgcaattgtgggtgtaaaaaatctgttagtttaggttagatttagggtgggatcggtcagatctgtattttggggaaatttgggttttttaacgggtcgatgcccgtccgatgtagtccgatggtccaatgaatttttggctagaggttgaagacatcgaacccaatgtggggtccgatgcaacccgatggtccgtccaatgcagtccgatggtcctcgatgcagccccgatagtttgtccgatgcagtctgatggtccccatgtattttttggctggaggttgaagacatcggacccaatgtgggccgatgcagcccgatgttatccgatggtccaatgtatttttggttgtggtggtggagtagatcgggtgggaagaaaaatggaaaagagagggagttgatgtaaatggggagggtattttagagattacactaaagttgtcatatgctaaaaatattggtaagtataagtttaggaaatttttttaaagataatgtaagcatatttaatcaaatttcccaaacaagcctaaaaaaattcctattaatgcataaaaatttagttccaaagcaaaggatagtatatgttcttatgttgaaaaacaatttataatcttatcaaaatgattttattctgatgagtaatcataagaattaaccttgatcagtaattatttccaatattatcattgaaaaatcatagaacagaacatgtccacttaatcaaatgactgttgatatgatgaaagagaacctgaagaagcatcctcaaaaacagaaagaagcttatttgataagcagtttgtttcttcaaatgtaaagtcctatgaacttttacttttcgaattgtttgtgttaactttttaaaaagaaaagaaaaataatgttttatatacatacacataaaataatagctgaaaactggacatgatttgagctcaaattaacagccactcatgaggatgatgtaatgtaaaaatgtcgtcttcttttgctttagcattcattaaataattcattgacttctaatccaacatcagcagatgccttgtgaaaatataaagatcgttaattagataatgtaattttttattctttggtaaaaaatattattttaaagagaagatattttatatgttaagaaccttattcctttctccgtttccacttcatctttaaatttctggagtactagctaccaaagcagagaatctccttttaaagtgggcaaagaattaaactttattcgcactaagtgcaagaaaaaccaaaacttgaaaaagcagagaccagtggtgattgtcatcatggactattaacctttgattaaacaaaggcaaaagactaggaagttgttacagctatatatataatcataaagctcaacgtgaaaacaattttacattaaagaatcaacatcttgaaatcaaaaggaggcaaatatgtttagaagaaccaacagcaacagcacctctaatacttcttattcagcaccaccaccaatgaattggcggtctgcaagggagtccggtgttcctgctcccaactacaatgaatcaaattatgggcagttattgatgccagcctcacgttccttccgaagaaaccctgtaagtatt

SEQ ID NO: 27573 - DNA, 7307 bp, Cannabis sativa
aaaataaaaataatatgcaattttaggtgctaaaaattcctttattattattttttttttttgaaaacttcaaaagtacaaaataacaccaccctttcttacttgataaacaaaataaagagaaaatttgaagatatgtaattagtaaaagtgattgccaaactgtaccagctagatatgcacattttccacatagggacggccccgcgggaatctgcccttaatggggtagggacggagatcaaattttgtccccgaatgttaaacggggtagggacggggatgacactccccgccccgacggagactcgtttaatttattaatattttatattatatatatgtgtttgtattttagtatattaatatcatttttacaatttttgaagttgtatttttgtgtaataattgctatatcagatagtaaataatatgtaatattttatctttcatgtaatttaataattttatacatttaaatttttaaaataaactttatttttacaagggaattccccctgttcccgttccattaagagattccctacctcatccctgatggggaataagcggagataaggcagagatggagattaaaatccttaacaggaatggggacgaaaaaagcacttcccgctaatttctcgcctcgagtgcatccctctaccagccctaaagaataagagagcttgccgagtactatattatagataatcaaacaaataatagcctctttaacagcaaaattagataaataaaagaaaaatgtcaacaacaacaacaactaaagtggggatctacttaaaacttggtcccatgcttcattgtcatattaagtttgctcaattatcatgtttaaagatgatgaatgaagctctactacaaccacaagttatccaaattgaccatagaaactctccaattcaatcaataataactcaggctgccattcatcacttcttagctgtgcaaatagctgtcacaatcaaaaagactccaatgtgattttacaggtttccaaacactaaaaaatgaagcacttttgggtgcaatacataaataaataaccattttgttcttttttgctgaagtgacaacaaacaaacactttgaggaagtaaatcttattatatctatccagaatttttcagttccctcttttgagcagaagctgaaaaattacatatggcaatataataaagcctgagcaatcagttgaatctacaaaacaggatagtcaactgtatcaaccttaaaaaataattatttacttcgacaaaaaagatgtcgttttgtcgttgggggcacgaccacttttgcccttcaaaatcagaatcctgttgtaagaagccacgaatgcagagcctttagctgataaattccattgctggttgaaaaattttgaaaagaaagaagctttaggaatgtgtgtgtgtcaaaaccctcaaatagtttcttatcttcaacactgacaagacaatgggaaccatttggtcaacaagtaacgtttcattttcacaatcaagacaaatgagccatagcagggtatgtgcattactgcaaccagcaagtacctgcagttcagtagcaaaagaagtctaaaatttaacactaagttgagaaaaattagtggcattattaccaaacatgttatagagtgagcataccacactggagcatatggagatgacaagtcaaggaatggatagggccacctgtagagccagtgttacaatctttattgtttgatcgaattcaatttagtctcgggtagatttgcagaaagaatgaaaggaattaccaaaatgatacacatgcatgaatgatccactggaaaatgacgaaagcaccagtccacaaaatgaagaaagtaatacgaaaggcgggaacttgctgaaggattaagccttataattttagtatgggagaaaatttagggaaaacgaatcttatattggaatagaatagaatatgcacccaaaggctatttaccaagcaattcaaagctgtatcgccaaggagtaaaatggcattgaatgaatgcaagttcacattcatctgcacaaatggcaatgtcaaaaatggagaccacaactaatgaacaatattaagggagactagaggataaagtttactcacaaaacttaggttgtaatctttgatagtaagaaatgggactataataaaccaaaagacagaatcagtaagcatcactgctccagcattcatctgttaaagcgaaaaaaaaaaaagagcaacgaaagaagtagcaacatgaatttggtgagagtatgcagccaaaaattatgcttttacattttgtcacaagctcttagcttgtcagcctgaaaaataagtaaaatatttataattaactcagcctaagatgataatcatctttatcagcacacaacctgttcccacccaaatttaagtgataaaccatcaaatggcaggttgtacttgctgctaacataagtttcttactgcttcagatgagtgacacaagaacatcaaagaaataaacccagaagagaagaaagaagaaggtgtgagacatgagctcataatgctaatcatatttgtgaatatggaaattacaaaacgttttaaggaaattacctggaataaaatctcaaaaacataagtaaaaatccttggcagttggaactcataacagtcatctccttttggatttgagatgttcctctctgtatctttactgatgaggggcatgtatgatccttgcccggtatttgtatcaacatggtaaacatttgacctcaagttccttagtctatactggtaacaaccataaattgatagcagggctccatactacaagagattttaagagaaaacaacaaaggaagactgaagacattagaggtgacatcagattgatagcaatgaaggaaaaacaaaatagaaaatatttcagggtctcactgtctgaaatcatactaacaaactaaacatattaacattaagattcaaagaaagaaagaaagcataccccaaaataaacggtcagtaaggtaaaagtcaatctgttgagcatccacaacacatcatgaattaataattatatacaatactagaatcacacccctttggatggtaactggtaagtaagccatgagctcaaaagaataagagaaagcttactgggtataatagagaaatgtggtagctccactgataacaattttgaaaattaaggttgtcaaaagtgagaagaatgcaagaagtcgaaaacccagtaaccaaagggggtgaatttgtttaaggcttggtctccaagcttcattgtcacacaaagagtgatctacactttgctcaacttctcctgctccagattttgaatggtgggggtcttcatatttccatataatatataaagctaaaaccataggtgtgaacacccaaattgagcatagaaggactctccagttcaaccaataactcaaggttgtagtgtcaacctgtacctgtagctgcatcctgctatggaaaatagagaaaagcagattcagggtgctaaatctcatcatcaaaataagtgatatatttttgggaaattgaacaaatgggttacttacagagccaagccagttaaggcgtcccaactccaagggaataagaagaaatatgaatgaagcagaagaggaaatgaggcctttactcaaccgactcagctggttgaagatttgccatcttttattataccctctttggattcatgtcttctggattacgactgtgatgttgacaatatcttgtgagggtgtgagtgtggatctctttacaattatcaaccatgctaattgctatggctatggctatggcttcgctatccctttctttctttgaccccactgccatagctgcttgtggtcatttcatttattatttccatattagtttcttaccaaaataatttatatttaaactttcttaatatttttattttctaattttttaatcacgaaaagtaatatttttatttttgaaaaacaaaactgtggtaatcacttttatttttcaattttaaaaacaaaaaataaaaatatgttttataaaattcttttttaattttatttaagtcaggcctaaattcggcgtcagatttgggttcgggtcagaggttgggttcagcactaggaccgtaaggaagatttgagtctgagtctggtcggagtccaaaatattgcttaaaaaaactgattaaaaaaatattaaaagtattttttaaaaaaaagaaaaaaaaattaattctcaattaataaattaaaaaaatgaaaacagttttatataacaattttttttaaaaaaaatcacttttctaattttaaaaacaaaaaactaattaaaaaagtgtttttaaatgccacctaaaataaataggtgagcaattaatcaaaaaaatatatatgtacgctattactataatattaagaaaatttgaggttttatacttaatttttgtatttaattagaaaaatttctcatttttacattatatggactgagattatttattagctgaaaaaaataataaaataaattttttggcaaaaaaaataaataaatttaacttatatattttttgtataactatattttttttatataatgtaaaaaaaaaaagataattttttatattattttaattaagtagctaaatgaaatattgaaatttaattttttttgttattttaaaatttaataatttaatatatattataaaaattaatatttatagttaaatttaattaattctatcagtaatactcatgttccatatatatatatattatcttttaagcaaaaatatgtatattatttatcagtcattatatatgtaaatttacagcatattactttatatgttaaatttttattattaccaataaattattttaaatccttacctactcctcttataaatacattatcattatttattctttccaataaaaaaatataatcgccatctaaaatcagctataaatgttaagacacaaacaaacaaaaatttatttgtctttccccaaaactttcacaaaataatattattcaaaatcattttcgggtaggtttgagaacaaatacattaatgtgattttgtattggacaccacaataaaattgaatcttaatatattatattgattttctataaagatctcatatttgtattaactagaagcaatttggtagttatggagagaaacaactatagttatgctgttttgttgtggaaaagaaactttctcaataccttttttttcttgatacatatatattaacaaatttagaaatattgtgaattagaataactacactggttgataaattataaatttctaaattcttataaataggtgtagagtatattaccagcaaagagagacttcagttgagtgacccataagttttaaaaacctcacaatgaaacagaacatgccaataggttggataaacctttcttaaaatataggagtagaaagccaaacacatttttgaggctgatccaatagattgggaagtggagtataacattgaaacacctccagtccacaatacaaaattgactttattgtgtgtatgttgggatgccacataaacttccacctctttctgctatcatcattaacacccatcccaataattcatattggaaccttttaatcattttacatttttttaaatattattttgtaatattttacaaaagttattaattgaattttttattttattaaatcacaaaataaattttatattttctaaaattgtataaatatgactctaaactgatattttgtcaaaataaaatttaataataatctgatgtagagatattataacaaaactaattacgtttttttgtatctattcgtgttaaaaattatcttaaagtttgttatattaacaaataaaattgttgaaaattaagtttaagattttatttttaccattttgaaatatatagagtccattttattatttaataaaataaaaaacccaattaataatttttgtaaaatacaagatccaaaatagtatttaccatttttttttcgggacctattcaaacatactgggataaattagaaagtcattactatttttttttaaaaaaaaaaaaaacataaacaagctttagtagaaaatcattttgggagaagtcttatagtgatgaatttatttaaaagcaatttttttttatacagagagtatatttataataaatttaaatagtatttagttttttttaaaaaacactttaatttatttaatcacgcattgtgttaataaattttgatgttttcttataaacaaatttaataaatttatatattactttaaaaaaatttataacaaatttaaatattacttactaaattttgatgtttttatatgtagaagatgaactgatcttaggcaaatattattagcagagaatgatcaccaaaccaagaattcaatgaacaaataaattgaataaaacaataaaagaatgacaaatgagtttgatgagatttgagctatgatcaaagagttacaatactcgataccaagataaattaagaagaagttttattgatgaatttaattacaagataacaagagaagagtattgacaatccaagcctatgatcagtgtaacaccataacaagacaatttcacatggggaaagctatttcaaaaataagcaatcccttttttacatccttccattttctctctcaaaataggcttaatttctaactgttgttctctgtgtatcaatccaagtctcaaccccaaaaaccagtgtgtattgtgttctatttataggagttggttggggttgttcagtagctaacaaagttagttaagggtagttgatgatgtggcagtcacaatgtcctttaagtgtcttaattacaataattttcaccttaattgagacacttagaggagattggacttaagcttcttttatgttgagtaagtttaaatagtgtttaaacttatctagggtaacacattttgtgagcatatctgctgggttctgatcagtgttgatcttccttacttggacttggttgcgagtgacaatgtctctgatgaaatgcagccttatgtctatgtgttttgacctctcattatgcataggattcttcatgagatggagtgcattttgattgtcacagtgtactgtagtgtcttcagagtttaaccccagttcagtggtgaatccattcagccacagtgcttctttaatggcttcagctgcagccatatactctccctct

SEQ ID NO: 27574 - DNA, 1870 bp, Cannabis sativa
caccaacacagacacgatcactcaccctcaactccaacaactcagcttcaccgccgcctccaccgcctagtttgaacccatcagtgcggtcatcgtcgttggaaactgcatcgtttggcacagtcatggttcggttggtttgtttgttttcgactctctctcttctctccctgattcgatgagagggagtgaaaatgttattttatcattacctaatacctacccgcctaagcctaactgcaaattgaggggtattttgggaaacaaagcttgcaactatttcgacttcccctcttttggccccttaagcaagtcgtttatttcattgtaaatgaccgagatgtccttttcatggtacactgtttgagctgtttgaatgagtccaacgacatcgttttgcggctgttgagattctccttttcggaatagagaaatgaggtgagaggaggactttggttgacatgggcattgggcgctttaatattgattaatatccgtaattacgggttcgggacagtttgtggggtagagctgtattttaaatggttactttatttgtttacgtacgggaggagaatattttgcaaccacacctcacattttaataattttaatttaaaaacaaaaattactaaaaagcaatcaaagtctctaacaaaatttctatgattgtaaaagagaaattactttatatattatttttttagttttttttttaatttacggtttgaatttttaaaatgatttttccggtaatttttatgtgggttgctatacgatttttggttgcaatttagattgctctgctagttacaatatgtgtttctatgtagaattccgtaaaaatgcagaaaaaaactgttttgaagtgtaaaaatgcaaaagcctcattctttaaatgtgttaaaatcttttataggggtgggtatcatccaattcaatcaaattgaatcgaactcattcaattcaatctaattacaaaaagttggatatccaattacaattggattgaatgttaaaagtcggattctaattgaattgaatcgattattggatgtcaatctcaaaattcagttaaaaattgatctaatctaattatatttatatatgttaaaaaattatttatataataaaaaatgttgaaaaatataatatatattaattaaatttttattagattttttttgtatgttgaatttgtaatacttgattgttttgtgtatttaatttcataatgttttgttttattttattactttgaaatattgttgttttaattatttaaaacttttagctacattacacttgtaacgatggtatgtttaaagtattaaacttaaataaaaggtaatacttaatttttatatatttttcttcatatttttaagttaatattaaaatttaggtctgtaattggatatccaattaaaaaatcgatccaatctaattagtaattagattggattggattggattttaaggtctaattggattggataagatgatgattttctaaatccaattagtaattggattggatcgaatgaggaaaaaaggttagattggatcggatgcccacccttaatctttcacatcatcaaaaaaatgtaatattttagtttatctcctttttacatcatctttagcactcttacttctaaaaacactgcaataatatagcccccttcaggaatgctattataaataggggaatttgctattatagcccaatagggaaataaatattacaagaatacagttagtcaacatattaaacatctatgtagcccaaccgaaaaaaattatagaaatacctagaatcctagtaacaccaggatcgtgttgagaatattttactaggatctagatt

SEQ ID NO: 27575 - DNA, 2663 bp, Cannabis sativa
aacaaattctagtggtgctactcatccatatccatccggtgtcaatggagctcctgtgagaactcgaacacatcaagaaccagtaatcttcaatcacaacatctcgatttgtctaaatgatcataacttcctcttgtggaagcagcaagttctagctgctataagaggaaaccaattgttgaaatacattaaagaacctccacgagctgagttcttgaatgatgcagatcgtgacaacaatagaattaatctgatgtactctgaatgggaagttcaaaaatcaacttcttatatcgtggttactctcctccatgattgaaagtcttttagcaagaatggttggatgcaactcctcacttcagatttggaattcactggaaaaacatttcacactacaagtttcttcaaaaattctggagtttagaatcaaaccacataatttaaagaaaggatccatgagtctcaataagtacctgctcaaggtcaaacaaattgtggatctattggccacaaatggtgaagttctaagaaatcgagatcatgtggctacaatattcaatgggctgtcaagtgagtatgatacatttgtaatctcatccaatactaggatcgagaattacacagttagagaaattgaagctttgcttcttgcctcttaatcaaggatcgaaaaatccagcaaggaagtggatttgagtgccaatctggttactaatgacttggattccattgctgaagccaatcttgcctttcgaagattcaagcagtttggtcgaggaaacactgaatttagcaatgcccctgcccaatttaaaggaatgaaaatgttaggttcaatcccaacctcaatccaagtttgagatttggtcatgctgtgcaagattgtcctttttagatatgacaagtctttctcaagaccttctgtagcaaatagtaccaatccatctcagaccccaacatagccctagtctcagcctcaagctcaagcgaatatggcaaccaacaatagctccaatgacacaagttggtaccccaattcaggaggcacaaactactggacctaccaagctcaaaaccatggcatcagcactaattatggtggttcagatcagttgtatatgggagatggaacaggtttgtctataaagcatgttggtcaatcttttctcttaccaaataactcttttgaacctcttattcttaacaacttgttgcatgttctagaaataactaaaaatcttattagtgtgtctaagtttgcacgtgacaataatgtgtttttttaatttttatacttatatgtgttgtgtcaaggacaatttgactcatactacattgatgatggggaagaacaagaatggcctatattcgtttgagtcaagccatgtccagattgtccctccaacacatgagcaacctgccaaagcctcccacaccagtagatattgtctcagattccttagaaataaaaaccacttacatggttaccatgaataatgccaaagttgtcgtgtccaaatgcattaaatgtaattctgaagttgaaaatgactttactctttggcataataaactagggcatccatttgagaaagttgtacacactattttacagccttgtaatattcatatcagcaataaaatctctcatttctccatatgttctgcttgttgtcttggcaaaattcacaagtttctatttcccaaagcctttaacactgttatttctgaacctttgcagctagtagtgtctgatctatggggtccatctcacactacttccctcaacaattataagtattatatacattttgttgatgttttctctaggtttacctagttgtacctcttgaaaaataaatctgatgctttcaaagttttcttaaattttaaagctgaagtagagttacaactaggcaaacaattaaaatgtttgcacacggattggggggtgagtttagatcctttactaagtaccttacatcctttactaagtaccttacagaccatgggataaaacatagacacccttgtcctacaacacaccaacaaaatggcctagcagaaagaaaacataggcacattgttgagaatggccttgccctattagctcaagtttctttaccccttaagttttgggataaagcctttagaactgttgtctacattcacaacagacttcctactcctattctaggcaacaaatcccccattgaggttctgtttcacattcaacccgattaaacagcttttaagacctttggatgtaggtgttttccaaatataataccatataataagcataaacttgagtataggtctacaccatgcaatttcttggtgtatagccttaaccacaaggggtacaagtgccttaaccctaatgggagactttacatttgtagagatgtaatctttaaagagttttcttttccatatgaaacactcagtcaacactcatctcacacatctgtctctgacagatcccccatagtgtctgcctgctataatcccctcttgctctcatcatcactgcacctactacatatctgatctcatgagtccccatgctacaacaaacactgattcaccgccactggtttctactactaacagttggcttccgagtcaaccatctattttttatataggtcaatcatctg

SEQ ID NO: 27576 - DNA, 3221 bp, Cannabis sativa
gaccccaattatttctaacagttttatttataataaatgataatattattggtatttaaatttatttattaatttaaaaatgttattcaaattaatataatggaaggtactaattcaatcctacctttttttaaaatatgaacattaccctactcaagggtagttatattactaggggaataacattttaaggctaaaccctccaaacaaacaaggtaatgttaccattcccttactagcattaacctattccaaatagccccttagaaaacacgatttttttttctataaaaaaaaaaaaaaaaaaacaagaacatttcctttaaaataatattttgtggtttaattttgattaagtgagttaatatgattaaaagaattaattaaacatatttaattagcttactaatttcaaaatattttttttttattattggaataatgttttaattattttttcaaaaatgatataagattgatcaataaaaatgtgacacatgtcactttagataatattcatgtagtatttaaaaaaagagtattgttattaagcactagtgcccaacaccttctatatatttggcgtcctacatttggttagcgatatttcttaaaagttattttcttaggttttatatgatccaatatttaattacaccaataataaaaaggactaattttttgagctagttggatgatatttttggaagggcagtcaaatgagatgaggtgcttggtgtgttttattttttgggccatttggggggcaaaaaatgagatggtttagaaggaaaaagtaactggtcctggaagtattgtagctaacgctaaaggcttccttgatcaatgaaaaaatgctaaaaactcaaatttagagcatcacaatctttgttttagattgaagatgaagttgaggtgtgttactcagtctaatagtatcaaggttaatgtggatgcttcgatctttatgaatgaccaaaactactgtatggatttggtggctagagacgatagaggcctatttattgaaggttgcacaaggctcttccatgatactgttgtgattgaattagttgaggtcatgggagttcgagaggcacttagttggatcaaaaccataccatgaaaaaacttggtgttagaatctgattgtttggtagtgatacaagctttacgaagttcaacaatgtattctgagtttgatctggttatccaaaattgtaaagttttattacgtgatttgcaaaatatttctattttctttattaagcagtagctaatgtggttgctcccaacttatatttggaaaatttgatttagtatgcttaaatgtaaaatatattattttaatataccaccaaattagaaataatatatatatatatatatacttttaatattttttcctcctaaaaataatataccaccaaatggttttgtagtcgtgggtattggttggatttggtgaaagttagaaagagagggccaagagattgagagaaggtatggggagggtattttgagatttaatttaattttagagtattaaatttctatgtattttaatgtgaaagaccatggacaatttttaagtataaattgtcaaattcctcttgtatttttagtttgagatatgtcttaactgatatgctacatgtatttattttgatatatagtggagttcgaaggttaataaagttcaatttttcattaaaaaaaacttattatatgtctatgtcctatttaattaattcaaatatgctgttatataaaaaatattgactagttaaattagtgtttatatatatcatgaaaatcttgtgattccggccgtttttgtattagcaataatattaatagtatgaccgattgttaataattctaacatcaaattagcaaatactaaagtttaatatacatatacacaatattcttataacatattgtattttaaatttatatatatatatatatatggattagaataatacatatacgtatatccaaataaaatatttgcaatatgtatgaagtacaatcggtacgtaactacgtatgtaggatcctttctctatgtgtatatctatttgttacaaaaaaacaaaaataaaaaaactaaagaaaaatctatatttcttttcctagaaagtaagaaaaatttctcaaaacagaacaacttaattaaagtgaaattacagatgtgattggttggccaagaaaataataatggagatgaatggagcagcttgacatgtacacgttgtcgatccacaatggctcttaagtactgttacgaattatgagaaatagttactttgagccaataaattaagccatatacattacaaggtagtaattagtaactagtgaccacgtcctctacggcttggaccagagtaagcttggctcacaatgaaattcttaaaagaagaaacacttgagaaggagtactgcttattagtactattctctttcaaaagtctagaaccctccacttgcatcgacaaagagaaaataagaaagaaaaataagatggtgaatgtaacattcaagatcttaataagagaattctgagtgtatagcttcattatgatctggcttatggctctgtataaaatctctctcaaaatcagtagctatatatatatatggttatattatgggctgtggggggcagtgtaatatatataggtgatatccttaatttgactttatggatatggtgtgtgattttgctttcatacgctttgaataaatatatagatggagtttgaaattaatatgagattggaaaaagtcaaatgtcggacaatgaattaatatagtattagtttggtgccttttttgtgtagtgtaataggaaattataagtaaatcaaatcaaacaccttttttgttcctaccttttgcatagattttaaagtcttttcatatccacatttgttatagttctagcccagttacatgtgctgttgttagttggcttttttttgcctttccaactgtgtaattttaccttttatgacccaaaaaatagaccaaaagtcttaggtatacgtgttaccatcttagccgactcacctaaccatttctctctcatgtcaccgcttcttgccacacacgctatacttgcgtaacaccttgtcacttgttttgagtagttacttaatttcaagagcattgctataagacaccagtagtcagtggcggacccagaattt

SEQ ID NO: 27577 - DNA, 2984 bp, Cannabis sativa
attggattggttactttttgaggtcaaacaacatctaattcgcacaagtgcagattttagatttttcaatctaatccaatccgcgcaattgcagatatccgcatttggtttggatcgtgcggattggattggatcggatacttagtaaacacccctaccttatattatttttatttctaaaaaattgttctctcagagaaggcagtccttgaaagcaggggtggagccagaaaaattacagggagccaaattatattatatttaagtgataaatatttcaaaatatattattaaatttatgattaaaataaaaatatagaacatttctcctgcatattacggaagtcatttataagtgaatttacactaaagttttcaataatttttctttgagtaatttgcagcataaatacttaagtttaattctcagttacagataaatacctaagtttaatttttgacggtaataatacctaagttatatttctagaacttttgtagatacctgatcgttaagtattaagttattatccccgtgtaatttttctattgatatatttaaattaatttttaaataaaaataaaaattcattaacctggaccaattaggaattgccacgtggcaattgacttggcacttaacggctagatacatacggaagttctagaaatataacttaagtattattactattaaaaattaaacttaaatatagaattaaatttaggtttatgctacaaattactctttttcttttaatatatactagtaaacaatcacttaaaaatttattttctatcttttcacaaagtgtagttttcactatatagtatattcatagttaaatagatgaacattttattttaattagttttcaactaagtgactatggtgactagattagaaaagaaagctaatattattaatgaagaaaaataatattttgtaaaaaggaaacatatataatagattttttattaaaaaaggaaagaaattgtatttaatttagcattcaacaatcttgtgataaaaataaattaacaatttgaaattatttgacttctttgtctaagggccaccatataataaataccaaaaaaaaaaaaagtttgcataatataaaattgttaaaaaaaatatgtaaatgtatattttcttggggggccttagccactatagcctcaagtgtgcatccgcccctgcttgaaagctttcttgtccttccgggaaaagtcttcacgaaaaactaatatttctccaagatggagttctgattagctagttgttcctcctagaaagatagttccaagtagttaactccagctagctctatcctatctaaaagctccttcaacgagtgcctttggtccgcgatctcggaagctcatatgttcccagatgcacttttacttatgttgacgtagagatctcactctaaagagagttggttaagttagttatttcctaactaacttaacaaccgtgattcttgcagctaccgaatttagaatcttattcctaagtctataaataccatattgacttatcatttcagagaaggttaacattgagatcgagagttagagagagattgagattgagagacagaaagagagagaggtacaaagaaaagagagagattgtgttttgggttttgtaagaagagtcttttgtagatgaagaagattcttgggtaagagtgtgagagttgaaacactttgagagaactcaacagagaatctttctcgactgtattgtatctaaacttgctcaattaataaagagattttggtggtgttctagaattggagtagagccatagatcatatcaatctatcagacttgaaccaatatatatatatatatatcttagtgttgatttctttgttttcatgcttcaattgttgtgtggttttcctttaatctatttatccctgtttttccattcgattattgttcataacttcttattcttgtcattgttaattgtttgattacttaaagtttagttattttaattctgcactgttagtcgtaattttctcacaagttagagcttcgtaattgatcaagaatgcagaatcaagattctttccgttgcaattcttgaaggaacatccaatgtcatcaatgggagattcagatttgagaaattcgatggaacatgagactttgcgctatgaagaggaagtctaaaaggaatcctaacacaccaaaaggtttcaaggttcttggagatgagaaacttttggcggagaaaaaaccaaaaaaaaattgccaaaatggaggagagggcttcaaacataatcatcatgtatctgtcaagcagtgtttgaaggaaactcatcgtagagaagacgataaaaggagtttggaataaattaaaagagttatacttaaagccatcaattgctagctagattaattttctagaaaggttatacagttttagaataatttcttccctttctttaggtgataatattgatagatttaatgagattattgtaacattggctaatataaatcacaaggttgatgaagaaagtcaagccatcattttgttgagatcactcccaatcgcatatcaagaagtcaagacagccatcaagtatcgcagagacatgattgtattggaagatgttcttgctgcacttaagttaaaagatttcgaactacaattggagaaggaatacaagaaagaagaagtgtacttggcaagagaaagatcgttcaagaaaggaagttcaaatagtaaacactgtcactctcaattaagatcaaagtccagagagaaggaaacaaggaagtgttagttctgtggaaagtctggacacttgcaaagatttttcaagaaatacaaggagcaataaggctttaaaaaatctcacaatagagatagaaaggataagcagcatcaccacaggaaggattcaggtgcaatcatggaagatagtggcgactgctccacagattgagaatt

SEQ ID NO: 27578 - DNA, 2180 bp, Cannabis sativa
tataccaattttaaattaatttaactatatataaatattaatctattatttgtaacattaatatttttattgttatttttaatattgaaagtatgttcaattttaatattcttaaactttatatttattttcttcaatttttaaaattttttaaaattaataagtaatttcttttaatttattaaattttaaaaatacacgtaacaaaaataaaaactaaaaatataactaaaatatatatctaatgcacctaataattacttaattttatatatacatatccttatatccatatagcataaatatttatatatttatatattaatttggtatggaaagacaaagtaattattagtgaaattaaaacttaattgaaatgatcaccaaatggcaaatattgcctattagttgtctatgtagagagacaccttttccacactaactaataaccttcaatttcactctaaataaaattccaaatgggaaaagcaaatattatgtggttggtgagagcctattgaggacaaaaaccagtgagaaaatatatacactataccattgaattaacatatactaatttatgtatttattttttttgagaagatgacatgaaaaatttaaactctagtcaagaaagctcagctatgatatgcccccacaaccctaaaaataagaaacttctttatgtccaaatgccatgaattaagaatttcatctaactcatcctaacctcttccttccacacacatctataaatatataatatttatttatataaatatatatatatatatataccataatacaatatctcagcgcgtgtactttactctcctattttgttaagtcattttaaagtcttacttgagatatagtccaaacttaatttgttagatgaaataatgaattccaccaaaaatattctatccaagaaaaattaatattttgaccaaaaaaaaaaagtattatggagattatccaatcatatagttctatccactattgtaaaattaaagattgttctatttattaaaccttcattaattctccttatacttttctatttgaaaatattctttccacaccccttcttaaaaaaaattaagtacaaaatttcccattgtaatgtttttcactattatatttattattttttttaaaacaaaacttaaataattttaactctcttaattaagaaataataatcttcttcaaaattaaaaaaaaaataatagctttttgtaaacttaaaataagaacaaaatataagcatagacaagttaatatttacataataaataatatgtaaaatcattggaaaaattaaagcatttagctatttttttttttttaaattgtaattaaactcatagatcaaattaccatgatatgatatgtatatagtattaaatatttttttagaagtttatataataaaaaaatattatttcttaacatttgataaagatatttaagttattaacttattaataaaataagatatttaatattaataatagtgatttaattaaaagtagagagagtcaaatatagtaacaccccaacaaaaaaaatgtcaaacaccataaaataaattgtgttattaatagtgtattttgatatcaaatcttaaaatattttaatttaataaatttctacctaattataaaactgctacatcaatgtgaagttgaacacttaaaaagtctgtttggtgcactgtattataaaattgtatattatatatatcctatttttatatagtattatgttcagtattaatttgtatgagcatataaatatacaatatttttatatataaataaaaaattattacagaattatataaaaaatatatatgatatgaaacacaatttaatataatattatatcatacaatactatttaatatggtgtaccaaacaaaacataaaatatatcaaataacaatgctaataataataagaataattgcaaaaaaaatttaaaattacaaaatatagtatgtacagaattttttaacaatttacagttttttatattttatttatataaaatacaatctaatgtatttttatgttgtgttcttgttattttgttattaatttttgttatttatatattattttttttatcttgttttgatgttatttagttataattttaatgttatttttatg

SEQ ID NO: 27579 - DNA, 2373 bp, Cannabis sativa
catggctgaaatcattgtgaaatcggcagaactttgagatgtccctcttgctcatctcccttttaataggagggggcttcttgtaagggacagtagactaagtagcctgtaaatggtgtcaggtttcttggttaggagggtgaagctgtgctcctcctcctcctcctccttctggttttatggcatgaagaagtattgtacttcccatttttgccactattctttttaaaactattgttattgcacttgtctcaagtgttcttgccactggaggtttggctagcattactggtgctggcctgaatgtttcacaggtcttgggcttgtacaacaccttgagactgcctaatgttgacttgccctatctcggcttgtctgacggcttcctccagctttatgaagtcgtttgctcatttaaggaaatccttcattatgttggttgagacccactgaatatctttctagaagtcacttaattgaaggatgcccccagtatggccgcataatggccttcttctattaggcccttgaccttggtggcctcagccataaacttttggatataatccttcaaaggttttccttataattgtttgatctcgacaaggtcttccagctgcgatggtatcagtcttgaggacgaaaattgtgtgtaaaattcttgggaaaattcatttcgagaattgaatcttcttggagccagcttgaaataccattgttgagctctttccaacaaaattgctagaaagattcgacactgcaaatcaccagtaacttttggagatcagtttgcatctcaaagtacttgatgtgtgccaaagggttttctttcctggtataaattttccatcccgacagaacttgggcaagggcaaagtattgatgcatgttgagaattaagagccccttgacctattcaattcaaggttttaaggtttcgggctagccaagccttttaacatgtctcttatttaatccaactgtgcttgcatagaaggatctgatacggcaagagcttggttgattggcctttcttgattgggctgcaaccctagattggccaagacctggctgaccataccttgggaaagggtatgttcaaggctggcaagtcctaggcttgacatctgactttggccggccaaccctgggttaggaagctaaccaaggtcagccagccctaccatgggcagttgtacatggctagctagctctatgctaggcaatgtctaaccgcccgttccctcctaattggagggtctggctgtgtgtcgatagggggtatatcacaccaattgttgggatttggtggatctatcttccggaagtgatttttctcacttattgagttgatgttgtcttgggtgtttccacctgttcttggaccttgctagttaaagatgggtcttagaacgactttctcttgaatgttccagagaggggtctcgctttgttggccgaccaagggtgcaccactaaagggctggcagaccaaaggtcagaaaagtaagggtgttgttgagcttgagatccctggccgactcccatgccattggttgccagggtctggctactcccgccaccagatctatgtggcaggacttgtccaccttcaagcagggggtagttcgtccttgttcctgaagaacttaattggaatatttttttgtagtccctgcccaatttatcgactagtctcccttagagaggatctcccatcagatcttgacctttcccgacagttctttcattgaactgccttatcatgtcactagcttctctattacgatggtctagctcttcctgatgagatggaagatgtactcctggtcatccatccatctcaaaattcacatctctattgtgcggatgcattgcaaccaataacgagtggttcttatgtttagtcgacttggtagacaacctctctaagtatgaccaatttaaagtcttctcctaagtccacatgaggctcaccaatggctggtttgccaatttttggccccgtttccccaacataataccagggactagtatcaaaagtggtgcatgggggttgctaactctcagtacaaggtgccaatggcaaatttaccctaggtggtagaggctagtcattgggatcatccgggttggcaaggtcgacctgactagttgtgttggtcaagtttgttgtgcctgccgggttggcagggttggctatatctgtcagattcgtggagattccagtggtggctggaacacaaacatcaagattagcagtcatggggtctaaaggaagacccgatgaggcaggagttgtagctagagttctccttgttacaaccatggtgatagatcagatcaatcaacaacactctcaatgaaagcacc

SEQ ID NO: 27580 - DNA, 2696 bp, Cannabis sativa
acctgatattggcaatatctttgttactagttctgtatcaccactcactcatcccattgctacttatccccccatggcctctaccacatattcaactaatctacctgctttgaccatgccactctctactaccatatattccacatcccaacctattattaattccaccacatgtcacagctccacttcccagatttttttaggccaagaaaatctccacccaaaccgtcagtataaacgtcaacatgactcaaaatctttgagacaattacttaaaagatgtcggggtaatcatgttcctcaagcttctcctttgtcagttgaagtggactctctccattcagtttcagatacttcttcggattctgatgagatcattgacaatacaacggtgattgctatgcaatcctgctcttcatcatgaaactcttaagttggaatgcacgggggttggggagcccgagtgcgtttcgtcgtcttcgattgcttatttctgagcaatctcctcaggtgttatttcttatggaaactaagttgtgtgatgatgctctttctcgttttaaaaattgtttaaattttagtaatggtttagaagttcctcgggttggtttgaagggtggaattatgttattatgaaaagatggtgtggatgtaactcttttattaatgaatacaaatcactttgattgttatgtcttgtttgatgatggtcctcgttggcatttttctgctatttatggttttcccgaagtaataaacaaaaaacatacacgagccttaattagaagacttgctgatgtttctccacttgatccgtggcttttaattggagatattctaaatgaaattttttctactgagcataaaagttgtggtctgcttcgacatgataaccaaatgcaagcttttagaacaattttagaccaatgttttttgaatgctttaccggctgttggtgatgactttacttgggccaggaataggaaaaatgctattggtttgaaagagagacttgattggtgttttatcaatactgtgtggaaagataatttgttaattaaacccaactttgacacacttggactattttggttcggatcatagagtactttgtgcggatattacattctctcaaccgcaaaatcctattgttcggaagaaatctcattttcgatttgagaggatttggcttaatgatgaagagtgcactgatattatttctaattactggtttaattcggaacatcaagatccagctgttggtttaacatcttgtttacaacagtgtgcttcgcacttgcaagattggcactataaaaaatttggcaaaatgaaaaaggacatttctaaagctcaaaaaaaggtgaatcgactgaactctgctgcaacaacatcaatgaatcattctcaggaggttcaatcggctgagaaaattttagaggagttgttagccaatgaagaacaatattggcaacaaaggtcatgagtttagtggttgcaatcgagaaatagaaacacaaaatttttttcattcaaaagcttcggcaaggcaatccaacaatcgaattaaagaactttaggatgctaatggaaatgtcacaacttcaaaggagggtatttctcaagttgttgctgattattttacaagactttttacagcatcggaggaggatcattgggcactatctcatgtcttgtctaccatcccaacaattattacatctcagcaaaatgaattcttgttacatgattttactgctttggatgtgttggctgctttgaaaacaatgggttctgacaaaagtcctggtgtggacggtatgtcagctatgttttatcaacattattggcatattgttggtgatctggtgacaaaggtggtcctgaatgttttaaatcatggaggaaatccagcagctttcaacaaaacattaatcactttgatttcgaaaataaaaaaaccaaaggagatgaaggacttttgccaaatcagtctttgcaatgttatttacaaaattatttcaaagatgctggctttgcgcttcaaagaagttcttcattctgttatatcggaaacacaaagtgcattcctttctaatagattgattacggacaacatacttgtggcttttgagttggtgcatagtttaaaacattgaaagagagggtctaaaggttatgctgctctcaagttagatatgagcaaagcatttgacagagtggaatggtcttttctggctgctgttatgagcaagatgggtttcaacataagatggattactcttattatgacatgcctacatacgaactccttttcctttcttattaatggagaagtctcaggttcagtcattcctcaacgaggcttacgtcaaggggatcccctctcaccatatctcttccttatttgttcggaagggctgtctagattactcaaatacgaagaacaaattggacgtttacaaggcctggcagtctcacgtcattctccaacaatctctcatctgttatttgcggatgacaatcttttgttttgtcaagcaaatgacagatcttgtggagctattaaaagagcacttgatatttatcattgtgcttcgggacaagaattgaatactgacaaatctgtgatgtccttttcacctaatactccggtcgttgctcaaaattccttccaacaaatcttgggcatgcca

SEQ ID NO: 27581 - DNA, 2712 bp, Cannabis sativa
gttttgtcaaaaagccattcttactacccatcaaaacttccattgctgcttgttctcctggttcacaccatgaaatttcaggaacttctgctcctttcctagttagaaacaaaaacaacatttagaaaataacttcacatatttctgtttgaacttaccaatacaacaaaggcatctaacctcaaaacctcagcaatgattacatcccagtcggtcacttgattaagaagaccccattttctagtaggtggcttcagtataggaaaatcaataaggtactcagatagctttttatttatcttagtccttatagtcctagctccatactccaatttctcagatgccacccaagtgggcaccacattatgagcatcaacttcatgtacagtcacagactcaccaacccttctgcaaatttcctctttacaatttctaacttttctcaacggagaaaaatctgtaactagaagggaagccccacattctctcaagaaattcggtatagtttcttcagcttctccctacattttaattaaaatgctttattttctcactaatatagagcacattaaaatacaaacataatagattacaatcagaaaaagcaagatatgggcgttcgaaaattttaaattttgacttaccaaaaacaagaagaacgggatttgataattttcttccataacatgatttaattgtttcaaacccctaagcataaaccctaaatgtcgagccttggcgcccaaaaactgatcaaacagattgaaagccaccgcaatagggacattggccttgttggcctgatcaacggcgtggatcaaagcccaattgtctctcagccgttgatctctaaacatccagtaaaccacgggacccgcatttccattagacggttgagacccttttttcagaattctaatccgtcctggttgtacagatgcggaggacatggagggtagaacggagtaccgggatctgaggagagggaggcttttgctaatgtgcgcaccgtggggttggataacatgcgccgccagggtgcgtagcttgagtataggaagaagaaggacgttgcaatttggaaagtcgaaaaagcgagggaattctaaacggtttacagttatggttttggacgcaggcaagtgtctctctaaataactgacacgtggaactagacatgtggtatcgaaggcatgtgcgtgtcctataatacacgtggcatatgacagttactgttaaatatccgtctcattgagaaattttccaaaaataacgtggattgaagaatattccgtgacacgttattatcttcataatgcaatatcctatttttatggttgaaactaagaacagagttctccttaaacccaggaatgtggcgcgtgattcacaggatcaaaactaaacctaaaaaccagcttaaacattgtacaaaatagcagccattcgactattactgcaattacacacaaacaattatagaaaatacattaaaactaaacctaaaacccagaccttcgacaatcgcaaagaactccatcgtcaaaaaaaactccatgaaatcttgccagaactcatataaaccttgcataaaaaagcaggggatgtcttccatttttgtcttcattatcaggattgtcgtgaattattgtctcctgttattgctaggcatgttcgatttttctctagttgtagcattttccaacataatgtttgagctgatttaaaactctcttgtaatgcttttaattcaataaattgatatttcattaaaaaaaaaaaaaaaactgaacgcaaaaatttctctataaatatactcatctctatttgatatcctcacaaccactttctctactttttaatcctttaatactcttttctctattttcattttcaaaacaatagtagaaaaattaaatgcaatagttatgaagaagaaatcataatcaccatcatctcaacaacaaggagaattaacattatcactagagagttagtatatatatttaaaaatacagagttaatgttttagtgtatatatttaagcttctctctttaatctatatctaaatccatttttatatctttactactatgtttctccacttttatttgtgtgtatgttctattactacgcaattaaagctttggggaaagaatggtgcagttgatctttttgctgtcaaggttcaagataatattaaccatcataggaaaccaatcaaagtttcaagagagagaagagtgggctagacagaatgagtgagataatttagttgtgctattagacgctctcataattgggcaatatctttcaatcaacaaaattcttctaaattggcatttcagcagtattttttttttaagatttactaagtagttttcatactatttttgtttttgttttttataatgttgtagggcaaactgaaactgaaagtgttaaaaccacttaaagctagattttgtggaaggtatggccacatgttgtggtacccatactttaactgtctagcaaaaaaaatatttcaatgctattacttgagcataaaattttaggggtttttacattacatactaaaattttcattttttttattatgaggtagacttttttttaaaaaatactgtgttttcttttaaaaatattgtgtaagttttatactgttttacggttgtttttttagttgttccactgttgttttgattgtt

SEQ ID NO: 27582 - DNA, 2993 bp, Cannabis sativa
aagaagattttgattgtcaaagttaccgatatgaaatgcaaagacgtgaatcatttctaagttttgaattcatttcaagcaaattatatactatttaggcagtgtttaccggtaatattgtattatgctgtacagaattaattttattattataaaagatataagcagttaagcacactgccaataacttgatttattccatctttcaaggccaaactttactgtttttgatctcttttataataaaggaaaggttttagagtatatatatactatatggtatacgatacataatcaagacttatttacaaaatgtattttctttaaaaaggaaggccatcggcctcaatcaggtatgaaactaggctaccaaataaaatttgtcacaacaagaagggcaagaaggtcatgcttagctaaggcatgagcaacccatttacattacaacactgcaaacttacacaaaggaaacattatgaaaagcattacatatgtctaaaatctcttgaaggatattactcaaataagaatctcagaaagatttatgcaaaagcttaaggatgaggacttgacaatcagcttccatcacaagattagtgaactaacattggcggggcactgacgaagaccatacaagacaacatgggcttcatccaagagaggaggaaaaatagctttcaagtgccaaactgaatagagtaggacttggtcatcagagttaggaaccactagacccatccccacattacctcccaccacatcaacattggctttcagcataccagccataagccacaaacaagtcctgtacacccttgaatattccacttttaataaaagttgccacattattggtgtgcaaaggttttaatgtctttcctatgattaacaaccttttcaagtgtcatgataacatgagaactatcatgctgactgactagtagagccttattctagttttgattgagctccggcaaatggggcatgtttggagcacttctccacagtcaaaacaagtctgtcaaaacacagaaacatatctcaaatttatgaacacgagtctctgaaagaagattgataataagaggagagaatggcatacctgatgcccacaaccaaaggccaagttttttgtgttagttagacaaatggggcagacctgaataagtatgtatatcagtaaagagcaatatgaatgtatgatgatttttcttaaccatatcactaaacaaaaagaccaaaagtatcaaaatatattaaagaaaacagatgagtaccctattatcataagtagtactttgaaaactgcttgagctgttaagttgtatgctgcttctagaaggtacatcagcagtgaatggtggaggaagaggttctctatgaggagcatttctactttgtcgactgagtgtcataggaaaataataaagggtgtgaattttcaagttactaaaggcaacaaaatcaacaagcaaaaactgttttgagtactaagatttggccattaccctagtatgccgagctccaatgttgctttgtattgagatggtatttccatcaaagctgatagagcaaagtctgtttgctttctcattggatttacattctttgacataatctcagtgaagttcacaaacttcatgcacaaccaaaaagaagtgttgttcagctaagcacatattgaaaggcagtcatgaatctcatgattaactgcattatcatcaatttcatatggactacaaaaattttcctacctgaaaattgtcaaatgctcgtgaaggaatgttatcatcgaaatccctcatcatatcccaaggcccatctccaaccccaactaagattattgacaagggataatcactgccaaacaaaacaaaatggatatgaaaccacaaggtttgctaatatatgtgcttgtataaaagtaaaggccacgagtggcataccttgcccttacaattgcatcaattgtcttctgttcttgtgagctaagtttcccatttcttgtatccacacttcttgttacctaaggcagcacaaagtttttgtaaagtactatcatgacaaaagaaacttatacaaggaataatcatatattgttcatgttttcaaggaagaatttcaaaccaaatattagattaaggaagtttgtaacctgtccatcagcaatgatcaatagaacatgatactggccacgactttgctcgactatagtcatggccatctcaatcacaggcgcaaaagatgtaggtcctgcaaccaaatagggaagaatttttttaccacaaagtaactaaacatcaaaagaaagctatgcaaagaattcaagtttacctgccaggcgaaggtggggaacaatctctctatatcgagttagtacttcctcgaatccattacaatacctttgatttggatagaagttgaaaacatctttgtcatgtgttgatgctacatattaatatgagagacaatatgttaactcaaattccattgtccaaagaaaaagttcaatgtcagaacaaaactcaaacacgatactttttctgtgaactcaccatctccaaatccataacatggaattaagttatcttcatcaaaagctgataaagtatttccaatgattgatattgcttgttcatatggatttagatcatttcctatgtggtgtaagcttttgtggttgaatgaccttgaacctttacatatcagagacaacagagtttttatttaagcatttataatatctttctttaacaagtacattctggtatagttaaacatgtccaaaccatcatcataaaccaaacctgtccattcattgctctttgtgaaatcaattccaacaattagattagaagattcaagcccagcatgtgcaagagcagaggtaacctgtggattatataagttcaaactcttacttttgcagaccaaaaaaaccaacttacttgcactacatttttgccttatattctactgagaatcttactttt

SEQ ID NO: 27583 - DNA, 1192 bp, Cannabis sativa
atccacataattattaatatttataacagaaagttccattatctttgttatgtcattatataatattgaaatgttttactatattaccctttttctatttttttttttgtggacttttgtctttcatgcatatgtattatatatttatatgtgtatattgtatataaaaaacatataatagtgtcttcactcgtaatcatgtggtcgcttctctcatttcctgcatgtcgatgatttttgagttgctctataagtcatgtcacccatttgtattgtcttgagcactcgtattatcctctaaaatacaaatattttaaatatttgaataactaaactaaaaacagaatgttttaaatttattttttatttaaattttttttaaaatttattattcatattatagttataaaatattatttattactttaaacatattttataaattatttttggtttaataattttttatatccctacaaaatatatattttatatgtagatatatataaatattaatattatgtatttattaaatatgaaaaaaataatatattaaaatttgagataagtataattttcgaaatgtattttaaaaaagttttttttttttttttttttgaaaggagtattttaaagaagttaatgtgtggaatgtaacggtttgaggtaaaataagaaaaatgaggttttgattagggtgcacatttgatccaatccaatacttttttcctcatacgatccaatcctattgattgaggttttcggcaaccaattaaataatgtataaaaaaagttgtaggaagtttagtgcatgtgctttttacgtggttgaggcactaacgagccttagtccacgagtctttgttattaatgggagtatttattgcagagaatgttaaatttctctcctatttctctctttgatttcttttttacccagaattctcgacctccgtctcagcatgtttgtgggggtatttatagtgtttttctagggtgatccctaggaatgaatcacttgtctttctgtgcaggcttaatagatgcacatatattcccagcagatacaaaataagaattacatgacctataccgtagctatcttaggggttaggtggatataatcttttatcccctcttgattgatgtgatttctcataaagtagtcgtcactgttgggaattattttacc

SEQ ID NO: 27584 - DNA, 3244 bp, Cannabis sativa
  modified_base (34)..(51): a, c, t, g, unknown or other
aagttcatgtttaggatgttaataacatacttgnnnnnnnnnnnnnnnnnnggtaaaataattccaacagtcatatgttcactcacttcggggagcgaccgagccacgaagtggtgtagcatgtctttgtctcgcctggcctctgggcacaacaccagagttggggcaagggccctaacttgttcagatctgcccttgacttgctcggatccagtcttagcttgctaagatccgtccaaactccccccaagaaattttggatttagagaccttcaggattgaagggtccacagcaagctactcctcagagagatcaatgaccttgtcaattggcatcttctccttggacggagtctcactacccttagactcattggccggaggagacaaacctgagctaccctccactcccttctttagagcctcaatcatcttctaagccatttctgctcaaacaaaataatacagtcagaagaagacataaaatatgtgaaggcataaaaatcagggaaaataaatgtaagttgaagtactctgcacgttggcaggtgtgttctcccgaacgattatggatggagtgtcatcgtccgaagagtcttcctactcctccaggatagcttttccctttccttcgacagggactaatggccgagcaggcacgccaggttccctaatccagatagcatgctgtatgggcccttgctcgatcgagagagtcttcttcttcttgcgtggcctctcttgctctgaatattcttgagcctccgtctcctactcagactattctttagcataatgtttggctccggcaccacccttcaacttagcctacgcttcagttgaataagattcttctcttgctcgactctctcagccttgtccgacctggatttcttcttcttcttcttcttcttcttcatggacttaggtacaaaatctgccgggtaaaactggtactctacaaagttggcctctatggtcaacaaagtgatattttgagcagcctccggtagttggagaattttttgggccctttccctaagtcccaatgtgaagggaggacgacaatacgaggggatctgctgaaaccgagtatgagtagtctccatgccggccacaaagtaatactcgttaacaaaatgtccaattttgctaacctccgtgtcaacggtgtccgtcagccacttgtcgtccagctaagaaaagtagaagttccacgacctgctctgcataggagtaaacttcaaattgaagagccagttgatgtcgtgcaaagacggcacaccccatccttgaatagcgtagaggacgaacagggtagaaaagtatttgatgcccttgggtttgaactgggtcggacaaaggcggtagtaatccacaacccttttgaagtacgggtgcaaaggcagcatcgccccttgttttgtgtgggcaccagaccaagcacagtacccttccttcgggctagttgcccggtgatttggggtagggagaaagcactcaagtccgcccaggtacccagccttctccaaattttttaagttgtcctcaattacattggacggaggacacacccatttagccctcatggcaccttgcctcttatgggggaccgcctcagtatactcttgggtgacatagtcttcttcctcgaccaagacgtcaccaagttcggacaccggcttcccagactcattgtatcctccaaaatgtaaaggccgagccacttcctcctcctcagcctcagaggggctatctggacggtcaccgtcctgatcctctatctcatggacctcaacatccccctcatagtcttcctcctccgcagcggacatgtcctgtttgacactcaacagcgtggcatgccgggccacgtgagggtcagttgcattaattcttcgcatcgtctatttggtgcgggccatcatccttctcctggacgggtattggtgtgtgtgtcgcgcaacagtcatggcaagaacagcaatcgaaatgctgacggcaccagagcttggacggcccacaggaagagtgtcagcaacaccgggccagatgatataggtccagttggatgggagataacgtctccaccccttcctaagctcccaaacaaattgtctataaccttctcctacgatctgctcggaataaaagtgatgttgcaactcgggttctggagtaggagaactttcactacttacttctcagtcttcgaaacttgagttagaaagtccgtcgctcgaagaggacagactagcgcgaagacgaggttggtcctcatacaaaagctgaagaagatcctggtcaatatagtgttcacctccccaaaattcaccagggttcatctacaaaagacaatacacgagatgagtatttggccgggatatcgagcagaaacaggcaaatataccgacttggtctactcgacggattaaaaagatgaaaaatattgtaaaggttaagttcgtaacccaagagtttgaaaattttgaattaagggttaatcttcactaagccttgaaagggcaaaatgaagatcgaacattgtgaggttaaagtcagaatgttacaaacaacgaagtcatatgatctattacagttaaaattacaaagtcttgagcctagattttctatagatctcctaaaacaagtcaagaacgattgaattttctattatagaaacctggaaaattgaagatacaaaattaaaggagaaaaaggtgagaaacttactcactgtttgaagctttgatgttgttcggatgaagctgttcgaatctttctgctagaattcaacgacgaagtcgagagaaaactactttcgctgtgaagttacttagtgagtgagaaaaatggtaaaagtagtttatgaggattttccaccctatttataagcaagtttgtgaaagggtgtaatcaattaaaatctcaaacgctttgatttccccctgaaaagcaaatattgggaattaaaagcaattaagtagtgcagaagagtagccgtcaaaagcgtgcaagtgaaaggcgcgtctcgaggtacaaattgatcagagcattaattagccaaaaattgaagagactcctagtcaacagtcacatcgaatcacgaacaggcacattcgacacgtgtcacccattcagatgtaaggtcggctcaagtaaggtctacacgtaactttgaacgtctcgtgcagacttgggggaaaatgttaggaataattacataaggcactattttttgtaa

SEQ ID NO: 27585 - DNA, 2543 bp, Cannabis sativa
ttgtgttacgatgtttctttcatgaaaggttacttataaaaaaaatattaaataaaacagaaaataatatcaaacagactcgagttagttagagtaaacatacagaagagcccgatcctcgcggacattattgtcaactcgaatgatttttgagccaacacgtaattgcattacaaagcttgatgttatgatcggtgttatcccgagttccataacagtgtcacgactgcttgcaagaattatacgcatccaatagaatggatccgtggcagttatagattgaataccatacaatggtaattggctgcataccaaaaatatgaacaatgctaaaacattgtacaatactttctctctgagtgtaacttttctgttcgggctttgaacttcaagtaaaaatggaaggaaaggccgcaccatattcagctaacgaaaattacttgctcccattttttttaattgatttgaaaattgaagtatttgttgatgaataatataaaattaattgaattggagtttatttgttcaattcgtacatgagtgaccttaaaccctttctgctttcacccttttatagtgaattcagaattatatacttctattacaaatataattaatgaaaacaatcttttatatcttatatcgtctattgattataaattaaataatatatatatcttttatttaaaattttgaaactacaactggttttctttaataaaatagtcttatttcaaatgtaattaattaaaacaattttatcttttatctttttctcaaaaatcttccatttttattaaaaaaagatattttagaaattagtcgtattattgttttttctcatcacataatataatatataagtaatatgtaaatcctctgcggctttttcaagatctgatttctcacggttacttttcaccggaatcgaagtctgtctgcgttgaaacctcgaaggagcaagaccgacgtgcagtgacgaacccaggatttttactttgtgggggcttatttatcataaaaataatttagtgggggcttttctactattttaacctataattattaaattaaaaaatttacatttaattttttaaaaggcaatatttttgttcgtgggactatagcccccacatcactcttaatgggtccgtccctgccgacgtgtttgctttgaaggagatcggcgtatcggattccgtagggattttcaagaaagcatcgaaaccgttggttataaatggagaagcgcatcggattcccgttcggtgataacacatttgatttcgtcttctcaggcggcggtcggctggagaaatctctacggccgttgcgtttcgcttccgagatcgtacggacactgaaacccgatgaagggacctataccaaaaagactggtgtgttttttggaacaaattacaagtactgttgcctttgtgataatgatttggacatcccctttcatgatctggaagtgtatcacaaaaaaaaaagctttaggatttgtaagtaataaatggagcatccagacttgtttgacttggtcgagcagtattcatacaggtgaggctgaactaaaaaaaattaaaattaatttctacttaactagatttatatttctatctagaaataatattgggaagaaataaaaaataataattaacataaaaataaaagaaacaacaacttttaatgttgtttgaatatggatgaaaaataaaaaatatgaatcatgttattttagttacctagttattaatgcaatttatcaaaaaaaaaaattcgtggttatagaaataactctaactcttctcaaattattaaagtcttacatcatatataatctatttgcatttttaaaataagttaatatattgactaaaaaaaaaaaaaaattaatatataatctgcaatctaaatgtcaaccaaactatataaatattctcgttattatattattattagggtaattaaatattgaatttctcataatttaatttaataactataatacaatatcaataatcatttaaaatacgatacatctaaatgatactaaatgctattactacttaataataatactctttctttcaataaacattaataatttttccactatgcattaaaaacacagttaggtgcgatttcggtgtcagagaacatgtttaaagctttagggcattgagtcttcaaggggtagtaatgtgattgattgagtgggtttcgtttatattcatactgatttttagcagcaagtttaattgtattgttcatgtactgtaaaataatagtgtgttttggttttggtaatcatatgtgataaagatggttataaattgattctttaatgttttttgattaaactatctactacagctttaagaaagcacgaagaaatggaggagaattcctagatttgaaccattgaattgtttagggttattattgtttttaatttatttttgtaaaattttattaattttaatttttttatttattgttagtctgatttatacttttataaaatttaattaagagtt

SEQ ID NO: 27586 - DNA, 1477 bp, Cannabis sativa
gattacacaccatgggagattggagtctcttgataggaaccgaaggagatcccaagttaaatgccttctgtttcgaactggttctccatagacccccgttagcctccactcgcctctctctggtgaagaaaccatgatgtcgatatggttagttgagtaaccaagaagtcgaccctctgattgaaaacgccagaacataaagtagtttaaaaaactcttttaagtgccgaaatagataaaaaacctaccaaaacgaccctttcagaagtctactacaaaaatttcctataattaatgatatataataaattaataatactgccaagtctatgatgatgaatatattaaagcaaaataggaagtttcattttttgactcaaaaaatttaatttccctagtttcacgcaaggcaatgacataatattaatatccgatagagacattttcttttaagttttggtttgatttcatctcatttcatccatggatcataaccattacacgtgctagagcctagagtttagtgtgatttatatataaaagaaaaataataacacacgtacgtacttattctttttcttcatgcataagtatacttggtcatatgtgcacttaaatattacacccaaatgatatcctagtttatttttaaggaattatatttattttagatgggagcagctgttttctccattttataaaataatggcatattttataatctattttttttttttttgaaaaaataattcattaagtaattttctttttgagaaaaaaccatatatgttctcatactgtaaaaaacttatcaaacgtgtaatttccaataaaaaaaacatcaagctttttagtgtgatacaatgatttgggccatgaattagtatcaaggcccattagaaagcccaactggacataggtcacacgtggcgaaatggcacgggtggttagtggattaggccgtcacgtgagagataagagctaaagaattggtacatattatggatggatataatgatataaataagaaacggtccaaaaagtgataaattaaaaaaggaatcttggccaattacaattgttggatgagctaaggcttttcggtgcgctcacatggtgcgctgtgcgtaccacaccgaccacaaagcgggcccaaacaagaatttgtgatgtatgccttggaaactgttattatgggcttttggattttcagccaccattggggaccccaatccttttctctttctttcttgttttattattttttttttttgggtgtggggggtaattctcttgaattatattttcatggagaaatgggttcttttgattaattatatgaaatgggtataagaataagaataagaattaagaagtatttggttctgtatttaagaagttatatgtagaaaataagatataagaagaaatatgaacaaaaattagaattttcatggagaagttaatcatttgtatt

SEQ ID NO: 27587 - DNA, 3657 bp, Cannabis sativa
aaagctaaggtgattgtaggtaatagttcttctcttcctatccattccattggtcaaggttatatcaattctttttcttcaacacatccattagtgttacaagatatcttacatgtgccaagtttaactaaaaatcttttaagcatttcccaattcaccaaaaattacaatgttattcttgaatttgatgatgtttgttgtctcattaaggacaagaaaacaaagcaagtaattcttcggggtgacctttgtgaaggtttgtacaagctttaagtccatcctaccaaaactccaaactagcctgttcacattcctcaacccagtgccaacaatcatacaaccacaagcaatcctatccacaacaagtccaacatctctactatttggcatcactgactcgggcaccctgctcctgtcattctaaatagatttctatctttagttgttcccaactctacatgtaataaagtttctttttgtaatgtctgtcaaataggcaaattacaccaatttagctttaaaagcaccagcaataaaaccaagatgccctttgaattagttcttaccgatgtttggggaccgtctttctatagctctaatgatggctacaaatattatgtcagttttttagatgatttcacacgtttttcttggttgtttcctatgaaaaaaaaaaccgaagtcacaaacatcttcaaacagttcaatacctttgttgaaaggttttttaacaccaaaatcaaaagcatccaatcggatctaggaaaagagtatgaacccttaaataaagtataccaagatcttggcattctaaaaaagaaattcttgccctcatactcatcaacaacaaggttgtgttgagagaaaatatcgtcatgttgttgatattgacttaactcttcttgcccaagctgaaatgcctctcacattttggtgggaagcattctcttctgctgcttatttatttaatagactgccaaaccagatgcttcaaaacaaatctccatatgaaacactttttcagcattcacccgattataacatgttaagagtctttggttgttcttattttccgttgctaagaccctatgaaactcacaaagtctccttccgatctgctaaatgccttttcattggctatactatgtcctcaaaagaatatagatgcctaaacccaagtggaaggatttatgttgctcgaaatgtgacctttaatgaagaagaatttccatttcagcaactttttcctactacagcctacactcaacaaactagtcccacaaatattaatcatgtctggtttcctctccctcataccacatcccaaacatctcatcataatacctctggctctactgattcttcccataacattaacattccacactccccacatcattccagtagtgagtcgaccaaccaatcttttccctcacccgaaaatgcatcccctacggctactaacaacagctcttcccataacattaatactcataataatcatccaatggtgaccagatctaaacttggcatatacaaacctaaagtatatcttgcaacacaattggatactattgaaccaaaaagcatcaaagaagccttagctaaccctcattggaatagggccatgaatactgaatatgttgctctcaagaacaagaaaacatggattcttgttcccccccacttctaatatgaaaataatccacaacaaatggatattcagagtaaagtacaacaaagatcgctcagttgagagacgtaaagctcagttagtggctaaaggtttccaacaagtgccaggagtagacttctttgaaacctacaacccagttatcaagccttgtaccattcggataatctttactcttgctgtcacatatgggtggaaaattcagcaaatcgacatcaacaacgccttcttgaatgatgagttacaagaagatgtctacatgcatcaacctaaaagatttattgatcctcaattccccaatcatgtctgcaagttgcagaaggccatatatggcctaaagcaggctccccacacctggtttgatcaactcaccaactctttaaaataatggggtttcaccaacagcaaggctaactcaagtttcttttttaagaaattcaacaataagatgcttctcatactgctctacgtcgaccatattcttatcacaggagaagatcctcatcaagttcaacaattaatttctctcctccactctcagtatgctgtcaaagttctcggccctgtcaactattttctcgggttcgaagttattagagatggctccagtctctatcttactcaacaaaagtatattgaggatcttcttatttcaactcaacttttggattccaagccccaatccacccctatgtgctccactagcaaactgtcccagcacaatggtactccattaccaaacccaactcaatatagaagcgtctttggggccggctctacagtaactcactttaactagacccgacattgctttttcagtcaataaattaagccaatttcagcaacaacctacatctaaacattggggagcatgaaagcgaatcttgcgatacttggctggcactattggcattggtttacagttcactccagctcccagacttgacatacaagggttcacggatgctgattgggcagggagtttcgatgataggaagtcaacgtcgggttactgcatctttcttggaggaaacctcatcagttggtgctctaaaaagaaaatcgttgttgcctggtctagtaccgaatctgaatatcatgctcttgctttagctacaactgaagtggtgtggatacaatctctgctatctgaacttgacattcaaataccccaaactccaattctctggtgcgacaacttaggggcaggttccttggccactaattcggtgtttcctgcccgcaccaaacataccgaagtagatctccattttgttcgagacaaagtaattgctcgtcaacttgaagtacgttatgtcgacaccttaaatcagctggctgatgtcttcacaaagcctctaccgatgtcttcctttgtatatctgagggacaagattacacatggtattatcagtgtatcttgagggggagtattaggatacaagggatagttagttaggagatatttttccagttgttattcagttagacagttattactgttttctgttgtttttgtcattgatttctttcttcttcttttgtattcctactcaattgtacatatataaatagcagagcctcaacgccaatcactttgattgagcttttccactttctcacttgtccatcttctctttactgttctttctttaactctatttttcacagagtctttcaccttgatatcataaaagaagcgaacacggagagaagcagtggcccagaactggtcctcaaaaaaagcctctgcggtagagacggtggagtggtcgatcatgaagggaggaattgtctggtaatcggtacagacgacgacgattgagccgatacaatggcggtagcggcaacgagcgatggaagccaatgagaaggtgagggaagaaaggattgttgtacaattttttacactgatttcaaagtctaaatatttgtaaggggcatgtttggctgacaatattaat

SEQ ID NO: 27588 - DNA, 2942 bp, Cannabis sativa
ggtttttggggtggccgaacgaacaagaacgagagagagagagagatagagaaaaaaatgagagggagcgagtttttgggggacatgagttttgggggcgtggatctagatttcgtagttcaaaggcatcgttagtgtgcatctccaccagcaccgatgaattttctatgagcgcatctccattagaaaacgagagagcgtgaatctagaggttttataggacaagaattttgattttgtggctcgttttaaccattgatcgtcagatttttggttggctttgggaaatatatagatcccatatatatatatagagagagagagagagaaggagagagaagaaagaaagagagagtgagaaggctgaagagagagggtaaaattgtttagagaattcagttttttaaaattttaattttgttcttttatttttatttattaatttttttggtttttttaatttttaaatattttaaaatttatttattttttattttaaattaatttatttttatttttttaataattatttacgtgtaccaataaaattgtgtgacgtgtaaaacgtgtacacgtggacacaaccaatctgccagttaacatatgaaaatggatgttaatgactaattgctaaaagaacacaagttttggagatttttttgtcaaaatttgagttttgagggttaattgctagcaaagtaaaagtattgggttatgccccaatttgctctttaaggcatcctgtaaaaattttaaaaattcagaaaatttacactaaacttctacttgacagtagccagcagaatgtactcttgttgttgtgaataaagtgttccttaatagtatttcttagcaagtcaattgtggaaaattctatgtatggtttgaactccacatcgtccatttttgtctcaggattatatgaaaccttataaggagttgcacattcattctcttcatcactatgaacactttccatttcaatttcatcaccaatatcaccttcatcttcaaaactattttcatgaaccaactcagtatgcctcctccaccaagaaaaattctcatgttgcacattctcattcatctccacatctggttcagtattatactcctcctcatgcatttcaaactcaacttcagttttgggtgctatttgggatgttgtttgggttgtttgagttgcagtttgggatgttatttgggttgttgggattgcagtttggaggtcaaattgtgtttgtattttgggtttagattgagctatttgggttgcagttgtggttcacattgtggctctatttggagttaagtttttggttcagattgtagttctgactgacgctctatttgtggtttagtttgtggctctatttgggtgcaactgaaaagtttggctacaactgaatcatgcctcatcctcctctctttgaatcttttacgagtctcctctaatccacttaatttctgtaaatcaaagaaaacaaagtatcaaattaaaatctatgcaactttagaaataccaacttattcattttttatcaataacatcaacttttttaatgcattaagatctataaaatgtataaaaaacataattctaacacgtgattcaggttgtggctcagcttttatttagggttcgatatggggtgttgcttgaggttcagtatggggtgttgtatggggctcaatgttgtagttcaaattgtggctcagtttggggtgcagtttgtagttcagtttgtggctcaattgggtggtagactagaggtcagtttgtggctcattttggtggtctagttgggggtcaatctgtgcctcaatttggtggtctggctgagggtctgcttgtggctcaatttggaaatctgtttggtgttcaggttggggttggaataagtcacgctgggataaaattcaacttcagattgggtcggaaactcaaatgcaagttgggagataatgtctggttcaatttaaatttggattggtggatcattttggtcaacttacatatctttgggtgcaactgaatcatgcctcatcctcctctctctgagtcttttacttcttggggtctcctctaaagcttcttttacaccaacaatcacaacctctgaatcactagttaatccacttaattcctgtaaaatgcagtgtcaacttattcattttttaccaataatatcaacttacttaatgcattaaaatctatgtcatgcataaaaaaagtataattctaacctggcagcccgtgcaatatctggtagaggaggactttgtggtgcatgaggggtgggttgtatgggaatctaggcatgcctccatcatcatccaaataagctaaatgctcctcagcaaaggccatcatattctcaaagtcttcatcgggaccctcatctgaatcatgtccctcatctctatcatctccatcaactccatcatcttcatcatcatctccactatcatctccatcatcatcttcatcatctcaatctccatcatcttccttagactcaaacttagatgacaatgatgatattgttattgtctcaagaatagtatttctcggttgggggatgcagtcatgagaatcaacctcttcatccacccattgtgctgctaaatctccccacttgagaaattttttgtcattggggtcatgatgaccatgtggattgacaataacatctacaataaatccacaatctgatggcagctcctccaaagtgcacttctccaaatttgatgatggtgattccagattatgccttacagcatcctcaaccaaataccaatccacttcaaatgtgaatctggcagtatcaaatatatattggcctcccaatggcttttagacctcaaatcatccaagatcatatcagtttccttttttgttcaaccaccctaaatctcatattcaggtgtttccctttagg

SEQ ID NO: 27589 - DNA, 6427 bp, Cannabis sativa
ggattggatcggttctgttcaattagattggattggatgatgcccacccctatgagaaacccagggaaggaattttcgggagagaagaacatggttggtgctggtagggctgactctgtagtggcagtcgattgtgttgctgggggtattgtctgtgggatagtggggcagatgatgatgcattggaagacccagtgaggaaagtattgtcttgtctcttcctcctccctctgagactacctccactaccaacttttgaggaacctacttccttccctaagccgtgcattttacactaagaagtacctgcaagaaaagttagtgcaggcttaaatgagtcaactcagaataatgaagtcaataaaaataatctatcaagcatgcaacgatcgactcttgatagtgtaagaggggatgggtcagcctctccacacggatgagcggccctcgatccaccatcacccagtcaaaccattgcatttttcttttaacaatagtaggaatgttgaactagcccgatgactggtcgaggtttcactcgaccaaactcaactcgaagctcaaagctgtatcaccgtgcacaaatgctttgaaaaaaaagaagaaaaagcaatcgtgctcaatccgttctcataagatcaatgcttacaaagtgcaatgactggcgcatgggtcaacattaacaatatacttctacgaacaacattgccgatcaaacatataatacacactaaaccaagctcaaactcaatatttctaccttgaacatgaagttgtaaacaactaacaagagaaatagggtgattactgagtagtaacgagcagtggataaggatgttgtgtgaagatgacttggctgtgatgtgtccagtcacgtgcgcgatcgagactggcctgactaacaatgcttttgttcgacgatgagtaagttgaatcaaaatggaagacctctggtgcaagggatgaaaattttgaagtttgagaaaggatgaggaagctgtgggcatttaatacaggcttattggagtattccacgcaaagcaaacaacccaaatcattcgccaaaatagccttttttttatttgacaaatggggagtcgagaagactgtatcagcctcaacatttaactttcattatggcatgtctcatgaagagtgcttgataaatgaagtgtcaacttaatcactctaccgtcattttaacttcttctgagaaatgcaccctgcacgcacgtattatcagaaactacatttagagcatgccaattgactgtgctaattatacaattagtgatgcgttggttgacgtcaatttgtgtgacacaaagtgatctcaaccagtgccatgtgtcaagaatcattcatgagaaaataagggaacactggaagctcctagaccatgaagcgtcctagaaacttagggggtaaatgttctcaggatttttgtaaaatttacatgtggaatacactgaagaaattcgagttaatccttagctaattagagccttcaaccctggcttctataaggggcttccccaaaaggttcatccttcacaagggaagggcacgtggaggcttggttgtacataccacttcttcctcctgggtgcggaaggaaaggtattccttcaagacttggaagagacttgcggaaaggccttcctcatttacatccatgtaagtaccgaaaagactcaaaatgggttttactcccatgcagtatcgcagaaggtcatctccgcactcttctctcaaagttggaggaggacgtccaaactaggcagaccagggagtagaagctcgtcaaagaggtggaaagcctagaaacagctgccctggaggttttctatgagttttggaagacgaacccgaaagggaaatttgattacctcagtgattccaaagatgtatatcttgattattgcgcgggtcaggcggccaaagaaaaccgcgaggcaaccacttctagacttctgagcgatcagagcaccaaaacttctacttcccaaaatgttgagcctccagcccccacagattaagctgatccgtacaaggagcctaggacccctgctgtctgaaacattttttcttttcttttttttatatatatatataaatatctatttggctcatgggcctttgttagagacaaaaatgaccggccaagcaaatttgaaacatgggttatgttttttcattttgagacaactagctaacttggaaacctttaatctcgcgtttactgtgctttgtttatcctttttaatgaatactttcccttattttgatacatgttcgtgcaaactgttatatatatattatacatatttgttgagcttgttacttacttttaccaatggtttgtacgcgtatagtttcccccccaaatgacccagcagacttatgacttgttatcccaatttttgcactgacgtgtcatcacatgctagtgacatgtggacttgattctccatacctgcccaaaggagatgttccgagcagaacatctcatatgcctgcatggatgaggtcctcccagtcgagctgtggacaatccgagccgcatatcaaagcttagcaattccagaatttgcatcgtgaaacgcaagaggaatccctataatttggggatcgtatcacagagatatggcaagctgtccaaatcccacaatcagtgtattcttaatatgtaatatgtattcttaccaattatagatattgtaagtaaaagggaaaccttccctcaagtatatagccttataaatagtgatccatagaattacttgagagagatctaagacagcatactcaaagatttcatggtaagagctttaagagaggaatcgttgtattttttatttgtaagtcaatacaaatcaaggggagtaggctattatcgaactgctcggggtcaaacctctttaaaaaccatgtgttctttatttatcttttcatatcatatctgaattatatcctttatcgcttattattaagaatcactgtcgttagctaaaagcgaggtcaacattttggtgctttcattgagagcaaggatcataaatttgctctttactttaaatgtaatcataaacacgatggtggtacaaactcgcagaggtgcgatcgattagatagatccaccagcagtgtatcccgcactgcagagtccaggtaatgcaagggtcccaccagtcacaaatcctgaacaaccaattacacaaccaccaaccacaggtcatggtgtgacgtctcctttggctggaatcacacccagtgtgcaagagactggaaataccagttcggcagccgatctaagtactcccagcactggggttccttcagcaacaaatgccaaaacaactgttggagatgacaccaagatccaaaaccttcttaatgctcttgggctcatgtaaggtcatactaatactctacatcatgatcaggaagagctccatgctgcagtgaaccttgcgttcgtagagcaaaggcgttagttcaccgaatggaaagataaagagatggaaacgttgaaggctcaataagcagccatcgacaaccgaacaagacaagccactgtactgatacacagagcctaccaagttactaatcagcaacccgcatccagcatcccaatgagcggctcagacgaagatcaagttgggaacatttcccaaactctgaacggtcagtcatccaatccccagtcacaagttccacctgtgggccaagcggtaggcggcgagaccatatctggtaatacgttaggaggggttatacctaataactccacctggactatcaattctggcagagtgcttggccaaagcaaccagtcactaagacaacctagtgcatctacatttaatagactgggaacagctcatgatctcagagatgatctaaataaaaggagagggttagccgaacaatatcctacttaaagagatcctgacgtgattctggtcggccaagaggccgaacaagttcattcatccgtgtagggacaattggagaactgaaaaacagttccaaggcatggctggacaaaagcacaatgatctcaagttggaccaagcacgtggatccccgtgtactctagagatcaatgttctagagctgccccacaagttcaagatgccaacttggaagatgcataccgggaaagaagatccctcatcacatctcaaatattttgaaatgcaaatggacttacaaggagtagaaggagatgtgtgttgtagagtttttcctaccactctctcagaagttgcccaacaatggtacttcaagttgacaccaggaaggtttaactcttggaaggctttctcctcgaaattccatgcacaattctcttcttctcgccaactcccattacatttagaggaccttgtcgaagtgaaacaaaggccaagggaacctctccaagcatatatcagtagactcattacagaggcgacgaaggggcatgattaaccgaagaagggaaactaaccacaatactggtgggcatcaaagttctcggagagctttggaaggacatcaagagagatcgaccaataaattttatgagtgacttcctcgatcgtgtagaaggtttcatcaagctcgaagaagccattcagcgagcagaagtcgagcttaaaccaaaccaatcacatgctccctctactggaacatctgttcagcacccctagtacccaagcaattcaggctcggacggtaaaaggtgtaacagcaacaaaaggcaagacaatgtgaaaaagggaaagtttgctagcaaagccgaacaggcccctagagaaaatccttccaaatccacagctttctctgtcttgactgacaatttggagaccatctacatggctactcagtcagtagctccgtacaagaaacttgctcttatgaaaaaggacataagtaagagggacatgtccaagttttgccattttcacggagattatggccatgaaaccaatgaaatcaacaatttgaagcgagaaattgaatttttgataagaaagaataactcgcacgtgaaaaaatatgttaaggccgatcaaaatcagagtgccgcccaggaacacaataaccaagatttgttgccaccaccgatagatgggcatttgcaagtcatcattaggggcggcacatagctagagatgcaagcaaagcccaagaaaggtatgcccaaacctcacagcacgagctaaaataagtggtcctaacattcgaagaagaaaggaaaccaaaaataccaaaggtaggggaacccactataacattcaatgaagaggatgttgtcaagattaacttcccgcacaatgatcctttggtcgtggaagtacagatagcaaacaaaacagttgcccgaactatgatagataatggagcctccacaaatatcttcttcaaaacaccgcattaaaaaatggggctccaactcaaagatttaacccctatcttcagcctgtatactgtttctccggccgcacctttagtgaaaatttgcctacccctcactgttggggaaactttgaagagtataactctaatggcacaatttttggtattggatgtcccatcagcttttaatgtcatgttaggctgactccttatatgacttaaaagctgttagatcgatatttcatttgtgcctcaagtttccaacaaagaatggggtcaggtgcctgagaagaaatcaacacgtttcacgggaatattacaacctttccctaaccaaggctaaaacggaagtatcctctagtcagagttcggacaagggaaaagacattgccaaatagggaactgccaaaggtgaggacaatgtggatccctgacttggggaaccgaatacccatgttgggccaattgaggaactagaagagattggaatcgacccaaatgtttcgaccatgaaactcaaaattggaaaaggtttgttgcttgaagtaaaatcagcattgataaagtttctaagagcaaacctggacatttttgcatggtcacatgaggacatggtcagaattgatccttctataatttcacacgccttgaatattgatcctaatttccatcccgttcaacaaaacagaaggctattagataaagaacgggccctagcctgaaaagaagaggtagaaaagctgcacaacaacaatttcataattgaagctttctacccagcctgggttgctaaccctgtactagtgcccaagccgaacaaaaaattggagtatgcattgacttcatcgacctcaataaggtgtgtcctgaggactgctttccacttccaagaatcgatcaacttgtggatgcaacaacaagacacgggatatttagcttgatggatgcctattcggggtacaatcaaatcaagatgcatccaccggaccaagaacatacaagtttctgaatagatatgggt

SEQ ID NO: 27590 - DNA, 5903 bp, Cannabis sativa
  modified_base (5717)..(5718): a, c, t, g, unknown or other
tggagttagaagggaatttgtgtaaaattaattagttagcgtcagtttttaaaagatgcttaaattgtttgcgttatttaccaaccagcacaagcatttttagggtaaccgacgcataaaagacatattttttaaaaagaatttgtttttaccgtcggtctacattctagcgtcgaatacatagctgacacaaattccttatagtttgcgttagttgagcaccgacgcaataactctacctctattttttgcgtcattccatgttgttgaccatcatgttgaccgatgccaattcaacgttttgtagtagtgattcaatattcaacaaatcacaacaagcaactttgtttctattttttggttgctgaaaaaaattgtaattgctaattcaataaatcacaatttacgagaatagtgaaaatgttaatgtgcaccaatagaaaggtgatagaatacctgcaataatatatcaaagcttaaactttattcttccttaaaacgactactcccccaacgtgaaatctcaacatctttgctctgtatgactaaccaaatttaaataaaattattaaaataaattatttgaatggatcaccgaattgaaagtattagaagagaaaataacttaaatcttattcattgacccaaaacagggcatatatacatgacacaatttgttacaagattaaaaaaaaaagtaacaactcgagtaacagaatcctaacaaccctctataacagcctataactaattaactaacttaatcatagacttataatactccccctcaagatgaggtgtagagactaatgacactcatcttggtcaaaaagaggctaaattgagctggaaaaagagcctcggtcatgatatctgcaaagttgtgccttgaggggacatgaatgagtttaaggcatttcttgctaacttgatcatagacaatgtgcaatgtcgacatgtttagtacgctcatgaaacataatatttttatatatgtgaagagcagcttggttgtcacagtagagggtggtaggattcgagtgtgatatgacaaagtctttgagaatattgaatagccaaaggagttcacatgtagtatttgccatagacctatattcgacttctgtagaggatctagagacaattgtttgcttcttggacttccaggagatgagagaagaaccaagactagtgatggatcttctggtgtttggacaggttccccaatcagcatatgagaaagcatgaagttggaaagggtcatttggtgttgatgcataggagcttaagatgagaccttaggggttccttttagatattgtaggatcctgatggcagctttcatgtgtggttgtcgtggatcactaaggaattggctaagacggttgactgcaaaggtgatgtcaggccatgtgatggttaagtataatagtttttcaatgaggcttctgtaagatgttgggttgaaacagggggtccaacatccttgctaaggaatatgttgacctccataggagtggaaacagttttgattccaagtgatccagctttagtgaaaacttccaggctgaaaggtctttgagagatagcaatgcctactttagatcgagcgatttctgaaccaaggaaaaaatcaaaatggaccaagatccttgtgttgaaattttgagtttaagatggttttgaaagtagatgcatccaaatcgttattgcttgcaatgactatgtcattgacatagacaagaagagcaagaaaagtgttatttgatgatcaaatgaatagggaattgtcattgggggattgagtaaagtcattgctaagtagactagtgcttaactttgcaaaccattgcctagaagattgcttcaaaccatataaactcttgtttaatttgcagacaacatttggtggaagctccccctcatgtatatagcctttaagaattttcatgtagacttgttcttcaagatcaccatgtaaaaaagtattgtttatgtccatttggtgaagagaccagttatttaaggctacaagggcaagaaataatttgagtgtgttaaattttgcaacaggtgtaaaggtgtcaacatagttgatgccatgttgttgattatacccatttgtaactacacgagccttgtatctttctacttcaccttttgaattgtatttgatcttatatatacccatttgtttccaataacatggaatctaggggggagagaaacaatggaccctgtattattttgtttgagggcaaataattcattatccatggctttgagccattggaaaagttttgatgcttgactgtatgaagttgtctcaagttcgatatatgcttgaagaaaaacattttaaaaagatttgtggagcctgtcatacttgaggtatttgtcaagtgatatgcagtggaatgattgcatataaaatcttttaattggacaagtttagatgttgttctgccagttttagttatgttctttgtatcaacagatactgtgggaggatgcagggatggatccttgggaggatcagtagggagttcgacgttgatctgctgtgaagggatagaaggagtagggtgagatgttgcagcatgtttagcaaaaaaaaagtcaagatcagaagttaaagaaccttttaagggaaaaattgtttcataaaatataacatccctagaatggaagatgacattgttgtcgaggtcaaggagtgcgtacgctttcataccattgggataaccaatgaatatgcaggcataagcatgagggaaaatttatgtctcttgctagttagagagaaagcatatgccaaatagccaaatgttcttaggtgattataggtgggttacttgttgtgcaagagttcaaaggcaattttgtggtgtaataaggggataggagccctgtttatgagataaacaacaatgttaatgaggtgaggctaatatactaagggaagagaggattggaaagaaaatgcccaagcaacatttaagatatgttggtgtttgcgctcaactactgaattttgtttaggtgtttcaacacaagagttattaatttggatacctttttgagtataaaaagatgtcatgtttagttcttttgcattatcacatcgaataactttaatgtttgtagcatattgtgcgtgtacaaaggtataaaactgagggatatattgttgtacctaaccttttgtttttaacatgtagacccagcagaatctactgtagtcatccacaatggtgagaaaatatcaaaatccttcaacactttgaatatggaaaggaccccaaatatccatgtggatgagatcaaatgtagaaacaacaaaattgttattggaattaaagggcaatttcttttgttttgctaaatggcatatagaacaaggagaagaaacaatagaatccttaaaatgtaacatttttttggttaaacttgtagtgtacatagatggatgtccaagtctagcatgccatgaatgtgcactattacaagaaatattacaaacagtagtgttttattttggacagtggggaaattatgcaccagaaagtagagatgaccaatgcatttatcaatcccaatcctcctattttgtgaaccctagagaatgcaacaagaattggtaaagaatataatgttagttgatgtttggaggaaagtaggaacactaaacaaattaaagtgaaaatcagggacataaagaacattgcgtaagtaaagttaattagaaaattttatgttgtctgatttatgaatcctaatattcaatccatttagtaattttatggatgtggcaatgggaacatcatgtaattgagaaaataatgagatgtcacaacaaatggggtgagtagcaccactatcaacaatccataaagagtttgagtgttgtgtgatattaccaaaaatattcgaagcaaaaggttgtgaagcttctgagttggaagttgttggctgaagcttctaacttagtaatgaaatgggagtttcaatgtcttttggtatagtcaagtttgccaaaagagataatagatcactagaggcagatgcctgtgtttctttctttttgtctccataccctggtggaatccaatgagaaatttgtgcagtaaggcctcatcctcttattgcatccttgattcgcattagcagctgatgcagaaggagtttgtgcaagggctggattttgagaaaaatcttgagtagaagcaataagggaggggacctgtggagatttgagattacgctgtctttcttcatggataaccatggagaatactttggacagggatggaaaaggatcaataagcaaaatttgagccctaataggataggaagattcagttaaacctgttaaaaattgaagaacctgttattaattcaagaacaccatattattaatggaagcaacacaggtgcaggagatccatggacgaagttcttggatctctttccacatgcatttgagtttggtaaaataagaacttacagaatcatcgccttgatacaacgtaatgagcgattccctgagtttgaaaatgcgaggaccgtttcgttgatcataacgtgaattgagttccttccacatttcagtagctgtgtccaagaacattatgctgcttttagtgtcaggcgtgacagaatggagaattcatgacatcaccatttggttacaataaagccaatggttatgcagtggatcatcgataggaggttaaggtaaggttcccttgaggaagacggtcttgtttcacgcaccaatgaaaagttcgaaatgacgatgccatgactgaaagttcttgtcaaataacagaggagtgactaaggtgagtccaggatgatcaccagatttcaaaaagtatggacttgaactatcttcgtggataggtcgtgttgtcacgttgggctgaggattggtaatgtctctggtgacaacagaggccgaaggaatgatctgaggatttggaggagcatctggtatggaggaataattgtttggcaagggagtttgactggagttcctggaaccagtagttcgagttctagccatagcagcgatcgtgagagaaaaaattctaagcaactgatactatattagaagaaaacaaacttaaatcttattcattgacccaaaatacggtatatatacatgacacaatttgttacaagattaaagaaaataacaattcgagtaacagaaacctaacaaccctctataagagcctatagctaattaactaacttaaccatagacttctaatagaaagttaacgaatgcaataaaaaaaaaaaagaagaaaatacactagattaaaagtaaaagagaggtttcagtctcggagaaagaagcaaaaggtcctccacttcatcttgctcgatcgagcagccttggtgtctcgtctatggggtatgaaattaatattgaacgaaaaagttttacgacattatggaagcttccaacatcatcaatgtgcttcatcgatttgaacaactctgtttcatctgccattttttttttctgattggaaacccaaaaactaaatcaagaatcttcaaaacataaaaatcacaaggctgaatgaagatttttgatagatacagaaaatactgtgcgaaagaaattatgctgagaatgctgagatagctagctttttgtaggttaaggttagtattcatcatttatatatatctattctatnnaaagtgtgcctatataacaaaattcttggtttttgagaaattcatgggtgactttttatttatattaaaaataagattgtttattataaaaaataaaatagtttatgagaaattcatgggtcactttttatttatacataataaaataaaaataaaataaatttcattaaatccaacaaaaaaaa

SEQ ID NO: 27591 - DNA, 2005 bp, Cannabis sativa
  modified_base (26)..(32): a, c, t, g, unknown or other
  modified_base (526)..(526): a, c, t, g, unknown or other
cctattcccattcccattcctattcnnnnnnnttcattcctcccaaccaaacgcaattatgtgtgcatgtggtattttggtaaataaaaatataataagaggtataaaagttatcttgcccgtgtgaaggtaaaagtgtaataaaagttaaattttgtatttttcatgtaaaaattccatattttattttatctttcttacacatcatttttatcgccattactttaaaaatactccaaaagtgtaacacctttcaaaaatacaataattataatctcaaacattattatgtggatataaaaaaaaatcttgattaatctattatatattgtacctttaatttttttttttttaaaaaaaaaaaaacatagcatcaatattattatgtggtattgtaaaagtatatgtgatattaacttttacgggcgcctaaatatataatattttagcataaattaaaatttaacttaggattatataaatatatagtatataatccaattcttttttttttttatttaagcgnttatatattacaatcatgttttacataggactcgaacccaagacatccaacgcacacccacctatggccagttcattagctagcctcaagtggttgtatataatacaattcaactcaatacaatactaccttacaaacaagccctaaaatgttactattagagatgttgtggactttgaaaatctaaaagcaataaagaggtgtagtttttgagagactttatatcggtctaaatgttaaaagttaaaaaactaaatgatgccatttatttgatatggtaaactcttttctttccatccacgccttccaaatagtgcttaatcttccatggccagtggccaccagtagtggtactactattcatactcttctcctcttgcttcttgtatagtacaaaattaccacttacatttcctttggatccaattttgtcaagaggacttagtgaatcaaaattagggtaatataggacgaaatcatggacattactgccaagaacaggtcttcgttgttgttgagcgtaacatttcaaggcggtacgaattactgaaacgacaagctcatcctcatccaccaacagtttcatcggcccagagctaccgatgaaggtgacgctgatcaacatcagtcttttcttttggctcttctttagccttagactaaacattttgatatgtttttatttttttattttcagatttgaaatgttaaaatccagtgaattagggtttgagagggagtacttagggttttaattattggtttaatctggggtgatagtgaagtagtggtgggtataatataatgttttgggagagatattaaaagctgagttgctagtaatgattttggttaagcttgtcaccattaatgaatgaattattattagatgaagattgcaaaacatattagggtttggagttacggagtagagtaggaaatgtgaagtcatgccaagtgtgtgaatatatatatatagagaggtttaaaaagtaactatatgctttactagtttttatttttatttttttattcatctatatcattttattacatacatctctctttatctctctcacctacaacaaaaacaagagtgtgtttgaaagtaactgtgtaattactatatagggtaattactagggtggtaattacacagtctagtaattacactatattttagagcattgctattgggcaccagtagtgcctagtacccttaagacgtgtcgcgttactattggttagcgatacttcctaaaaactattatattaaactatatgggacccgatactaaattagaccaatagcgatattgacacgtaggatggtgtttggcaccactggtgccttttactatttctctatattttaaaatgcaatgtttggatatgaggtggtaattacatatgaattcctaatatcttgtttggcaaaataattagtaattacatgagaaaataatatttttttagtag

SEQ ID NO: 27592 - DNA, 4721 bp, Cannabis sativa
gggtgcaccacttgcacggagcaatcaaatttgagttcaaggcttccaataacgaagcagaatatgaagccctcatagttggactgaaggtcgctcaggaagtccatgccacatacattgaggtctgtagtgatttgtagttggtactgaatcatgtttcaggagagtacgaggctcgaggagagaaaatgatggcctatctaagcaagatacaagacctactcgcaaaattcaagagttacaccgtaaggcagattccaagagaagaaaatacagttgatgccttagcccgggttgcgagcaacacagtaatggataaggccaacctagtctcgatccaattcttagaagaacctagcatcaattgtgcggaagaaatcaaaataataaacacaatgccaaattggatgatgcccatagtagcttacctcaacactggagaacagcgcaatgacaggaatgaagctctgaagatgatgaggaaagctgcacaatacatcatagtagaaggtgtgatgtatagaagaggtttctccatgccattacttagatatgtaacaaaataagaagctgcacgactcttgtctgaagtacatgatagattttgtggcaaccacgcagcaggacatataaagaaaatactaagacaaggatatttctaggcgacaatgatggaagattcaaaggtctacgtaaagaaatgtgacaagtgactgagattttctaagatccccctgcactgcccaataagctaatgcaaatgcaatttccttggccttttgccatttgggggagagatttgatcgaaaaattgcccaagggcaagggcctagtacaataagcagtggttgcagtggattattttacaaagtggacataggccgagcctttagcaataatcacatctaaaaaagtattggacattgtggtgaagaacagaatatgttgattcagacttccggacaagatcattttgaaaaatggcaaacattttgacaactagatgtttacagatttctatgtgacacatggaatcataaaaagtttctctgcagtatcacaccctcaatcaaatggtcaggttgaggcactcaacaagacactcaaagacaccataaaaaacgacttgaagaggctaaagggaactagctggaggaactaccagaagtattgttgtcatatcaaataacagagaaaacaactatcgggaaaacaccatttgctatggcctatggttatgaagccatgattcccgtagaattagaaccttcatcccacagaagattaacctaagatgaagcagttaatcatgccctccttgtagaatcacttgatgagattgaagaaaaacgagcctcagcaaacctaaagctcgtagctcatcagtaaaacgtagctcagtacttcaacaaggaagtgagggcaagaaaattttttgtgggagatatgctcctcaaaagagtattcctaaacataaaagacaacacggttggtgtgctcggacctaactggaaggaccatatcaggtggttaaagtcacagactctgcagtatataagctggggcggtatgaaaaaatatggggcacgttctagtgccaagttattagaatggggaacatttgagaaaatactaccagtaagtgtacaaggtctgatgaccacttcaagtacagaatgctagagcatttactcttaagaagatcgccttctgggcagatcccgctcaaaggtttagataaaataactaggtctcaagttggatgactatctttaaagtatggttttaaaagtgcaaatgttttatgtttaaattagctaaagatcagttagatactgtaatagccttcataatttaataaatgtaagttactatagtaacaaaattgttttgaccaataaatgaataaagatattaattatcattctaattgtgtcaattacttttataccaagttatgaatttaccattaaaatgtgtgcaaagggtttgctctaacccaaaagctgaatagacaaaaattgaacttgtgaaatgcaagtgacaaagagtcgtaggtctactcggtcacttagggggcaactatacccgtacaaagcattggtaaataacaagctcaacaaacccaaacatagcagtttgtatgtgtaattactaaaataggggaaaatattcattttaaaaagatgacaaaagcaagatataaaatcggaattaaaggctgcccgatcagctagttgtcttaaaataaaatgaagtattaccaagtttaaagaccgcttggtcggtcatattgtatttaacaaaggcccatgggtcgaacaaataaatagaaaaaaagagaaaacagaggttcacacagtaggagtcctaggtttcttgtacggatcagcttggtcattggagggcagagtctcagtgttctagttggtcagagctgtggaattagctgcctcagagttttctttggcttcctagcccgtacagtaactaagatatgcctctttggtatcaccgaggtaatcatagtttccttctgggttggccttccaaaattcgtagaaaacttctagggcgacagactccaaattcttgacctccttcaaaagctcttcctccctcgtctacctagatttgatgtcctcttccaaatttgtcttattcgtggttaaggttgcaagaagagtacagagactctccctctcatccttcaaatcattaacctccttggatagaacctcgatatttgcctctagctgggtggtagatggcatctcctgaatatccttacttagctccttaactcgattatttgtagctagaagttgtttgttcacctcgcccaactctgccctcacaaccttaacctccttcttggttgcatccgccttgttctgcaggttggtggtggtggtggtgatagtcttaagagtagtagacttggcttgagagtaagtgtaagccatcttcaaattgagctgcatgggaaaaggttaaaacttgtacgtgtaaaaggacaagataaaaccaaaggagaaatacttactcgggttccctccttcaggagcccacccatcaaaagcttgacagaaatctcgtcccctccaaacagttggtcgttcacctcaggaagtagtcgatcttggtagtgttgaagcatctcctttcccttcttggtctcagggtttatcacgataggagtgtttgagggcctagtcagaccagacccatctataccacttctattggcacctttagacttggaggccttcttgggtggtagctccacatcggataccgcctcctcaggaacctcgataggaagctcgaccgagtccttctccttgtgtggtatctcattgccttttgatcatttgggtggaggggtctggccggacctgtcagttgacctcttcttcagcgtctagtacaccttttgagacatggttgcatatgaaaaaataagaagcttagaaaacaagtatgacataagccaagtcagttaaaaatcatatatgatttaaggtaccctgcacataggtaggagcattctcctgaacaatcaaagatggaggctcatcatttgaagagtcttcttgctcatactacatcagaataacttttccctttcccacaactgaggtggatttccaagcaggtctttaacgcttttccctgatcctgatagactggtcagtaggtacttggctgcgttgaggagccttcttcatctttttgctcagaatctcttgtttgggtacagtctcctgtttaggcaaaggcgctttcactttcttcacagcatttactacacaatcagccagaaaaagtttgtacttgacaaaattggccttagaagtcaagaaggagatgttctatgcagtagaaggtagttgaaaaatcttttgtgccctcttgagttccagtgtaaacagagggcggcaataggacgacacctgctggaagatgctgtgaatggtgcccattcatttgacgaagtagtactcgtccacaaagccccctatcttggcctcagaagtcaagagggagatgttctgtgcagtagaaggtagttgaagaatcttttgtgccctcttcctatgttccagtgtaaacggagggcgggaataggacgacacctgctggaagctgctgttaatggtgcccattcctttgacgaagtattactcatccacaaagcccccttggtcacctcggcggctgtggtgcccgtccaccagctctttttgatatagcaaaaatagaagtatcccgacctgttttgcttgggagatgacttcagattaaaaagccagttggtgtcgtgcgagaacagctcaccctatccatatgtggcatagaggacaaatagggtggacaaatacttgacacccttgagggtgaattgggtcggacttatatggtaatagtccgcaatcctcttgaagtagggaagcaagagtagcatcacaccttgcttggtatgaacaactgacttagtgcaataaccttcccctgggctagtcgccaactagtcgggggaaggaaggaagcattggacactccctaagtaaccacgattgagaaaattcttcatctttgccatggttaccacggatggtggagagacccaccaatctcctagaacgccttgcctcctcaagggaatggcctcagtgtactcttcaataacatagtcctcaccggcctctaggacctcc

SEQ ID NO: 27593 - DNA, 2757 bp, Cannabis sativa
caatcagacgatggttgttgggtgattggccgaaggttgcatcagacgaaggtttcaatcagacaaaggttgctggatggttggctgaatgttacattagacgaaggttacatcagacgaaagtttcaatcagacgaaggtatttgggtagttggtcaaaggttgcatcagacgaatgtttcaatcagacgaaataactattagcaaaatatttatgtaactactatgaaactttaaaaattagaacaattttccatatacgtaactctatctacatgtctcttcatgatttaatataaataaagtcaccattaaaaatttggaaaacaacgaaaatacaccaggataaacaatattttactatagtatttatgtaatttttttttattttacttgagtttgattgtttgggaactccagtttaattttttgatatatggagttcatggatctaaaaatatcataattaatgctaattgcctcaactaatccataatctaatcatgcggtcattacaatatatttcctcaatattaaaatataaaatacattatgtacaaccgataatgctggtggtaaggctagccaatacgctaccaacccgaccttctcgagtatctgagtatctcgaatggccctataaacctagggcttaacttgcccctcttcctaaagtgctttacacccttcattggtgagacttgtaggaaagtatgttctcccacctaaatctctatgtctttacgcttaggatcaacataacttttttacctgctttatgtagtaagcattcaagccttaatcttttatattgcttcattggtccgttgaactaactcaggacccaaatatttcctttctccagtgttgtcctaataaattggggaacaaaatttcttaccatacaacatctcgtaaacttggagagaaaaccacaatctcgagtccttggaaacaaggcccagtgcccaggttgacctagggttaggcccaacgcccatgttgaccatcaacttgggacattgcgttcaattgctcaaatgccaaatccaatgtgaacgttgaatttgaaatggtcaaaaatgaggtaggagacctcgccctcaagtttagaagccttggaagtatcaaaaacaaaatctgagagctcagagtaagtacccaacgcctaagttgacaaaaggtctggtgtgctaggttctgattatccgaatctgatgtcgttttgaccgtccatctagtttttcacaatgacaataatctatgaagttaaagaaatcaaattcacaactttgcatttttcatttctagctcacccagaaatgtagagtttcgagtctcccatttttgcaaaacagcaacatctttgagaaccggtgaccagcttatagtacatctcttggacggttttacacttatccaatgtgcaggttgacgtcatatgtcaacctgggcgctgggatgtcaatttcggcgttgggtcatgaactattttcagtaaaacaaccataactcactcaattttgatccgattgatgcgattcaacttctgtttggaagctaattcaatgatctatcaactcatatctcacactccagatgtaattctaaagttatcatcatcaaaatttaccctaagatatttttgaaaacaagctacgagtaacctacagtgggacacgtcaggctctgaaaaatgaccatcactaccaagagctaatttttactgttagaacatcatcaaaggagagctcctttagctcatttttcacattcaaaaaatacccataaggtcagagcttctctctagactgtctctctctagagtttagagcttttgacacttagtctattgctataattaccatctcgtaagaaataaaaactcaaagtagacgtagctccattactatcgcgatatagagggtgaactaatataaatttattgtgtctctcgtataaatatttaactacttattcattctcgtcaatctggcgagcgagtgtggcttagaagtctagtccagattataattcaacaaatgttaccttcgatgaatcttccatgctaagtaagataactcagaaggcagatgaaactttgaagcagatggagtaacctccaaaacatgcagggtttacaaatacagtaattgatatagtcgatgataatgaagatgatcactcgtttacagaagaagaattagatgaagaggtttctaccaaagagcatgtacatcaacaagaaacaattgagaaacataggccacaatgactaaacatcaagatgtcggctcgatatagagatacagaatgattaccaacccaattaaaaaatatggtggcctatgcactttcaagtgaaaatgatgatggttttttatcttacagaagcaaccaaaagttctgaggcttacaaggggacagaaaatcatggatgaggatataaaatctcttcataagaatactatacattgagattagaaaatttactagaagataaaatgaaaattgtgtgaaaataggtttatgcaaacaaagaaagatttcttaataatgatggcattcgctaaaaggcaaaatttgtgccaaaggattgttctcaaaaggagagcattggctataataagctatttgctaccattttgaaatatttctccattataatattattggtattggtatcacaactagatttggagcttgtttaacttgatgtgaagattgtgtttctacatagtgatttagaagaaaaaa

SEQ ID NO: 27594 - DNA, 3496 bp, Cannabis sativa
  modified_base (3445)..(3450): a, c, t, g, unknown or other
accaatcaatccatttaagctctattcaactgtgtagttccatacctacacagtcttagaatcatcccacttgaccatcccatttaagctctactgactgtcacacaagaagtggtaaaactttggaagatccatccatcaaaaccactacttcaatccaaaagtttcccctgacagtgcaccaataaatgctcaacctaaagtgtcatttccttaggctcttaaacctgttgggaaaattcttaaaaactgagtagaactccttgagcacttgacagaagtgaagattaatcttcctttactctacatcataaaacaagtgccagcttatgccaaaatcatcaaggacttgtgcactacttagagaaagcaccatatcaagaagacttctttcttaactgaacaagtgagtccggtgatcgaacaaaatatactgccaaaatacaaagatcttggttcttccaccatttcatgctaaattgggactcatgaagtcagccaagctttccttgaccttagcgcgagtgtgaatctcatgccttactctatgtactggcaacttggtcttagagaaatgaagcaaacatctattgtgctacaactttctgactgctccatcaaaaatccttaaggtatcattaaggatgttcttgttcaaattgagaagaccattccttgccactacaaatgcttttatcaattatcataatggtctaataaaaatatcatttggaaatatgacacttgaggtcaacatcttccacatccttgccactgcaaatgctttgatcaattgtcagaatggtctactaaaaatgtcatttggaaatatgaaacttgatgtcaacatcttccacattgggaagcaactctaagaggataatgaatgtcatcaaacattcatgattgacaatcttgtttcaaaggagattcaattggaaagaaattttgttaatcttgataaaatcctttcccactttgaaaatgaaaatcctagttttgtcgagtctgctctcgatgttgatcacttggacacacaaaacagagagaagaaatttttgaagccttactttgaagcgctaccccgtgagaggggaacgctaaaaacttctggtgaagagactcaaaatattcaattgaaccaacttctaggggcttgaacatatttttctcagggatggaaaaacctttctagttatcatcccgtccaaccttcaaccttctcaagaattatagttactcaagctactgaaaaaatacaaacttgcaataggttggatgcttgttgatatcaaaggtattagccctcgaatttgcacccatcgaattaatctaaaagaagagactatcccatgaaggagactgaacctaccaatgaaagaagtggtaaaaaatgtacttaaaattcttgatgcgactatcatttacctggtggctgacagtaaatgggtcagtccagttcaagtagtgcctaaaaaatcgggtgttaccgtggtccaaaataaaaaggggcccttgttcccacaagaactgtgatggattggcgcatgtgcattgattatcgaaaattaaatggtgcctcccataaagatcattttctactcctatttaactattcattgatcaaattcttgagcatgtcactggtcgtcctttctattgctttcttgatggttattcaggttatatcagattgagattgcattagaggaccaagaaaataccactttcacttgtcctattggcacatatgctttttggcgtatgccatttggaatgtgtaatgcaccagccactttccaaagatgcatgatgagcatttttagtgacatgattgaacaaactatggaagttttcatggatgacataactgtctttggaaaatcttttgacgtatgtcttctctatcttgaagccgttttaaaaggatgcattgagaaaagatttgtgcttaattgggaaaagttccatttcatggtatcttcttgcattatcctaggccacattgtttctaaaaaagggattgaagttgataaatctacaataaacctcatctctaaattgcctactcttatgactgtcaaaggcatccgatcattccttagccatgctggtatctataggaggttcgtacaaattttttcaatgatttctcgttcattatgcaacctcctagccaaagatgctacttttgagtggacaccaaagtgtgaggagtccttcaaaacacttgtcaattcactcacttttgctcccattattcagtcacccaatgggactcttcctttcaaaatcatgtgtgatgccagtaatttttctgttggagctcttcttcgaaaacaaatggaggggaaactttttgttatttactatacaatttgaactcttaatagtgctcaaatgaactatcactactaaaagatagttgcttgccattgtcttttctcttaacaaattatgagcttacatgattggatcacctattacaattttcacagatcacttcgcccttaagtatctcatttccaaaaaggatactaaggcacacttaataaggtggatcctcctcttgcaataatgtgacataacaattaaggacaagaaatgtgttgagaatgtagttgcagatcacttgtctcaacttgaattcagtgatcctgctgatggcccaaatattcatgatgatttccatgatgaacaattttttgttgttactaagttaccgttgtgtgcgcacattgttaactacttagtaacaggtgaactcccttctaagtggagttcacaagacaaatgctataacgccctacttcataaggatgtcacgtgtgggattttataaactagattaatactaatatattaattaattattaaaaaattgtgagaatattaaaaacttgactaaaataaatgacttaaagtgaacattataacgacagtaacaaggtgttccgaggatccctattataaaaagatttacccaaaaggttgtagacaatagcaattcaaaacataattcaaatacagtagatacagccagtccaaaacaactcctcgcaactcagtacacaagccggtggggtcaatatgtacattgctagagaaggtagtcacctcatggcaactctaactttttcttacccttacttgcaccgcatagcaccagtgagtcacaaggactcagcaagaaaagcaataataatcatatactttattattcgaatattatcatttatacacaatcagaatcaaaccattacgcattgttcataagatgaaatacaaagcactactggcatctgccatgaataagcatcaatgtacagatgtctggtaatacaaaaccattataccaataataggaaaaatattcatttattatttataccaataataggaataatattcatttaataatataaagagtaaatagcggcataannnnnnaaagttttaagtttgtaagcggtataaacccaatgtttatttttag

SEQ ID NO: 27595 - DNA, 2623 bp, Cannabis sativa
  modified_base (37)..(46): a, c, t, g, unknown or other
ttccctttccttacttaatttattttaattttaattnnnnnnnnnnaaaataaaaaagacaaatatactccttaaaaatctataaacagaaaataattacatgttcttataatgacaactttgtcaaattaaattattttgtttacatattatattattcaaattacctttcctagttatgtaaaccaaataatttgattctatttttctttccggacactttagtaaatatcataataaaatattgtttccgattattttctatttaaaccgatacatttctcccattaattattccggttccaattacagtttagcaaacgcgccattaattcaagttgataattaattactaactaggttaggttcactttttttgactttttaaacttttaaaatggcaacctaatggtgacatgcatacatggacctctatttaagatttatttaaaaaattaaaaactaaactaataaagattcattcctagattctttttaattccgtttttattccttactcaatcatcattccatattcattccttggtacattaaatgcagatctcaaaaatatcaatgtaattaatactttgtaggccatttaattataattttttgaattgataaataaaataatataatactttttttatatttttttaaactattttttttaaaaaaaaaaatcggaattttttttaaaaccttaattatataaaaagttataaaattctaaattttttattaataatatacttctttttatattttaagacttggttgtgagcctaaaaatttcacattttcttaccattttgtatccaagcttaaagactcacccaaaatattatacaagaattatatgtagattattattcaaattcgttgaaactttatcaaataatctcgtccatttaaacaaatgtttattctttgccttctttcttattttatttttttatcttacttttgtagatggaaacaaaaaacaaatggaggattcaaatgaagaataagataaatgatttaaaatacgaattagcatctttgagttatctcaaagaaaaaattaacgcattgaaagcaattatgttagagaatgaacttcaccctatggtcataaaaaaaatgtaaaacaataaatgcatcattaaattattaaatttcatcatcaacattcgctcgtaaggttgtgttgtttgaagatttcaaagttactaagcatctaagattgaaagatagacaagtgttagagtgcatatttttggactcaaatcaaagattagaattagtttttttttatttattcttttatcttttttaaaaaaattgacatcttatctttttatttttgtaatttttttatatgtggatattatagtagtatttggaaacaattatctacaatttttagactttcgataccttggaccagaggcttgggttgaatcatctgtaaaaataaatacttctttaaatgtgataactcaatcaatagtatagaatgaacaatattatgcttttttctaagttgttactatgatttctctattcttgatggaggaagaaaggagaaagagtggtggttgctccaccatttggtatcttccatgtcgattattgattagtatttatttgactttatattattctaatacattcgtaattcttattgtgcataatggtgtcctcaacatatttctaatttttaaatagaaagaatttttaccgttgcgtgacttaccattatatgaagtttggaaggaaatagattactacaacatattcatggaaaatcttaatttttgtaaagaagtaaggttttattgttgagctttttttttaatatactactttatatattgtatttattgtacgtctaaacgttcttgtagatatacgtttcgattttatcgtcaagccactattttcttgctcgagttattatatctctaaagaaggttgaagtgtaggactcacttgttgatgaaaaatctccaatttgatagtctaataagattaaaaaaaaatagtaagtattgtattcattgtatggaaatgagatatttataattttattgcttaatttttttattgtaaataattttacagctgggtaacctagaattgacaatggcgagtcaaactaaaaaagacaatcaacttttagcttcgctagtttttgcatctatcgtgctcagaacgttccaagacaaccaaatttctttgattgtaaagtgtttgttgcattgtttatgatacataggtgtaaacttaataaaatatctttcaaggtagttcatatttttaattaaatattatatttaaatatattttattacatatcatactgacttaatttctttcaacatttaatgaagaatgttgtgaatgaatatgctatggaggggggtttcgaacccttatcagaggaccgcgccaacttgccacccgtgaacatggtggctttcagtgagtctattctcaaggcgagtgtggcctagccactccaccctttcttcgtaaacgttttggattattttggcatagctctccttcagttgatgcccaacgggtagatcatattgacctgcttcttcatagccttcaaggaggctgctgg

SEQ ID NO: 27596 - DNA, 3133 bp, Cannabis sativa
aaaactatacccaaaaaggaaaagaaccttttttatcttctctatgtatatttaacaatctttagattatggattgttgcagtaggaatatggaatttttggttggttttaaattcccccaagtttgtgatggtaaactcttgatataaaggtttaagttagttgatttagttatagttggtttttacagttaatagttctcagcctatttgttctttagttctctgcgtgcaccaccactttaaatattcataatagcttttataatcatattcttagttagaagtggtttttcttattggtttcatacacataaatttcaagtttagttaagggtattttcatggttgtactttttagaataagtatgtctggtttaaagatatttcaacctctgtgttatattcaattttgagtgttgctattaggcatcatgatgcctagcactagcaccactatgaggtggcaccacgatattgaattgtaccagtagcgatatgacacctcatacaagttctaggcaccatgggttgcctttagcatatctctttaatttttggtactttggctctttctatactttaaaatggggatagaggacctgagccattaatgttctcaaatggtgattgaggtggtgatgatttcaatttacttgttgaagttgaaaaaatgttatgtaatagtgtttcagggatataattttctggcttatatagttgtttttatctttcaatgataagagaatttctcatacacatggcttttcattctatgtttttccattgcttctgctcgtcctgcaatgttctgattcaattattgatcaggtgttttgtttggagcaccggagctacatcaaacaccattgtccaaaggctgatagaaacgatgtcactgttgtcatttgtccactctgtgccaaaggtgttcgtctaaatcccgacgaggacgcaaatattacttgggaaacacatgttaacactgattgtgatccatcaaattatgagagggtcacaaagaagaaaatatgtccagtacccagatgcaaggagatcctaacattttcaaacacactcaagtgcagggaatgcttagtagaccattgtttgaagcaccggtttggagctgaccacaaatgtcccggaccaaagaaaccagaatcaagttttggatttatgagtcttctaaataggagtaagaaagaggagcagaaaccaggtagagctccagctacatcttcttcgaaatgggcttccagctttcttaatgctgcatcgagtgtacgagcctctgctgaagcaagtgtgacaaagttgagcaatgaaatcagccaaaaatggcagattgcaaaggatggtgtgggacagaccagtaacagcaatgaccaaatggaggtttgtccgcaatgtggtgcaaagttttcttctgttacaactttggtggatcatgtggagaaagtccacgaaaagggtggtggtaacagattagggggaaagaaagtgacaattgatgcatgccccaagtgcagcaaagggtttcgggatcctgttgcgcttgtagaacatgttgagagggaacatggtggtacttcacgagcgtagatgatgatggtgtcgatactagtttacttaacttctgatgaagttattcttattcttaatcgttccgaggctgtcaaatgcagaagtctctggagcagtgagtaaaatatttgtttctttgaactgtatttaacttcaaaatggccaattgtgcatgttggactaacttgctgaagtcaaatctagctcatgattcgtttaatggttcgagttactgaaggtttcgattggcagatatatttatattgaacctatgtgattcaagaatgggaagaaagattcattcatgccttcatgtttgagtgttttcttcttcttcttcaattatgtgtagtttgaaagagttagtacattacccaagtgtccattttgttctttaattttatactaacttgagtgcattcaataacaagtaatcaatgaacagttgactaagattcttgaattgcatcacaaacagggtctccttaagagaaatgctaaaacgaagctgtagtgtctaacaaccacttatgtattaatattgttattggtttaactaagtattgagtttcatctaatttaatataataacttttaaggagtatcgctagccaattataaggcggtatgtctagaagtgttagacaccactagtttccaatagtaatatatactcaaatcttgataaaataataatagatgcaatttttccaccgaattatgatttttgctcttgatttttttttttttttttgaaaaaaattcctccccactatcaaatcgttgcaattattcttgttatattatgttcattctgttaaataatttgctctgtagtactagtctaattataaattttaaaaacatatatctaacagttgtatagttcaagccaattttgtttttgtgggcaaaataacaatatcacaattcataatgagggatatttgttctaattttttatttggctaattagtgttttctctaaacgtttctggctattaaaacttttctctaaatttaaatttaaagacttttgtccaatttcatttaattttataaatttagtgattattcatgaactaaattatactccataaattttaatatctactaaatcattcaggaaattttttgaaaggaacgatttgatatatgtcaaaatttaacttttttttttttgtgtgtgttttttcaacagctggtgtcataataacacaaagaagttacaccttttcatgcctccaaataaattcaaaatgatgtggcatataatataagataaatgctaagagcaactaagattcataatataaatatcaataaatgttacatattttttctagcaagtttttatttttaattttttataacgttttcttctcaagcttttattattatgttttcttttaataaaatcacaccaaacatacaagtttttatttttattttttaattaaaaaaattcccaagttcttattttttttttaatggaaccccaaaaacagaaaataattttttttagaataagacaaaacaaatttaat

SEQ ID NO: 27597 - DNA, 1654 bp, Cannabis sativa
aaaaaaaaaacaaaaaaacaaaacaaatcttgcatcttttcaaagatttagtaaatttaaaattttcaaaactatatttatttagtgggtataaatttaacttctcgagattcgatttattttttgaaatttctttacttcaacttcatttgcatgtacttttagtttattttatttctgttcattctaacaacaattctataataattagtcattatgagtactttggaggctttctagaatttttgtaaataaatgtaatctctcatccatgtaactaaatttggcctctattagaacaaaaaatattataaaataagcttagacacatctaaaaatcactacatataatccttttttttcttttacatatgatatcatttttttaaaaaaataaaaaaaaaatatcacaaaacattgaattttgattctattatatcaattatattgattattattgatttttctctaagagtatgattgatatcaattgaattatttgtgatttttacttttttgaatataaattattttttagatttttatattatctacgaatttgatatcaaatatattttaaaaaaattttggacaaaaaaatatatttattttgatacaaagaatataatggaaatatgatgtgattcatgatgaatattattattatatttatgcatgtatatatgcataaaataggatgtgataatcacataaagaatgtctagaataaataaactcggtagcaattttctaaaaattataaaaaagacactatgatattcaataattaaattttagagtcattgatatataatttaataaaaatcattttacatacaacaagtcaccaacaagttaccaatttaaactgtgatactcggtaccttaattaataaggtgggtcctaagatttcaaatttgtattttagtataatacacaagtatataatagtcttgctgtatggtatgtgtttttgtgttttctctctaaaagttattctttgtctttttgtatttttttttggtatttgttggagatccttttcggcctgagtgatggcttctagcagcagacctttggaggaagtggaagatagatatgcttgcattgatctcgagggggaggatgagggagtggaaattgatactcttgcttcagaggaggtgctattcgatgatcagtttcgtctagtggggtgtttcttgaacgccagatcagtagattttaaagctatgcgacacacattggcagggttgtggaagcctagaaaaggtttgtttgtcaaagagttgggtcctaatctttatctatttcaattctatcatgaaatagatattatcaatgggagtccgtggaccttcaaccgactcctttttctgtttggaagagtgccgcaaggtggtgatccaaagtctgtttctttgaacaagttggatatgtgggtgcagatacatagattatcatcgggattcatgactgagcgagtggtgaaggaagtgactaaagtaatcggtgaatttgttgagtccgatccgaagaacaatgatggcttatggcgtgacttcttgcgtgttcgagtgagagtcaatatagatcaaccgataaaaaggcgaatgaagcttaagaaggttggggggggggggttggttttgg

SEQ ID NO: 27598 - DNA, 3033 bp, Cannabis sativa
  modified_base (195)..(207): a, c, t, g, unknown or other
tctttgtaattttgatactttattaaatgatttcattctctaggcatggcctcgtggactatgtgtgttcgggagaacactgataccatgtagaaatctcttgtgtcaagttatttaattttctgcaaatatttttatattctgcctgttttgttttgtcactgcaaaacttgtttctgcagtaatagaattacnnnnnnnnnnnnnagacgcatacagttttatattttcatatatataattgacatttacaagaactcgatttttcagttcgttccttgaaccttctcaccctcttttcaattttagaatttaagtaagacttgggttcctcgaaccttctcagcctctttttagttccgtaacaggtgcgaaagaactttttgtcccttgaccttcgctcaacgttcttattattcattacattcatacaaatgcttttgaatattttttttgtacttgaaggctaagtttgcatatgccctatggactagtcaccctcttatttgtttgtatggctaagggtgtatcggccttgtgggctagtcatcctcttactagattataatttttgatcgtgaagcaaccttctcttttttggcatagtactatttttcttagcatctcttaaataacctttctgtctagccaactcaagtcgttgtaggcttacttttcggaggtggcttatgtacctccacgttgttactctctttgactacaagctttacattcttaaagagttttgtttggtcggtagtaattgtttgtgttggtgtcaccaaaacttttaatcattctactatttttgttaccttgtcaatttcaaaaggcaattatagtaaacatgtagagtgcatgggtaaacagtgatgaacaccatatgtaagataaaaatctaacatttcattgataatgatagacgcacaggtaagtacttaggtacactcactactacttaaagtcaacttaagtttcctctttgatttaacaagacatattgaaagacataagataggcttgctattacttcaagaggctaaactatataatatattttgatcagtcatggaaaatgtggtagtttcacttcttaaaatttcttggatgcttggtgtccttgagctgtaggatggaggtgtgttttaagcatatcaatcgaagagttacaaggatatctcctaatagtccttgtagaggtcgaatgagttatcatatgaatccttacccatgtcatctcatatgtctgtattaccttcttccacacagatatacttctctgcacttttgtagaagtcatccagattgttaaactcatccttcatcatgtatcaaagttttctcctggggcgtattcctgtggctatgtccatcttaatttcaccgtttgatgccttctcaatttttgtgatttcagctttgaagcatcaaatgtatcttctcagacattcatgttcaccttgtttcacattggtgatgcttgtgtttggcatgatgtaattgcatacaacctgatttgttggaagaattttttgagaattgatcgtaaaatgtgatctttctgagttcttgccatttaaccacttgtacaaaaccccttttaacatgaccataaagtattggcatctagccttgttagagaattttttcattatcatcagttctttaaaagcatcgagaccatactttgggtcagtagtaccatcatatggtgtcatttgtggctctttgaagttaggtggaagtggttctacttcaatctccctttacaaaggacattcttcatctacttcctcatcatcattcgagtctccttttgtggtgactattattcttcgacgtaggtatagcatctccacttccaactccttcatctttcctttaattgtccctcagaggttagcgggagcaactttgactctgtttgttgttttcataggaggtgcgtaaggtaactttctaattccgcccatctttgatttctcaacatttggggatacgatcttatccttgcttccttgttggaaagaagccataggtgaggtgtcacctaacataaaactttttggacaaagtttcttctcatgtttatggggtaaccccctcagaataacctttagagagaggtctatcttgggttgcctccactgactcataatacaaagcatggagttccctccattaaaatgtgtaatggattctcttctcttgttatttgcttttgcccctgagtatgccactcaaaacctttggcataattgccactgttatctccaaactctaggtcttccaacaaagcttttttatatccccttcatatcgattaattcaggatagttatctcactaagtacatttgcttctctcttgtaggaccattgattaagaggctcaagccttacagagcaggcggtgatgaacaatgtagtggagatggttgttttgatgatcaattagcttcatcgactgggttagtcatagattacatcagcattccatgtgatgttaaaggcctcctctaagcatttgcctagttttcttttcttgtggtcgggagttacccaatctctcattgtttggtcctccaagtgctagatgttttgacctaggtgatgcccgaacgctggttgtacttcattcacgtgcatgacttgtccttgtggttgcatgtccattaatttccttttgatcacttaggaaaattttacaaagtgatgaatacatccttgagaaattcattgtcaagatgctcgcaagccatggccttttctttagattcatgtgagcaaggtatcactgacactaatgacatgtttttcaagagaaagaaccatgtaaagatgtttaaaagtatgtatgctttgagattatttctagatgcttctatgcatgcaagcctttgtaattttgagattcttgaatacatgaaagccttggtgttgttgagattcatgaaatcatgcaagcttgttcatgttgcctagattctagcatgcatgcaagccttcctaaaatgcttgcatggattatttca

SEQ ID NO: 27599 - DNA, 1498 bp, Cannabis sativa
tacagtatatatagcttgcctagaaaataggaaagccaactaacaataactaactaacttcccttaactgctaactgaataaaccgaccattacattaacaaaatatttactaattaatgttatgagcctacttatttatttattttataattgtctttattaacatggttttccactacctaatttgtcaaacttaaggctatagttgagattatcaaacaaacttgttcattgttgccttctgcttgattttgtgtttctactttgttaggtcagctttaattttttccacgaggctaataaaggcaattacgtgagttctagcaccttgatgaaatctatcaaattgtgtagctactcaatttttcgtagcgttttgtctaatttttattttaagtttgttttattatttttttacatagttaaaattggttttataggctttgttatgattttgtatgagttttatgattttttttatacggtagaaactggttttactgggttcaaaattggtttttacacttctattttgttttagatttttttttttgtattatttgttgttttgattatatttgtgagtatttttttgtgtgtgtgcgttttttttttttacatttggttgactaatgaaattagtttcagttaaccatttatgttttgttatgaattttttatagggtctggtttcatagggatttactagtttgaaaatagtttcacaagattcatagattttaagggttttgtaatggagttgctccttttgtgatgttattgtatattttttattattttatttttaggtttgaaattggttttcatacttatattttatttttggatttttgttgtgcattgtgccttgttttaattatatctttgagtttttttttttttttgaataatgatgaaattttattaaatcaaatcattcaaaactaaggatgcataagccataggtaacacatccccagaataattacaatcagcctcaacaagagaagatcgcgcaagagcgtgcacaaccttattagccgatcgctttacaaaattaaaagaaacatcaccaataaccaaacacatagtcatacaatctgaaagtatatggccataaggagaagccatatatttaaacttttgtaaatccctaatgactctcaaacaatccgactccaccacaacatttatccatccattgtctttaatccaactcaaagcctcctttataccaatagcttccaccacatgaggcttcaaaacaccctctttgatcaaactcttggcttgtaagataatcccagccgctgttcttgctaccaaaccgatgccaaaacgccttttattagagaagatcgcaccatcaacattaactttaattataggaaattggggaggggtccaatgctctaaatatacatcacccgaaccattaacttcaagggtaggaacggtattcttacaaataatttgctccctacaaataattttctc

SEQ ID NO: 27600 - DNA, 1563 bp, Cannabis sativa
  modified_base (830)..(830): a, c, t, g, unknown or other
tcgatccttattcatagtgtatatatgtttgattaatttaattccgcattttatacataaatatatatatttcagtttatacataataaatgtctaacagaaaatggatatggttttggtgaatgatgaagaagccttgggtgacatgaacagagtagagaggtttgtaatggttgcattgtggtgtattcaagagaatccattgttgagacccaccatcaaaaaagttattcatatgcttgaaggaatcattcaaatttctattcctcccaacccctcttcatttactaattaatgttaattaattattcaacttttatagtaatgtcgtaacaagcaacatagtgaatagtgaatgttcatacttcattgaattgttctttataaagaatgttgtgcttacgagttataatgatgctcttaggaatattaattagttcaataattccatatctgtaagagtgagctgaaaaacactgcacatgagcttttcttgttattgcacattttgcttaaagaaaacgacaatgttgatgagacaacaatccaaacatatatattacataacaacatataaaacataaaaatttaaaacagacactaatttaagaattaaaacacaacacaattcgaatattacactttatattttaaatattaataattgaataaacagacattgatgattggcagtgacaacgcatcctccaaatcttgatatgatattgtcccactttaattcatatttagtcaatctgcattcatagtaatgccaatacgaaaatgcatgagcaaataagtactcagtacatatctttatatattaaaantgcctatctaacggcaattcttggtttaacagaatatgctttacaaataagtactcatatattcacttctactcattattaagggttgcattttattgataattaaaaattcaattacacaataataaataagagggaaaaaataacattaattgtgtaaaaatagattcaaaatcattcataaaaactatacatttcatagctaaaaaataataacataattagacattacacatgtcaaattatggttgtttatatataatttaatcagtcataaaaaatagatatatatgacatactgtatgaatatcattttttacaaaatataatgaaagtaattataaactaaaaataaagaactaataactaatggataacatcccaaaaggggtgttttagtaaaaatctatatatataatataaaggaaaatataaaataagtttaggtgggatcttagattttttttattctatttttaaaattttgtaaagtttttctattttatttagaaaataactacaaaaatacatgaactaaatatcccacattatttataaatgatgtaggcatcatctatgtagcttataaatattattctttttatgtcatattaattcattcaaaattatttttgtttatggatggttgattaatttcttaccctataaatttttattattttatttttaaaattttaaattttttatctttcatctaatatatatttcatta

SEQ ID NO: 27601 - DNA, 1778 bp, Cannabis sativa
cagaacacactccttatgcccttcggatgcagctatgtgctgatacaagaaaagaaaaatctatgaaatggcctcataaacatccttcagttgacatgattttagtttagcaataaatccaaggcttaactgaaaaaagtgccgaaacttatttaattttacaaaaaccatttggtctattgccttttatggaagttcaaatgagaacattgaaatgaaagcacacacaaacacaatacataccagaggagttcttccattggcatctccaatgtcaggatctagtttggccttaagaagctcatcgagaagagcagcattccccgtactggcgacagtcagcaaattgtcatccatgttagtatcaccctcatcttccccctcagccaataattctccaattttcagatccttcaactttttgtgatgctgcaaataataataagtatgaaaaaacaacacaaaaacatgtcatttttctagttcatttgtgtttcaaagaaattgaaagtaaaagaaaaagagaccactattacctgaaggaagttcttgaggatttgtatgttatcatctttctttgtctgcattgcttcaattagagctgctgtcttaagcctcaagagctgcgatagcgttttggttcgataagtatagccttgaggcctgcagcaaagtgctccaacttctccaaaactatctcctgattgcaaagttccaacaactcgctctttatcagtttcgcagtcaattatttccacttcacctgagacaacaatgtaaacatcatcgggtgcctcattctgcatcataacatcttctcttggtggtatgtattcggctttcatctttgctacctgcagattcattgttaacattgtaattgatttgctaagatcagagggaaaagcaagcaattggaagaagtatcaaagtgaggaaccataccaagagcaaaagtatttcctttgaaacattcttaaaaagataatttcttgcaactgttggcaaaaacaattgctgacatatactcttgcaaatcgatttaggtagctgttcaagcaattgttgctgattcaaactctcagccttgaatctcaaacacatataagccaatatctgatcttttaatcttggaggcaaacgatttcgcgacacaaaatttgatgcagcttcaatactattcctctgtatacacaaacaaaaaccataatgaagaaggaaactaattcattccaaatccttaaacaaaagcaacaaaaaatgagtgtgcaggtagactaagaagaagaaaaagaaacactaacgaattccatagtgcggcgagttccttcaacaaccaaatttgtcatgttgccaatgaggtaagcagtgaggccaagattgaagagcatgtaaaatatgatgaagaccatttccatggtgttgactgcatggagatcaccatatccaacagttgtcatggtggttatggaccagtacaaggccgaaatgtatcgaatccaaaggttagtttctgggaaattcggaatcaaagctccaatccatgtcttcccttggtgaggatacaactctgccagcaaatagtaaaggcatccagcacagtgcactaacaacaatgtcaccttccatacacaaaattatgtaacatttttaatgagaaatccactgtgtaaccattaaatacttctactatttgcttataaaaaatttcacttacagataaaagtctggcacatctgacccaaaaatagctgaacctaatgtccttctcaagcctg

SEQ ID NO: 27602 - DNA, 6049 bp, Cannabis sativa
acatgaaaactacatgtatacataaatgacttctaatcttctattgataacaaataagattagattgaaatgagttttatttaaggcataaaattccaataaaatttagatacaatttaaaacgacaatgacttgatacgaaaataacatatatattaaatacccgtacacataagcaatacaatatcaattttttatttttctcttaaaaagaatatagtatcgaaattatagatacgaataaaattaaggaaaagactcactcatatttatatttatttgattatagggtaatgatatcacaatttattaatattttaagaattttttgttggaactcatattctctatattttatctttccgcctatcatcagtgaactagtcttctactcacacaagtgccttttaattttattttttttttaacaagagttaatactattttaaattttgtatcttgcaaaaattatttattgaattttttttgttaaataataaaataaatatgttttgaactggtacaaatagaactatatattttctaaacttatacaaatatgatcacgagtttaatttttaataattttttatattataactaatttaaaaataatttttaataagaataaatataaaaaatataattaattttattataccacctttaaattaaattattattaataatttttatttgaacaacaaattaatttatattatttaatactcttttaaaaaatataaggtgtagctaataatttgtagagatgagatttattaaaatagtattaaagtttttaaataacgattgccctagaaatttccgagatagagaaatgagcaggagagaataggtgagcaaaaacaaccagaattgtaagtaaagaacagctcataattgttgtctaaatagatttcaaaaaaaaaaatcaataacaaagttggggcccgctatagaggcggtggtggtggtagtgatgtggataaaaccaaaccaaatcacaaaaagacaaaaacatgtcacacaaggactccaattaatacattatctttaaatcatttttttattaattgtttttacgaaataaaacaagtctcagcgaatcctcaattttctttgttatttttcttcttcttttttaaaaaaattaaccatgcataataatgataaaaataattgagatttattaaataaaaataatgataataattgagatattttggttttggttttggtttatttatttatttttatttaagaatagatgagaagaggagagaagacactgtagttgatattttttggaaattcacacaacttggccaaaatcaggaaaccaaatagaatgatagaatattaaggttaagattcagatattctgatatggaagccgatgtctccatttctctatccaattccgaaccctaacttcacactctcacatcacaaaccaattcatcttcttctcttcttctacttttcttttctgtccctttcatccaatctctgagttgttgtaatttgcgttgaaatctttctgttagcgactatgaatttggtcctgttcttctggctcttactcttcactggcttctccttctccctgactcttgccaatgtagtccttcttgggaagaatgtcactctttctttcggggacattgaagccaatttcggtgagttttttactttttatttttgaaattaaaattttttggtttggggttttgtttggttgctgggtttttgtagtgattttttttttctttggttgaattgagctcgcgtaatgcaaatatttgagcaaagcttcaagtttagtgacttcatgtgggtttcatcctttattttgtgtcttttacttaatttctttatgtgtgtacatctaaagctattatgttgataacattagaatacttttgtgaatattcccactggttgttgtttaataagaatatagagttagggatattgaaaaactatattagttgtggattagcaaggcaactggttacctcccattaggtatggggttcgattccttatgggacctacctagaaattttgttagattttaatcctctttgctcacaaagattgcaattttgttagagtttctttcctttgcttgctaagattgcagggttcagcgaaaggataagagaaaacaaagctatattagtgtttgtaagcctgcgtgtttgtgttggtactgcatttgtaatgcctttctgacagatgactattgttgcattcatttcagctcctgcaataagagggtctggggaatgtggaattctgtatttggcacagcctctgaatgcctgctcaccattgagtaataaagttcaatccattaatactagctctccatttgtgctgatcgtgagaggaggttgcagttttgaggataaagttcgatcagctcaaaaagcgggattcaaagctgcaatcatctatgacaatgaagatggcggcatcttagttgcaagtaatgacttttttttaacaacttggataggcttgttgtgctagctacttctatgaaattgcttagtcttataactaatagtgaatgagtgtgagcctgcattttctcatgagtaaatgctgattaaccttttactggtttattaaatgtactgagttatcaatagagttcccgatgggattagacactaactctgttatctgcacatctaaaacatgtataatagtaaccaggtagtatagaatgggatgtgtgtcaatttgctttgttctttatgttcagtaattttcttaggcaaactatttttaattttttttggactcagatgaaagcttcttttttattaaagtaatcactaatgagtaatgatcaaagttctagccaacagccctaggataacaaactttttgagaatgaagtacagaagttacgacaagtcctaccaaacaaaaaacttttcattttcttttttcatgggacatgtccgcactcttgataagggtcttgtttttgttttcctcacttcaaattttgtcctcattctcttgcccattaagactattttggaggtttggatatttttatcctagttataagttggtaacaaacaggtgataaggataatacccttatgccatgtacctaatgatcccttaagagcatttctaatttttatatctatgttgtgtatcattatggactgtggagttgtatgtcaaaggtggtttgtcatcttatccttctcctgggtatttgtgaatttttcagtggccgggaattcagctggtataaaggttcatgccgtctttgtatccaaagcttctggtgagaaactaaagagatatgctggacatactgatatggagttgtggctaatcccaagttttgagaattcagcatggtcaattatggcaatatccttcatttccctgctagcaatgtctgctgtgctggctacctgtttctttgttcgcaggcatcgaatacgacgagaacgacctcgagcttctcgggtccgagaatttcatgggatgagcagtcggttggtgaaagcaatgccaagtttgatatttactgctgtttcagaagataattgcacttcagcaacatgtgccatttgtctcgaagactacagtgttggagagaagctgaggattctgccatgtcgtcacagtaagtttatctgcaacttattacatacttgcttactcaattgaagttcttgtagtatttcttagtcggtttctagtaatttatagtcattttctagtaatttattacatttgtcattgctgttatttttattacccatcattgctattatttaaccttttctgacacttgagttgtgacaagttttcttgtagatgataggttttaaagttttcttgtcattgctgttgggtgtgaaaaactgtcatcgcttgcttttttttttttaaaagttttatttatttattattattattttaatccgaatgtctttgctttatatgtcataatgtttttgttttttgtgctaagaacgggttaaccgtgttccttagagcacccacatcagatgctttaaaatagagattttttaaattatttaaagaactaaactaaaaacaagctacatcagatgctctaaattttttctctattttaaagcttctttaaaattcaccattcatgctttacatctatagaatacaatttattgttctgaacatattttattaattgttttgagtttacatttttattttcatatggtaaatatgtgtaaatattaatattatatatttgaaataaaaaaaatatattaaaatttgaaaaaaaaataagagttttggtgatgtattttgaataaactgttttatggtgtaatgtacaaatttgaagtaaaacagaaaaaatgggattttggatatgtattttgaaggatagaatagggaggctgatgggagtacaatgtttgtttttttttttccaaaaagaaaatatttttgtttgtttgttaaaaggtggcagaatactcaaaacagaatatttttattacaggtagagttgtgaaactattaaaaggtggtcatcacctgtagaataatagtttgcagctccatctttgttttgatgcattgtagttattctggtttgctatcctcttataatgggtgtaaaacacgtgcatgcccttatactctatgtaatttgatatagagaactaaccatcgttaaaactgcgtacgtactatgttagcttcttcatagaacctactcgtgctcaaatagtttctcttaatctgtagttgctattgcgtttttaatgtttaggagcttgggtataagtagaactgtgatagtaaatcctcgtgtttcccaaagattattctatatgcttgtctaaatattgttttttttctattaagtctaaataatctaaatattgttattttgactcttcagaatttcatgcgttttgtgtggattcctggcttacatcctggaggactttttgcccagtttgcaaacgtgatgcaagaactagcacaggcaatccaccagcctcagaatctacaccactactttcttccagccaagtttctttagcttcctcatccatgctatcatcaatgagatcatctttggcatcctcgtctgccatacaaattggcccatcaatgtcacgctccccttctctttctcgctcaattgcaagtacttcctattttcaacagtctcttaggtcctaccgccaatccccctccttgggtgtaagcagaagctccatggatctccagaatgcatcttcccaaagatctcatgcttatttgatctctggccattccttgggttacccttctttatcaccccttaactcaagatacttgtctacacatattccaagccctagcaatgcctcacctccctttgtgagctcttctacttatcagcagaatccgttgcattgcagcgattctgctgcaagtttctctcctttcacgtctgcacactccctacctgattgttgaatcaaactatcctgtgataaactattgggcatggttgagtcggtaaaaataagtgagtgtgaacgtttgcgaatttgtccaggaaagacaccgacagaaaggaaaagaaggcagttaccaagtcacctgtgctccatactccccctcatattcatatggttgggttacatctaattcagtggctggtttatggtgaatcgagggaaaggtttcttcttgccgagactcgcgtgtacattagaacttttagtgtgacattggtatttaattctggtttacaagaaatagttgtgtttctttcgacgattgtatatcagaaacatagggaagaaaatatcgaatgtaacttgatgcattggttttgttaatatttatgttacaattgttgatgttaaaaattgcgtgttaaacagaggtatatctgtaacagaagcaattttgagacaattatccgtgattttcgcatggcaatttcaaactgatttcactgttatatgatgcagctccactccatgggatgatttagttcgttaggggc

SEQ ID NO: 27603 - DNA, 1596 bp, Cannabis sativa
ttatgttttcttgtaatgttttgaattcactcatagatgatggaatggtggtaccaatctgctgaggagagaatgtcagctccaactgtataccccccacctccacctcctcctaccccacaggtaaaatattcttggctcttctatttctttcacatcttataagcaataacttaacaaattactgcgataaaacaggtagcaaaagagggtcttccgctaccatcagacagaacactttgtcctctgtgttctcagaaacgagcaaatccatcggtagttacagtttcagggtttgtcttttgctatgcctgcatatttaagtatgtttctcaggtgagtcccaaaatgcttgaacttaatctggtacattgttgcttctgcgatgttagtctgataaatctatacacaattcccacttaattattattttcatttctttgggtaaccaatgtcacagtacaagcgctgcccagtcacattattgcctgctactgtggaccaaataaggaggctgtttcatgatatgtagaagaatattgtgtggtttttctaggaacaaaatctaggagggctttattcacaagccaacattattgccaaataaagaggttggagcaatgtttttttttttttttttgactgaagaggttggagcagtgttaaaccacaatagcgtgtaaaattccctttcactgctcggatctcctgaaatgtaatttagttatactattattttcaatgcaaataatatcttacctcagaaaaataatgagagttgttacttcataaattatacaaatattattttataattagttaacagtttttacattatttattaaattaaaatatgagagatattagaatacaccaataattgcatatttgatattaaaatacattaaggatctaccatttttaggtgtttgacacccctctatttctcaatatatgtagatttctgaaaagttctctttgacttcatttaacgacttgatagacttcgttatcaaaaagaatatataataggggaatttataattttatgtatattatgtgaagaaatatattcttgatttttatttacaaattatatatagtaaaaatagataataaacttataatttgtatttaaattttaataaatatattatatcaacatatcattacacactttgttaaaaataaaaaaaaaatatatcattacaaatattattataataaatatattagattattataggtcacgtttaattataattttatttatttttttaaacacattttttaataactaataaacataagtgtgtttttagttttatgatcataaattcataatattttagtttgaaggtttctgcaatccatcgatcgcttaagtcttatattcatttcttatttattcttccaccattttgcctaattccgtaataattggtgatttcgcacgagtattggagagagaaaatatcgcgtattggctgggacgttgagaagcttctgtacggtttagtcgaccggcgtcgccgatcaatggcgaccagtcgtctaagagtggtttcaacaacagtcgtcttcagttgtctgtga

SEQ ID NO: 27604 - DNA, 2287 bp, Cannabis sativa
gattcgtagtctacctttctgtccacgtgtaatgtcgtgcaccaaaatcctgttaggccaagttctggccggccatgcatctacaggatgcaggctggctggccttgtgctgtatagaagctggctggccatagggccggcaaggggtgttcggcaagcttccttgaagtggctggtctgtcactcgtcatcccgtttgagtaccgagactccctgttggttgaagtgatgagtagatgacttggccttctttttggtgagatgttctatcacgtggcactgatatcagcctagtagacatgccacgtcaagtgggcaaaaattaagataataaataccattgaggatatctagaatgtaccaattatgggagaagactgatgatttgatttggggaaaggataatttaaggaatttttatagtcaaaattgcttatcatctacctacttcctttatagatattccatcttcttcctttattagaggtactaagccttttttcactaagctttgtgttgacactaaaaattgtcaacaccagcttgctagtttagcgagatgaacaatgagtttaagtaaataatatagagagacacatagaatttaaagtagttcattctccatgtcacgatggtaatggagctacgtctacttttatttctcacgagaattataagataattgactaaggaaagagcttagatttctagagagagaaagtagagagagatgctctgaacttataggaacttagaagaatatgaaaaatgagctagaggagctctccttttatagggaaggaggtcctattaaaatattaataaaataatacaaaaatatgaaaaattcaatttaggcggatcttgtccattgatgatgacctaatggtgaaaattaaccgttaatgcaaattcatccatttttagagtttgaatctcgtccttggattatttttaagcaatttgtggaagaaatttcacttgtcttgggcacaaattttggacttaaaatctttaaaattgcaataaatgaattgaaagagcttcgattgagctttaaaacacaaattgaatcgcatcaatcggattaatattgagagagttatggtcgttttactgaaggttgctcatcacccaatccccaagttgacaacccagcacccagattgacatccaacacccaagttaacatcttggtgtcaatctggatgctgggtaagtggaaaaacgtcctagaattgtattttttgatgcctaagggatacgttgatatcacttagccatttggttaattttggtgaagttgttcacatgttctcggatatttggtttatggtgaaatcgcgtagactcaaagctccctgattttgtagatattccaccttgttgaaagggcaaaatatcaaagtgtgaattttatctgtcacaagttgtagcccttgtttactatgaaaaaatattcagatggttcagacagaatcagattcagataagcagaacccaacgcactaggccacatgttaacctgggagttgggtgcttctcgggtgacttcctgaggcttgttttgattctaaggcattcgagattgtgaaagaggtctcctaccttgtgtttgaccaaaataagaagaatgatcaaagaatttacattagatgagtagaaaaatgcgaactaggttgcatgtcaacttaggcgtatgacctagtgcccatgtctacttgggcgttgggtccctattttttctcctaaaggatatcatgtgctccccaagatcacttgtatctttgttatttctaaaaactaaaaagatgccttgaaaacgttttgggaaaaatgactagaaatagcctaagttaacaaaacgtcagcctgggcactaggcccaacacaagtgtcaacttgggcactaggtttagctctttgcccctagatggttctatttgattctcagaaacactcgtatcttaattatttgtgaaaatagagaatatgtctagaagacttgtcgaaaaactaattggaagtagcctaggctgacaaaatcccaattctggctcctagatgactccgtttgttccccaaaacacacaaattttaattatcgatgaaatgaagaatatgcctggaagatttcttctaaactgatgttggaaatggcccgggtcgatatagtgtcaacttgggcattgggtccctatttcggcctccaagttgatccgtttctttctcaaaagcacttgattatttttttagtggagaagaataaaatgttgggttttatgcc

SEQ ID NO: 27605 - DNA, 4116 bp, Cannabis sativa
  modified_base (959)..(971): a, c, t, g, unknown or other
  modified_base (1158)..(1164): a, c, t, g, unknown or other
  modified_base (2353)..(2353): a, c, t, g, unknown or other
tacttttcttgctgagtccttgtgactcacgggtgctatatagtgtaggtaagggcaaggaaaacttagagctgccatgagatgactgtcttctctaacaatgtacatattgactccaccggcttgtgtgccgagttgccaggagttgttttgactgtatctgttgtgtattttggtttttatgtttttgaggcatcgtcatatatagttcttttgtaaaacattttacaacagggatccccagaacacgctttttatgctattataatattcgttttcaatcttttgtttcaatcaagtttttaataattaattaatctatgagtattaaattagtttataaaatcacacatgtggcgtccttatggaatatggcgttacactcagggtggtaatggtaagaatggcttcaacaatggcaagagggagaataatggtaatggtgttaacaataacaacgatagtaagtggccaaagaatacccccgagccagccaaacaggatccaactgcaaggttcattacctacaacatcctccttgacatgagagaaaacatcaacaatacaactcattcagtggtgccatatcgtaagccttatcccatgagaaaggatattatcaaatgatacatgaacaagttttgccgattgcacaaagattatggtcatgacactgacaagtgcaccaatctgaatgaggaaatagagttcctcatcagataaaataacccccatttgaggagatatgtacgtcgttcccacagacggcgccgtcttggggtgtaaataaaatttctcataaaatattagggaaattttatttacactacaaaaaattttatagacaccccattttaataatttttattttatataaatttatatctttaattgtattaagtttttttaattttttttcttcgaatttatagtcctaaaaaaatatacctatcaaatannnnnnnnnnnnnttttaaatattatgacaaaaaataaataaataaaaaattatatcaaattttcttagaaaaaaaaataaaatatatatacatgagttagacaaaaattatgaaaatgaaatcaaaataagtattaaaattaacataaaataatgtgaagaaaaaattaaaaaaatatattaagagtaatttttaaaannnnnnnaagtttatattttttttaataatggtgtgtatttatcattttatggggtgcaaatagaactcccctaaatattaactattagtgccacatcataatttatacagtcaattttaaccatttctaacagaaggagatagttactagaaatgttgtaatttagggagtattaataacaagtattatattatagggggcacaatttagtagtgtaaaaaatttaggggacaaaaatactaaagcatgtttggtattgttttctgctttttattttcaaaaaagtatttttagaaatgagaacaaaagatagtttttgaagttttcacaacacaagtcgcgtttggttaatgttttctaaaaacaatattgaccaaaagtgaattgttttttaaaacagaaaacgatattttgttgttttcaaaattcttattttttgtaattttgttttctaaaaactgttttaaaaaaaatgccaaacaagcctaattgttctcaaaaaataattttctatttttaaaaacaaaaaataattttttagttatgatgtcaaacatgaactaatcaatctaatcctaatgtattaacaatagagtaatctattttttttttctaatgtggatttttttaagtttatcaagcttcataattattgttttcatttaattattacaacaataacaataataacaatcagttacatagagttggtattgaaataggtaaagtggctttgctttttctttctcgtgaagttctctctccaaccctggttctggtttagtcttggggtttcccctgggttttgctctctttgctctgtgttttgttccttactctcccctcttcttgtttttgttttttttccatctctgtgctaatgattacacttccactcttaaaagtccaaggcctctttacattaattgctctcacttacttgcatttattatctatagcggatgaaccttcttatttattatgtttgcaggtttcttttggtggaaatagcacccagcttgcccaaatagtcgattcaactgtcgttttggatgttctgatgcccccgagaataatcattcctactcctactctccccagcctacactggatgtgcactgtgccgatagccctagatcctttccacaatccgatgaggcaacttaactccaggtatttctctctctctctctcnctctctctctctctctctcacagttatatctccagttcttactcattatccggtctctattggtctataaaaggcatgaaatcttctttaatctactcacctacctactttttccttccccctgtaattgtgcttcttacccaaaaatgtcaacttccaaccaaacccagcaaaatactttgtctctcactgaagaggaaagttagatccatgattttgatcatgtttccataaacactagaaatcactctgagtccttctgccttgtggtcaaaattctctcaccaaaaaccttgaaagtggcatggattgaaacagctatgaaggatgcctagacactacggttccccattaccttctctgaatatcactctgacctgtttcttgtcacttttggttgtgagtgggaccatcgccgtgtcttggaagaacaaccttggaatttcgacaagtccctcatgatttttgtgaatcctgaaggttttgacaccatcacccctctctaactgcgttatgtcccgttttggatccaagcccataatataccttttcgggaaaaaactccacaacttgcccaattcatatcggatgaactcggtgatttggttgaaatctaccctctgtccttgcttgaaagctttggcccctacctcagacttcgtgttcttctagacattacaaaaccattgaggcatgggattaatgtctgtttctgtggaatctttgttacaaaatggctcagtttcaagtatgatgggttacataacttttgttattactgtggtcttcttgaccatagctataaaaaatgtggtaaataccttcaaaaatgtgatgagtgcattgttcctcccatcttaggttataaagacagcttaagaacccctgctagaaactcttttaaaaagaacccttttgatatctccaactcggtcccccttgacgaaattcttggccaggataatagctctgagcaaggccttcagcaagctgttcaccagtttctcaacatctgccccctaatatgaatccccgatccctcaatttttccccgactctgccccaaactacccaaccccaagcctcaccatttggatagggtataagtgacacttatagggccctgtcaaccatgtctccctcccctgttgttgtcagttcggtcatcactcacaatactcaagggaagagctcttccactcgggacaaaggaaagggtattgcctatggtaatgctccttttaattgttcggctacttcacgaagccatttcaaaggaatttctatcgccggtcctgcacaaatagcccctgctcccactgcaggaagaaagcgctcctattcccgacaaaacgttcctgttggtggattagttcgtagtatgctgaagcgagcgagagctgcccaggatgattttgttgttgtccctatcatggaacctcctgaagaataggtgggtgttgctaggcaaccccgcctagaaaaatgagtctcatcagctggaatgcccgagggttagggagacctcgtgcatttcgaaacttgtccctccttttgaagcagcaccaacccattctctgttttgttatggaaacaaaaattcaacctggtgaaggtgacaatcttaggattagattggcttttgagaatgtctttgaagttcctagagttggtttagggggaggtcttttgttattatggaataatgttatcactgtttgttaggttttatgccctaaataaaactccatttcaatataatc

SEQ ID NO: 27606 - DNA, 2734 bp, Cannabis sativa
tggaggcttgaagcggggacgttacagctacctgcttttcctggagagctaccgacttctcattgcaatccttctccagttcctttttcagcttggagttattagcactcagatttgtcacctcttatttgcggagaccaagtagttgacccacaccctcatactgatcctggacctccctcagactggtcgatgtcaagtccgaattatccagcacctttgtaagatcacctctgtactgaggtgaaatcttaatcgggtcctttgaacacaaaactcatgggagactcaatatttataaatctgatcaaagttggtggttgtaagattcttgggaacaataaagtaataaaagtagaaaaaagaatgtacataaatggtgtttaagttctgaggtcttggtgtcgacaaagtatggtggactcaaggagaaagatgaagcaagggatatggtgttcttagcagctaccaagtaaccaagccagtcatacgccccttttaccctaacctattactctctttatataggccttagggtctgtttaatgatcccctacatgtcagggtatctcattaacaaatcctatatttcctcttacataatgaataaacaattacaaatagataaaaatccctttatttctagactaaaatctcataaacattgggaaaatagttattttcggctaaagatgcaccaatttaaagtacagtgacaagggatgtcacctctcggcttgaaattcatgatattaatgagaagtattgaaaaaatgtgttttgggttgccactgttcccatatgatgccacagggactgtggtagtgtcctctaacaccccacccttagttacactactttattcccgagtaaagtataccagtctgccttgtgagccaattttggactcgataaattcagaattgagttataattatagacacacttagatctatcttgaaaatatatttccaatgcaagttgaaccaggtaattcgaataaatatttagagagttatgcctgttttacggaaggatagtttgtgttattttgttctagttgcgagcactaacatggccaaatgacagctcttggccatgcttctgggacccttggggagtgttttgaatttttttatggcaagtcatattttgggggtctcgggatcctaaaacctcatttgacgtccaaaatcctaacaggagaccactaccaccagttgggactgaaaagtggtagtggttggccatggcttatgggaagccatgaatggtgtttcttgcttatttcattcatatgtattctagaaaaccactttggtcaccttggttataggctaattgcttaggagagcactgccaccatttttaccaaaaaagtgacagtggtcgcattaggggtctgtggagccttgagtgacttttctcacttgtatttgatacatggattttggaaatacaatttttccaatgaaaatcctcctcctgtgtggtggctgaccactgccaccattcgtcccaaaagcgtagtagtggtcggccaagtggtttccacaccacttggtggcttttctcacttggttttgattttttttttttttttttgaatagcacttggttttaatatattattggtgaaaatgtacttttggcaaaaaatcctatcctccttccttatggccgaccactgccactcattgtgccacacagatggcagtggtcggctaggcttgttccttggtgagaaatagtttctttcacttgtattgcactcttgggtgtttagggaacaaatttagacaatttccccttagttctttgtaggaggcaaccactgccatctccttgtggcagtgctctccaaaaattaaagagcattgccatctccatatggcattgggtgcataggctctattgcatgggagtcttaagtaattttgactttatgcacaagtctaagcattttcatgcctaaatgagtcaagtccttgttggttttcttggtgaattgaggtttctaggatgaaaacgctcgtgcgggcccatgaaccctagtttgggcacacatgggtgtgtgagtcattgcaccaaatagttttttaacatttttaagtccccagaggtgtcatggggccctcaagaaggatgtattaactcatttgacatttataagtcttggtgaaagtcacaaggttaactttttttgattttttgaaaatcaggtataacatttgctcccaaaagtgtttgtcaaaaactttcgagaaagacttttgttattgtaccctcttgtcttgaaaataataattacgtctccttccgcttatttcgtcgtctcttggagtaccaaactgcgtacctgagtcaattatgtcttctagtaacttttctcaaaatttgtgaaatttaaatttaactatgtgaaaagaaatttaatttgtctaaggatgacaaatttttatttttccacacaatttaatgtgtatatcacaaatctttaactacacaagtgacaagtatcaaaaggagaggagtgtcatttttatttcaagtgatgaagagcatgtgttaattgtgccaagggtatttttgaaaatccttggccaattaaggtgcacggccacaatggcctctcttttcctttaaataaggaaaatttacatatatactgtttttggaccaaaactttacaaaaatactgggacacggaaaaaacaacttttttactgcccca

SEQ ID NO: 27607 - DNA, 2358 bp, Cannabis sativa
  modified_base (819)..(823): a, c, t, g, unknown or other
atttctttcaaaccaacatacaagaccatgactatctaatcttaatccttatcctaatcctaatcaaccactaatctagtgccaaaaaatcgataacgttgactttctcaaatatatgatttatctgaataataagatttcaggcaacattgcaaccatggtagatttctagcaataccatctttcacttgcttttcatcatcattcgttgccacttcgagcaatgcattttgcttccttgtcagtacatggatggcgggttgatcgccaaaaagtttattctatcataagttaaaaataatacaatacagtcaattgaagataacaatggtaatgcaaatgacatttatgcaaaatagtaattggaaaaatcaaaatcatttcgctaagttttatttttcaactagaataatatttttgcaaaaataaaaagagccaaagaaagtataaaggcgacaacagtaatggttcaattgttaggggtggcaaaatgggttttttgcgggtcgggtcgggaccgtgacctagaatatctgggttgctatctaggtctttgccccggccttgcccaacaaaaccacaggtatgactatcaggattttagacacaagcacaacaaaaccataacatatcaaatcaaataaacatgaacaaaaacttacatagtctttcccatacaaataagcatgaattcgatcagttgcatttttttaaggttaggcgaacactgtaaattccattaaaggagaaatctttagcctgccatggatacattgctacgacccgtacaacacataagaacctagctgtaacctgtcnnnnntgagattaaacaagcataaattagttaagattgataatttgatacaacaaaaatgcatttgacaaagccaatgaagtttcatttgaacaaaagaaaacgactaagattgatacgtaaatttgataaccttaacaaatttttagtttagttgatgataaaacctccgatcagtggacctatgtttgacgtgtgaaaccatattattcttaaaatgtcctagaattatgttgataactctagaatatcctagaattagatttatttggatggttaatgagaataaattcggaatagaaagacggtacaagaagaagtatacatatgagtaatcgaatagaataacaaaatatgatacctctggatatgtaagaacatccattaaagtaacaatcggtaaatctttgtacttcacctctgcacgacgataaaacacataaacacaccatcacttcacttgaagataattttcaaatgatgaacggtataaattaactatacatacaaattaacaaacttgtaatttataggagaagtccatggaaagctccagtatggattttgcccgaatttcaaactttcctctcattgtataacctaaaataattattatacaaaacttaattaatgaaactgtgtggaacaatcaaataagacatgtcataagtaacagtcttagtaaaagcatgtaacctttggcgctctaatacgagacggtccttgtcatgagtatatctaaactttgttgaaggtgtaaatgaacaacgccagaatcctccatttacatcacaatatacattgataaacttcatccacttcccaatgtgtagcaagtggaggccatgcttcttggtaccttggtcaaacaccaccctcaagacagtttagagggtaggaaaagtacctaagatatctcttgacaaatataattgttcgggttgtaggggaagaggattgttcttttcatcttctagtttgggattttactatttagttgcgtcattaatgattaatgacataagtgaaactataagactaagcaattcatctaatctaagacacacactaaaccactgaagctagcctcaaatggcattggtaaccaataaacaataatttgatatcattttcaaggaaacacccttcataacattcattcagatatactcaaatcgaaatacttaggcacatttcgataattgagtttgtgtactctatagaaatttcttgaagatgagaatatattgtactatcttttctgtaaattttgctagaattttcttctcttttattttttgctcgtctcatttgcttctccctttatataaactcatttttacaatgttctcaaagagtggagaaaaaattggggatacatcattaattaataatacatatttttttcttctcttttttcttcttaacgagtccttctcttttttttttattaccattatatttttatatataataaatgaagaaaaataacaattcaacatacacatgataatacagctaactatgacccgaatttaaga

SEQ ID NO: 27608 - DNA, 1367 bp, Cannabis sativa
atgaaactagcaatacgtggctcggcacgtacattcacctagtatatagaaaaatgttcataacttaacaagaaaagcttataaaaaggatttgtggtcccaatacgcctatagtagaactgattgcctattttttttttcttttataaatcaaatatttatttgttaataaaatatctaattttgtagtcataagcatacttaaatgattttacactttttctcacaaacaaagatgaagtctatccccctcctccaatgtcaaaataaaataaaataaaatgctcaattttaattttctgtccaacgccctcaaaccacttgggctggccgttttaacccgaaaaaaatttgactgaaatatgtttctttttgtaaaatatagagtttaagttattattttacaaaaataatattccccctctatataattatatataattattaataaattaatgttctataatttggtatcatttgggcatggagtagtaactctaatctctatataaatgttcacaaaaacgtagctagctaagatattaattagttgaagaggtcatatcaaattatcaatatatcatggcaaactctagctttgttattacttcactctttatactttcaagtataagcagccttgtgattcaaactaaagcttaccgccattatcctcagcctgatgcgagagcaagcttatttatttttggtgattcgctttttgatgctggaaataataactacatcaaaactataggccaggccaattattatccttacggtgaaactttcttcaagtatccaagtggtagattttgtaatggtagactcatctcagattttattggtaagataataaagtcaaatgttagatattagtagtgttttatgttgtaaaatcttcatatagattaatttactaatagtagctaaatttattatacgcagctgaatatgctaagttacctttcattcaaccatacttgtaccctggaaacaatgattatagaaatggagcgaactttgcctcagcaggatctggtgctttgtttgagactggaagaggaatacttgtataaatacttttttttttttttttttttgagacaaatatagcatatgaaataattattaacaacaatatgataatggtttttaatgtcaggtgatagatcttaatactcaacttgaatatttcaagaatgttagcaatgagctgaggaagcaaataggggatgcagatgcaaaagccttgctttcaagagctgtttatatcttcagtgttgggagcaacgattattcattcccttttcttagaaacgtcaccgttccaaacacccaacagtttgtggggatggtcataggca

SEQ ID NO: 27609 - DNA, 2995 bp, Cannabis sativa
  modified_base (1905)..(1907): a, c, t, g, unknown or other
aaagaccaaaattagtgcttcaatgtcgacagcttttctttcatcttttcaagctttaataataaataattaaagaaaaatcatgtaataattaactgtagccacccgtggattgtgactcgtacggctgaaaattaataaaaaataacaaaaatgaaaaaatgtctctcaccaaatgatatatatgtatataaatatataatatgaaaattattcagtaagcaatggggacactcacacacctaagctatatatgacttcgatatatatctggagtgcaatatgccatgaatatgtggtcccttccttccaacttccataaatatgatttaattaacattgttttaattattataataattttgtgcatgtggaacagggatatgtttgattgattgatgtggttatatatggtttgtttgggtgtaacaaatcatgaatcataaacattattggttggtttaatctatatataattaattataatgaacattaattataagcctccactaggctaggcaattatttaaattcgatctttaattaggttgatattacatcttcataattgggaataaaacagtactgcttttatatataatatgtatttattaatcaaatggctaattaaaaagtactcagtataaagatatagaagaatcgatctttattaattacggtagcatacaacatgactaaagtattttaaaataaaaaccacctggggatgattgtatatatagttagtatacttattacataattaaataatattttcctttatatatatgaacgttgttaattataattaactaaatatatatataggacagaaatgagacgatataagtgggtcttgaataaatagtagatacaaacataagcatctaaattcacatggccatgaaggaaactgttcatcgaaaacatatatatatattatttatatatgactacgactatacatatctatgtatataaataatgtagaaacagggaaacaataattataattataagggcggagttgtcattaataaagcaatattaagacatgttgaataggaatttgatgctcacccaacgccatgtgcacgtgattgcatgcttggttaggttttggtttggttttagattctaatgatctcattattattttggttaattaatggacggtgaatgatcaaacccactcgcgcgcatatcgtgacattaaaataataatgctctggttgattgggccagctcatctttaatctatctccacttcatttttcttattttccggataagtacagtacctccacttcatttacggaatataatctttatattatagataaaaaataaaattatatataaatatgagtattgctattaggtactaatggtgcttagtattttctcgacatgtcacgttatgattggttaatgatattctctaaaagctattatattaaattatgtgggactttaatagcaatactcataagaggatgttaatactgctaccctttaatttccatactttttttaatttccatactttttctaatttccgatagtatatatcttattgactttcatattgatagctctactctccttcatattgatacaaaattaatgagagactataaatcaacaaaaatattaataagagtatgagtactttttattttattttatttttttgggggggaaaaattaaaaataccttatttaagtgcataaatatttttcatccaaaagtggttggtataattaaaataaagactaatttgtagcataaatacataaatttagtttttaaaactctataggtatctaaccattaaatattaattaagtccttatgcatgtgttatttttttattggtatatttaaattatttttttttaaannnataaaaatttaataacttggatcaattagagattgacacgtggtaatttatttaacacttaaccgccaagtacctacacaagtttcagaattataactattattaccaccaaaaattaaatttaaatatttatttacaattaaaaattaaatttaagtatttatacagtaaattacctttaaataaaacaaatattattaaagcaaactgaatggagaaagatataaatatatattcatgccatcattgtttttattcgtggatatttttaagttatatctatctgaaatgcgcatgacattattgttattgaccatatttacaactatcgccacaaaaatcttttgtgtggtaggttagggttcactgtagaaactagaaagtaaatggttctcatgtaattaatgtgcatgttataagagccacattatgtcttctccatttgagcttgagagaagaactaggttgatttttgtcctttaattttttcatatcagaaaatgaacaaaatcacttgctttaattaactttttttctatcctaattaatataatgcttttagctgtaataaaataaaatcttcaatattataataatgtaatataatataatataataaaaaatgatcatttttgcaaattatgccgaacacccacttgatgacgtatattaagtggtaaaatataattgatttaaaaataattaagtagaatctatcctctcactttaaagataatattttagcttcttctgctgtcacaaaccaatagctagcctccctggccgaaaattagttaaactatacgtactcaaaagaaaatgtaaattagaaagaaaaaaaaatctaaaagaaaggcatttgtttgttgacatatatatatatatatacgtatatttatatataggtgggagcagtggaatattttaaaatatgatgacagagtattaattttaatttatttggttgtttaggtataacagatatgaatctggttcttgaagttattttaccgaattaaattcctgaatatttatttatttattgaaggaaaggtcaagaataatgctaaggggcacccggccggtgc

SEQ ID NO: 27610 - DNA, 4726 bp, Cannabis sativa
acttctttacatctgataacctttctacattgtttccaataagtagaatgtcatcaatataaagaactaggaataccactacattaccttgaaagtatttgtatacacaggctttgtcttcatttttcttaaagccatactctttaatagtcatattaaaggtgatattccaagatctagaggcttgcttcaatacataaatagatttaagaaactagcacaccttttgatctttccctggtaacacatatccttttggttgttacatataaatgacttcatatttccatttagtaaagcagtattgacgtccatttgccatatctcataatcatatgtgacagctatggaagaagaatgtgaatgtatttaagaattgccataagagagaaattttctcatagtttatgccttctcactgtgtgtagcctttggccacaagcctagctttaaaggtctctaccttcccttcagtatttttcttcttcttgaaaatccacttaccccttatagatgtaatatccttaggtggagtttcacactcccacacttttttggtgcgcatggaatctatttttgaatccatggcattgttccacttatctgaatcagggtcttccattgcttctttgtatgtcaatggatcatccttgtctgtgtcagagacaagaacatgtgcttcatgtttatagcagacaagttatctcacaatcctcctactatgacgatgtacttgggtttccttttcaagaactgtgataactgttgtttgtcgatacccacatatctcaatataatctccgtaattaataaattacgctttatgatcattcaatgaacccttattaattaccttaagtaagatcataatcttacttcattatcaaaataattacagctttaataaaatatgtctatttaaatatcatttatttttcgggatattacaggtaagctggtaacgaacaagtcaaaaaactcgtgcaatacatttaagctaaagtttaactatctcaatattaagttcaaataatatatcatcaattaagtgatattgacttagaaaagatataatggtaagtttatgatattttttccattgttaatatcggtccaatctgatatatagttgatacatctgattctggtttactttactaattccttagagaagacatttcactcacccaagtgtaagtaaaccttatcgtggattatcacgttagtataaatctagtgcactgataaatcgtgaggattaataatttgaagcatctaatcacaattactttcaactgcgatgatatcactataattgtgagtaactatatgttcacaatttaataaaacttatatattaaaaatataatcatctaacaaacatgtgaataaagcatatgattaggtcatggtatgatttatgatctttattgaaagtaaataagattacaatgaaattgagttttatttagggcataaaaccccaacaaactctcacttgcactaatataaaactaaaagtgaattttagtttaatctcgtatacttgatgccttgatcaaatgtagtatttggcataaactatgtaatacgatctgatagttttattcagtatcaatcgctttgaccatcatattttctttagtcccgtagtgcatgaatttatgtattcctcatctatatgttttactcttcttagggtgcaggattctttactggttggaaattgcatctgtgtcataacgaagtcacactaagcaattattccatgcttggaattgtgccaaagtctgtatcaaacattctcgagtatgaataatttcgtaattgcttttagggcatccttattattcaaccttgctggtaaaaatagtgattccacataggcttttacacttctccagaagtactgctccacccccagagtaatcaccatctcatatatatgacttctagcattgacgcaagtctagaaatatgagttagtgtagccttagggttttattcgaccacccttacaaactaacatatggtttctcttcttgtatttcaaatgttcctttctgaaaggacttaatactactcaaagctcccattcaacagtaaatatctggtctaatttcatacaagagtattcataagacctcttactattgatgcttaggaaattcttttctttgcctttatcttttctagagtagttagaaactcctcataagataaataaactccatatatggaagtcatgtgacctctattagagttagcctttaaaaagccttgtagcaccttactagtgtaagctacttgcattagagcaaatcatttgttttacatgtcttgacaatttctcaaacattgtttccaatgactaagataccatctatgtaaattttcaaacatatcacaagtactagtgtcttacaagccatacttaggagagctccttgaagccctcccactacgataaggtaatgtgactttctattaagaaacataagtggtattatcctcttcagttgtcacaacttgcattggttcaacagaggcgggggatcatctttacaattgtagaagttggcgtaacacttttagagtaaaatctccacttctttgctactttggttatagtgtagtccacctctaattacttgagattagccaagaaacatgcaaatctcaattagcagttttagctttctttaaggacacgatcggggcatccctagatataattatggtatacaataaaatcttataaagatttttgctgtgagagttttgtcacatatgattacgaaattaagaatggtattgaaaactattaaagatatatgtcatggcaataaattaaccaggctgtattttagcaataacatgagctctacaaggtcgcacattgactttgagttaattgttagtaaaataaatttaagagtaataaggtgtctaaaaaatataataaggacaaactccataatttgtgttatctaaatcattaaggattaaggatttttaggagcttgttgctcatacatgattgcggtattatttaagatcatgctagcttagtgggagtttgtatttaagatcatcactatctatggattaaggtacggttttgctatttgagttattctctttgaatcaacaaatgtattcttcaaatctaattttatacgcttataataatatgtaatatatttatctatgatttaaattttcttattgcatattttatgagtgaaaaagaattctaacaagagatactccttaaaagttattacaagacttgatacttaattacactaatagcaatattgatgcgtaggagggtgctagacactactagtgccttttattatttctctattaaaagataagaccgaggcctttcttacttcttcaataattataaagatattttagttttggtattaatcatatcttcttatatttatctaagtataaagccattatggtcaaaagataaaccaagtgaaataaaagttgttaattgaagagttaataccattttagactttttattttgcaaaagttaccgattggatcttatgttttattaaatgacaaaatggatcttgtacttgacctcaattttcgataatttttttattaaaatataaccaacttgaagataatttctagcacgaatagatatataaaatgtaactagttatgttataatacctctatatcgagttattattaagttttattgtacaagaaaaaataatgcaaggtcatctataatactattttacaaaatacaacgcccattttataatttaacaaaataaaaaagctaattaattacttttataaagcataaaaaccaaaataatattaatccttaattaaatcaatcaaataattttcaatgagacaataaaattgtacactcatatacatgaagcttacgtaataacgaactcatgatattttttttgagtaatttgcggttaaactctccgaactttcaattcacttgcaattaaccctttaaactcaaatttttgtggtaaaatcctccaaactattgaactgtaagtaaatttaaagtgacatctattaatcacagttaagtgacaacatagactgtttatgtgtacactcttatacacgtggtacgtttatattggtacacataatattaaaaattacaaaaattattttaaaattataaaataatttaaaattataaaataaataaataaattatttttcttttcttttcttttcttttattatttcttcttgatgacttttcctctccctatacttaactctttcttttcctttctcaaaactaagcttagatctgagcttccatctcttctggcaccgatgattaatggcggatcggggactcacatctcatcgacaaacaaagctacgagcatgatcctgtgatctgcaccctctctctattttctcctgatgccaacagacaaggcacacgcatgatgagcatcaccggagcccaactctcggtatcgttgtggtcctattctcattctagttttgtgcctctctcacttgggaagtttagaagaaaggtctattgtgcactgtttctgcagtgatttactgcagttagagggtcgaaatgttgcttattaggaaaatagggcttgatctatacagtgtacaataagggttcatttggagcgctgtattaggttgtattgtattgtattgtatt

SEQ ID NO: 27611 - DNA, 3056 bp, Cannabis sativa
  modified_base (1239)..(1248): a, c, t, g, unknown or other
tttacattttttgtatatgttcgtttaagaattgtcttcaagtttgttatattaaaaaaacaaagttgtcgaaaattaagcctaaggtcctatttttaccattttagaaaatagaaggtccattttgtcatttaacaaagcacagggtccaaaatggtatttacctttaatttttgtggatacttaaatatataatattttagtatacattaaaatttagtataatattatataaaaatatgataaaaagatcaatataatataatataatatgacataacaaacaagccttttattatttatagaatttaatttaaattttacaatagggtttttgtagcaaagctaagagcatctccaatggagatgcaaataagtgatgcaaatacaaaatatatttactccaatagtgtgctaaattatgatgcaaaaatttcaaataattaaaagtgatcaaaatttgcatcacaatatagcatgatgcaaaatttgcattaaaatacatgctatgcttttatatttatcattatactatttttaatattttattattgaattttagctaatatactcttttgcattaaattacttgcattattattattattattttattattaaattttaaatttaactttgcattattattagttttttatattgtttaattaattattaagtgagcattaaataacatattaaattttacatcaagatttacaattatgcattggagcacaatagtaaaaattaatgtaaaaatatcacaaatactttttgtacaaaatataactcaacttttacatatctcagtgtttaacttgggatcgaagattgaaaaagattcggtgcccaatctaatttacgtgttaatctaattgggtgacttttttttttcttccttatttattaaaaaagaaaatttaacaattgctccaaaatatacattattattatattaatgtaatgtatatatattattttgataaattattataagggcggacccacatacgagtgggcactcgccctttaaaaaaataaacaaaaatatatatgtaatttagttaagggtttttttatttctatacttgaaaacaatttttcttgcatttttacagaattctacatagaaattcttattgcaactagcactgcaacttaaattacaacaaaaaattgtatcaaacccttattgtaactgcaaccattttagaaacccaaactgtaaatttaaannnnnnnnnnaaagttaaaaaaacagtatatggaatatttttccttatagaagttcaaatcttaatttagacatttttatatgtaatttttaaaattttattttttggaaaagtagttttaggatttgaactcgtacttatatttagtgctttaatcatttaaactaacaattttattcttaatttttttacttttgagtataaaaatactattaattttaatatattatattaggtacaaaattaaattgcatccctcctacatactaaaaaaaagtttgctccctccctccaacacttattattattatttgtaactagttaaaagtcagaaaaggaaaataagtgaaagtgacagagttctaatacaaatgtatataatttacaaaaaattagtccttttcggaagcagcttcgtggaaagctggtgccgtggatttcaaccatagaatgagtgtttgaaaacaagttcactatattttttaataattccatttggttatgtgattttaataatgcatttggtctcttttcttagtatatattaaactttatcatctcacacttaatcttcttaattattaactattattaaggctaattggaagcatattcgcttctatgttaatctcaacttgttgtatattcaattagtgcttataaatttggatttattaaccttctttttgtctatggcatctctcaatagtatctttatatattctcttcacacttaaaacttcattcatttaataattctactatttctctttctctttttgcttcaatccaagtacttattatagtgacataacacaactaactaataatttgtattaaatctttacacgtgatattccaagtaagattggttattttaaaagtacatattactatgtaaaaatttagtacattgtgttattgttttctttgtgattgtgttatttatttaaaacaactctaaaattaaacaaaataaaaatgtaattattgagctttcaagccatgacaaatgatcaaggttgaaatataagtgatgaatttaaggtaaatagggtcatttgtttaatcaaaaggtttaggtatgagaacaaacccaaccaatgattacatgccacatgttaatcaacaacatcataaaaaaaaaatcatggttaatttacaaaatgattcattgctatttgctaatgtcactgtccagaacttttcattgatgtgagctcttttaattttgtttaatgaatacacctcaaatttcacatccttaacttcaacaagaaacatttagtcaaacctctggcttggtcttctcttcttttctctttggacctcttcatccattttcatggtttctcttactaaatttataccttaaatcacactttcttcctctgaggaaacacaaactattttttactcatattcttgtagatttaagtattcaaaataaattcataccaacccttttagcagcacagaaagatttgattctatggggaggaacactgaagaggaagttcctgaacaagtagaatccaaggtgagtgactatacatatatatataatcattccaagaccatgttcttactatggtattaattatatgtgtcatattatgattcttaatgttggttttgggaaaaaattaggccatgaagcaaggtcataaaaagtctctttttgcttcaattcacaaaccatcaacagaagatagtaggccaagaagcatggttattaaggtaaaacaaacttcttttcttctttcttattagtttgttaagctcttgaatatagctctgtatctgatcagaattttg

SEQ ID NO: 27612 - DNA, 2010 bp, Cannabis sativa
attgttagttatgaccaaaatactaatctgtgaatgaaattatttggcagtaagtcgtggccacgacgaggaggtgatttctggaaaaattctatttttttattttttttttaagtgagatatttttaaggattataaatatgacttttagggtacgaattttagtgcttttgaactaaaaaattgaaagagaaactcagagagaaagcaataagaagacgaagattgtgacatcgattattctatgtcattgttctttttcttctcctcaaactcttactatttattatgattttcattataatttttagttttgagtagttagttaagagttattttaaaacccgagatataaatttttaatttcattgatgaatgctaatttctagttcctaggttctctttgatgttcaatggctctttatatagattttttgaatccaagagagggttgaggcaaggggatccgatgtcttcgcttctttttgtcctaggcatggaatacctctctcacattatgtagaaaattgggaagaggcaagactttatgtttcatgagagatttggtgacatgaagctaaatcatttgagttttgcggatgatgtactactcttttgcaatggagatttcaaaatcatctacctcatgctccaaggactcaaactattttcacaaacttcgggtttatttcctaacccatctaaaactaccttctattgtaataatatgagtgactatgaggtccaaagagttcttgatgcttcgggattcaagaaacatgatttacctttcaagtacttaggagttccaatatgtcgtaagagaatctcagtagcagaatgtggtattctagttggaaaaatggtggcaagaataataagttggagtacccgaaacttgtcttttgttgggagaggggggctcatcaactcagtgttgatggccattcactcctactggtgtcaagttatacttttgccaaaaaagattgtgttggaaatagaatctatttgtcgtagtttcttgtggaatggaaatcatgtacttacacgttcaatagcagttgcttggagcacaatttactttactaaatcttcaggaggtttgggctttcgaagcatttcaaatttgaatatggctgctatgttcaagtatgtttggactattgctaaaaaggaggacaatttatggatgaaatgggtgcacaatgtgtatataaaaggaggggaattggagatcttataagaccgctccaacagccagctggtattggtgcaagatggtagctataaaggacagtgcaaaagagttgtttgacttgaatcaagcttcaaatgacggctacaaagtggttgttggctttcatgctctttggccttccactagcaaagtggatttgagttctatagtttggagtcgactaaacttgcctaaacatagttttatgttttggcttaccatgctgttatacccgaaattcggctggaggacacgtgttaagataaagggaatgtgaatcggtacaagatctttttatggaataactcattaattgcgtaagtactagagtatatttgcaacccgctgactgtaaggtcttacgcgaggaatcaatgtacgaattggtacttagtgtattaacaagaaaccgtatatcgctaaaggagaatagcgaggcactggagaagagtgacacataccttagcttactatgagcaaattaagtgtcaaagtcggacggttcggagtacatgaatgcgagatgaccatctcgctacgaggaaacttcgtatagtttcatccaactaacggaagagagactcataaccctggaaactctgaagatttccatacacccgcaatcgacgtaaaacatatcatgtcgacctcggaaagaataatggttttagctcgccattgggatcaacacaatcaagtttctatcgagacatctccagattcaacaattaaagacgtgtttaatacacgatatttttgacccagtaaaa

SEQ ID NO: 27613 - DNA, 1194 bp, Cannabis sativa
tgatataggttgtattattagggtcaaaaattgaaatttccctatggtaatgagttatattaaaaaaacttgtattattttatgaatgtgtatatatatatgtaaatgcctaaaaacaagccttctctttttacgaactccttctaattaaaatctcctttgtttctagggctcaaattctgaataatcatcaattttcatgaactccttctaattaaaacaagccttctctttaaaatttgtgaaattagaaaattgccaaaaaatctcgtcattaaggcttcaccgcggcgaaggaattgcccgtcgcgacggttggagcattctcaacttggaaaactttttgccaagtcttgtcacggcgaagcttttttcccgtcgcggcgaagcttttccccatcgcggcgaatgattttgcccgtcacgacgggctttggcagaaaagaactttgtacatttttttcaactttttcatctcttgttctctactcttgtgaatacttcctttaaacattcggggatgtaaaaataaaagaatcaagcataaaatagccctaaaactaaaaacaaaagtcgaaaactacccaaaaataagacccaaaacttagactaaaattaccctaacaggaagtttttgggttaatatttgcccccaattcaatttttcacttgtgtggagttgacttgatgtcgtaaaccgagcctgtttttattaaaactaccagatggacatcaattttgacatacttaggcatttgtatctattcttcaagtattcccaattgcattaggactttgaacactttttcttagtccttaggaatttagaaaaataattaacaaagaaaaagaggaaaaacttatcttttcttcacttatcaaaacctttttttttaaaatttgtaattttcttatttttttcatggcattaaatagactgaatcctaattctattagtaaatgaattttgaaattagataaaagatttttagtcttttgcttatcatttatcttttttttttttttttacctctctaatttttctttaatcttaatagcttgaggaattgttgttaccttttaaatttggactctttgttaggattttatgccctaaataaaacttatttcaatataatcttatttgttatcaataaaagattagaagtcatgtttacatgtagttttcatgtt

SEQ ID NO: 27614 - DNA, 3070 bp, Cannabis sativa
acaaacaatgccattgcattatcgaatttacctgcagtacaaagagcatcaatgagaacattataagtaacaacatcaggtttgcatccctctttatccattctcttcaacacatcataagcctcatcgattttcccagccattccaagaactctaatacatatagtaaaagtataaatatctggcttcaatcccaacccttccatctctttaaacaaactcattacagtttgagtatccttttgttttccaaatgccaccatcaaagccgaataaaccttcaaccccggcttcattccttccataaccattctgttataaacctccaaagcctccctaaaaaaccctgactgaagaagaaaacatatcaacccattatatgaagaagcattcaatacaaacccagccattctcatcttctcaagcgccacgggtgcttgtcgaattcctccccttatgtaaagaccttgaaaaatagctaaataagtgttcaaatttcttttaacctttttcttctgcatcaaatcaaaaacaacagccatatcctccactctattatgagtcaccaagatttgaagcatgtaattacaagctttagtagtaagaacaacactagaagcaacaaccataaaatgaagaaaagcagaatttggatccttattggtagacttaagaaccctcataacctcttgtgaagatttcacaactctcttcttcttctccttaaccccttcatttgggattttcatagcaaacccacataataaactcatttgttttctcctaattttcaacctatctcccaaactatgatttgaagtagctatcataacattcttcttctccattgggattgtcataacaaacccacataaacccatttgttttctcaagtacccatttgtggaaaccttcaaattattcttaaagtttcttcctttaaatgaaaaactatcatgataatgactacattgacttgaagaagtagctactaaaagtacagtgtctgtaaaagcagaacaagtatagctgaaactactactacaatacatgctcaaagaagaagaacaaactcttaacagagaacaatacaaatcgaacaaataacagaaagatagcaatttgcagaaactaaagaaaagttttcttctttgcaccgttactgtttgttaaaatgcttctgagacaccaaaatataacatattataacaaaaatggcatcacttacagtaaaggtgaaccacaaaggttggtagtggtctctctctttcgatggaattgtgagccacttgttttggatatctctttctctctcttatccaaagtttttattttgtctgaaaaatgtaaaatggccgctaaagggagtgtttgtgcttgttatgtgcttttctcaaagatcataaatctttattttaagggataaatttatggtcggtttaatcggtttatagtacattttattaacccaatataaattagtaatccgtccaataaattaatcggtttggtaacgttaacccgctcaaactgaacactaatatttttttttttaatattcaattgttatatttcatttgtgttactttgtacataaaaagaaagggaggaaaaaaaattatcccatttactattttttaatttttttttcaaatttaccgtttgagttgctccggtagttacttcggtagtttcaatgtaaattgctatgtgaattttaattatgaattaatttgttatgtataaagaaaaattttgaagacattttcaagctccattcttttatttgtttttctcctttttgtgtatttttactgtagagttgagaattgagattaagaaaggggagaaaatgatactaatgaaatagtaaagaatttttatgttgctgattttgtttcatagataatacagaaagagttggcttgtattcttctcctctacgattttggcaagattatttatacatacataaatttaaataaaacttaaacattgctggtataaattaaatacattatataaagagaaagaggccctcaaaagctttctcttttaatcttttttttaacaatcatttgcttcatttctatattgtttaacagtacaacaagactccttaattttcaaggttttggtatcaaaaaccgaaaaatctttgcgaaaacatcctttcgggaaagaggaacatatgaacattttaaggccttcaatcgattcgaagaataagcaaatggattctcattctcaacaactgtacagcaaaatcgtgtttactcgccaaccgccatcaaaggcaatcccctgagaaacaaacagaaaaacgaaaatgggagcagaaaacacaagaaaatgcctaaaaaaattgtgggggaaggtgtggaaacatatgtgcataccgagcaattttagcggtctaataagatttttaagtactgtttagcttaccagccaccatgtcttgagaaataatcattgtctaatgatatagcaagagcaactgccactgctctctccgataaactcagcggacggaacacttctaaatcttgaatctgcagccaaaagaccaattatgaataacagtaggaaaacgaaatattcgttggtaatgggaataacctaccacttcagcagcagctccatgattggagcttggatcggtacttccaaagcgaatcacgtattgaccagcatcggtaaaaagctgtgttttttatgacaatatacataattagacaggtagttgttcactttctcgatttgtactaaagatagaaaattgaaagtgagagacacaacctcaaggccgaaacctctccagtcgcgatctatctcagccagcacatttccatcgatatctttcaaagtaaaagtccaattccagaagccggggttttcaaccactgcaaattgctggttcctgcataatttttttatgagaattaagtaaggcactatttttgattaagtaggcttcagattcgagtatctcgaaaagataaaaagggaattacccgaggtacaaatcataaatccgcctccatagatgccatcgtcgatgaaccac

SEQ ID NO: 27615 - DNA, 2410 bp, Cannabis sativa
aaagtaagattttttgtagtggtctttcggatcattttatattttgcaaaagtatttaagtcaatatccatttgattataaggagtgttaagagatttttgttagaaaattaatgtaaaacacgaagcatacatagatcgtgatgaagtgtgaaattaatcaaacatatatgtatttatgaccaaaagatcaaaatacctctaggtattgattttttttttagcttcaatcacacactagctttggatctgtaaaagaaaagaaaactgattagtgtgggcaatcaggcttccaatctctctatactctctttagttttactttgcccgcagccgaatattgattgaattcatcccaagacatagtattaacatctcgagtttgtcccacaatgtcccaccaaacgtgggcatgctcttggaacataaatgtagcacaattaacccgtgcagttcctattactcccatattgtctagaatgcgaataacaatgctcatccactattctgccttgatgatgtcagtacctcccaagaacgtcagaggttgtagcttaacaaaatgctcgaagatcgagtcacgatatggcaatataaatccagggttacccaccactagaataggggctagtggtaacacttgctcagctagagctgcctgagttggttgcccaaactgacgcaactcatcttcctaacagggtataatggttcgcttcaagaaacatctactgccagtcggcaggtggattagcattgttaaccttcgcgttattccctgaattttatggaggcacaagcaatgtcagtggattagtttggttattatcaggctctatagggtcgattttctctcaaatagcccaaaaatcaacaaccccgacgagtcagacacctaatccccatacttacacttattgccttaaccctaactcatacatattcatataattaataatcatgcttttcttatagcatcatatcttctacatgctcatatgctgcctataatcgaaaagtagtaaatatttaatcacagaagcagttaagcatttactcgcaatacttactgcagcacgagtcgagcttgtctttggcgatgattgtacatgttcaaccagactacaggaagtttaaaaatcttggtgctctcataccaaattgtaatgtcctatcaaaaggaacgtcacacactacgactaaacatacactaatcccgctaatccgggatatactagagccaagagcaaaaattaaactttaaaatacaaaataaacataccatataagaatatagtgcataaatacaatataccgtaaaattacgattctcacccttcttatgtcaaaattacgaaaatgcccccgacacacaaatggggtcttaaaatgcaataaatcacaataattctacatattaaatcatataataatataatttctcatttatacttaattaacttagtttagagttgcttttttttttgaataaagagttactaatttgatttttaaactttaaggtattacactaacacacgagacaaacccatgattctttacgatctggtgtcagaggcatgccacatcggattgaacccgaagagttaacctcgtgacaccccttggactactcgtttgagatacccatggggcatccgtttatgccttcccaaatgcttgataatttggatgtgttaaccttttggattcgtcggtccaactttgcccataatcgaatattgattgaatctagacctcccgtctgaatttgttcttgggcggggtcgttgttctttttgggctttgtggatgggtctgtaagttaatttgggacactagagcatacatgtcacttgttcagaaatacgaatagttgcatgtgcaacaaaaggggcatgttttcaacatattattatcgatgaggggataatttggtcacacaaaaagttcaaaaaagagaaatacacataaattatagattaacgggaggaaaaaaacttatttaatgtagcacatttactaaattataattagaatcggagtaattaatggaagaaatgaatcaatataaaatattcagaaataatattttattatattatttactaaattggccgaaaaagaaattataatcattttattttgcttacatgaataaaaaagataatcgagaatgatttaatttgactattttttatttatagattgtttaatagtatatttgtctaatatttttaattaatataaactaagtaagttaaggaaagcgaaaagtattcctaatcaaaatcaagggataacattttttttatatttttttcttaatttgtgttgaccctactaattatttctcccattctaaaatttagtaaacaaactaataagaatcataccatctccaatgcata

SEQ ID NO: 27616 - DNA, 2275 bp, Cannabis sativa
agaaatcggttatgaatgcaaaagaatcttaccataaaagaaaaaatattttgtcaactaacttgccaaaaaaagactttacaaattattatttctatttttttaaagaaaataagaaagaagtggaagctacacgatgattatcttaattattcttgttaacaagataagcatacatgggacggtcgtggagcttatataatattatccaactacagtgttcattaattatatatagttaattctacaacttcaatatagctttctatttgtggttatgtcacgtttttttacccataaacattaatgtttactacttataaataacattaaaattttcaaaaaaaataaaaaataaaaaacattattacatatatcagaacaagtaagataatctcgctagttcaattatattttttttaggttttttttttatttttatattttaaaatattttttttttacttttacaaaaataattagcaacctaaattttaaattaaaaaaaaaaaatagtatatagatattttttttttctgcaattcgctatttcaaattcattatacgtatatcacatatagttggcttacaaaattgacttgatcataagctaatcatttgcctatactttatattaattgatttaattcatttttttttcgtcaactaacaaattaaccctaaaaataaaaagtaaagtatgatattattattattttgtctagaaagttacccttttgtactgtagaaagattgaaaggcggttggttgtggttgctgtccagtatatctttgataattactacagtattagcttaatcatgagtcatttactttctcgttttggaccattgaatatatacataatacatatgcatatatatatatggtctataatttgttttgatcaccattattgttaatagcgttcagtcaaagaaagtgattttttccttaaaaacatttcatgtgatatacatatcaataaaaagattcgtctcttggtctcatgatcatcttatgtatagttaatattcgtatattaaaattttctaattacgtatacttataaccccaaaaaaaaaatattaaaccagaaaaataaaagtaatactaggaaatatatcttttggaccaaattaaaactgtgtatcaaattgagttaattgttcttaattagaaaaaattaataaaaatatattgcagtactaaaatggcatatcaatagttaccaacaatatttgctattgctaatgatagctatggaaaaaaaatagttctctcaaccactaattaggatatttaaaggatatagaagaaactctaaacatatacttccttttatatgtatttattttaatcgattaataatgtatatcatgacgaaggtaccacttactaacagttaattataaattaattaatgtactcataataatatgcaaaagagcgaaaatgaacaacatataataagttatctaaatggcaaataataaagtatagtcataaaaccaaagaaaataatataaaagtggaataaagttatatattatattgcataactaggctctctctaatccacgattccatagtctatggaaagtgacaatttttcaagtttttggaaggagttggtgataatatattttaattttttggaggtttagaaagttgctgaaaattaatttaattctcttaattaatagtttatttataaagttgtagtagtcggtagaaatttcggctaaattgcaattatgagtacattaaagggtccccacaccaaatgaactataaaccctagctaattcatacattaacattgaaaatgacatgaattagtcttataatttataaatgtttgttctttcgacaaggacctgtcgatagctcgctacaaacattttataaatataattatttatcaaagagaatatagtgtaaaataagaatacatattaaataaattatatcatcataataatgttgtaaccaaaatttaatattggaatgaaaaatgttgatatatgcatatgtgactactggcattcgagcctagctcttcacggccacaacgtcaagttctcaggaataaaggaataaattgaattttttttttatatccattaattaaaaatatatttatattattttttttattaagatatacccactttttgagtgggttgcctaatataccttcactctatacttagcatataatttgcattaacataagcggtctaataagatgttgggccggcccaagcccaat

SEQ ID NO: 27617 - DNA, 1542 bp, Cannabis sativa
ggcaatagctcgcttcttccatggtttagaaaaaggtttgggggttgctcaattacaggaacatttttgagcttatggacagaatcatgagcttaatgtacatggtaagcttctttcatttcttatttcctcttttttttttatatataattcatgggaaattctaacctttgtctttttcctcaaaacttaggcttcactaatggctcataagagcttttctctgcatatccaacactcttctcgcattaatcatcttcttcaagagcattaggaccagaaaatacccttgctatcgagtgagactttactgtagaaaagatcacccttattgaaaaggagaatcttgacttgaagacttccaaagatcaactgatcctcgattttgagaaaaagactacgaaaaattgttgagctagagaaatctttaaaagataaggattgtgagaagatgaaagctgttgaagaagctaaaagaaaagagaatgaagttgctcacttgtgccgttataaaatttggtagaagaacaagaacatgaacacttcatccttagagccctatgtcgatgaaagtattaaattgtttaagtaaatagaagttgataaaaaggctaagcgagccgagaagtctgctgaagaggttgaagtcgagggagctgaggaggctacaaaagaaaatgaaattgatgttcctttacctaaatctcctagaaatgagatttagttagatttttttttaatagtaagtggcttcgagcaaagatagtttatttaactttattttttgtaatgattctttttcaagttggatggccagctggtttattgtataatttgtgctatcttaatgtgcgtacttccttcaatttttgtgaaaaaaatgatccaagtttgaatgatcataaaataattatgaaccattatctataggtaagcttaattgaatgattgcataacattttctttaaattctatctcgagattcattaatcgttaatccatataaagagtgaagttaaatgttttaaacaacaaattctttgattatttttaacaattttgatcaattatgtgtgaggtagttaattgtctattcgtgttttagcttatatatttttaatcaaaactcattatagagtttcgtttataatatctgctaagtatgcgagctattattaatttaggttgcattggcttgtttgcaagattattttcataatcttgtttttttacagcaagtgtatattatcatttttgcttaaagaagatttaaatattcaattttttactattttgaaccagttataatcgaatgctttatctttacaaaaattttactttttagaattttcaagccttttctagacatttatattattatataacctgagacccggctccaaacccagacctgtagttggtgttgggtcaagtttgttgaaatatattatctttacacaatctattaatacatatcaatacgaaaaatagtcttgtattaaataatattaatacgaaattaaaatagatataaaattataa

SEQ ID NO: 27618 - DNA, 2743 bp, Cannabis sativa
  modified_base (761)..(761): a, c, t, g, unknown or other
aattaattactatattagtaaccaactagtttcttttttaaaaataggaaaaaaaacatatatattctttccaatcttaaaatattcaaattgaaaaatagattacatgatattgttttagaattataatcgaataacgatataacctaaattatttttttttaaaaaaaactacaaccatattttatcttatatttttataggaaaatgaaagatagatacaccacatgatgtcactttattacatattaataagtgatctcttctcagtaatacaatataatctattacgtacgtacacacaatatagtttcctgtaaaatttataatcttttaatataaagttacaaaaaatcatttcttctaaatttaattatcatcaataagattgctattttcttattcaatgaaattacataaaaaaaaaaatagctcaaagttgataattgtattcaataatttaatacttttcattattagaattaatatttaacgaaacacgtgtccaaaattttacacgtgaccaaaaatacatatatacttatacaaagttattgttacgtgcatttcacgtatacttatagttatatttttgttatgtgtattttcaaattttataaattaaaagaaaatcaattattaattttttatttttctaaaatatttaaaattttaaaaatttcaaaaaaataaatataaaatttaaaaatattaaaattaaatatactcctaatattaaaaataataatattacaaataanatattaatatttatatatatttcaattaatttaaaataaataatattaatatttattaacaaatattttttttaattttaaaatatattatgttaaaccaacaaaaataattaattaaataacaactttttatatataaaaatacataatacttacatattatgtatacacatatatacaaatacaatagtatgtcatctttttttttaatttgaatagtatttatatgggttaattataattaattaatgtcatctagagctagaaaggacgaagaaagtatgataaataaagggcaagacaaattcaaaagcggttggtcattaaattctcaagtgtaataataatgatatatatgaaacctaattgccttgtgcaaaagatggtttaatgtatatttaaatataatccaactccaaggtacattgcatgaagaactataattgtcacaattaattagtagtaatatataatgaacattgctattaggcacagtgatacttagcaccttctcgatatgtcacgttgcgattggctagcgatactttctaaaaactattatattaaactatgtgggacccgatacttagttagaccaataacgatactaacacataacaagatgcttagcactactagtcgccattaacatttctcatatctaatccacatactctaacaatttatttaatgtggctataattaataattaaagttgttcgattatatattttatataactactactacttgttaacacaagacaaggttgaatcattacataatatataaacatatatctaccacacacttccaaaaagaaaaaaataagtttgactacaagtctacaagatgactttaggaaagccttcatcaacttaccaattttattttaatttgttgttattaattagtattagtgttgaaataatttatatttatattaaattaaaatatataaaagtaattaaaataaaattagactattaataacaataattctcactataatttagcttagatagattctcacaactctcacagtatgacttctaatatcaaaccatcttatgtttttatggggtgtgaagcaaagttttaaataaataataaaatttaaataagttttcaaacaagtttttttaagacgttatgaagtatgaactaacattaaaataaatattcttaaagaaaaaagaggtttggaagcttctcccactaataattatactacaaacgaataagttcctacaaagttaaataaatttattaaaaataattataatttttatttattaaaacaaatatgacttttttagttacaataaaaaaaaaaattatttgtgactaaacatattatttaaatacaagttgtcactaatttagttttagttacaacaagtattgtaactaaaaacacattcagtcacaacaaattgtgatttttatggttaatacttttacctataaatttttttagtcacaattttttttttaatagtttagtcacaaattttattgtaactaaaaatatttttttttataataaataaatcttttttataacaattaagcccatacatatcttttatcacacaaatatgcattttccacttgtcccttcctaactttattttttccatgtgttaaaaactaataaataactctagaaataatatgtaatcataatgtatataactatgtaaagagtcaacacatgtatagaacaagttgataacctatactatactacattatttttatttggtccactctatacacacaaaagagagttgaaatacacattaagtggccctcttttgtctgctcatatgactttctaacaaaattaatttaacatattcaaaatccataggccaataggtgtagttgactaatgcatattctttccattattatttatttcacattattacatatttaaattctatagataatttatacttggcatgcttatatat

SEQ ID NO: 27619 - DNA, 4388 bp, Cannabis sativa
tccgcactttgcggattggattggattggctcgtgcggattgaattggatcggctattttatgaacacccctagttttgagtgattatcgatttgtattatgttagagtatattgattgcttgagttagttagaaatcggttataagttggttggttgttattgtccagctatctgttcttaactaacttgtaacagtctcattgtaacggtttccgttattcttgatctaagtgtaagcttgtatataagtcatgattaatggctttgttattcaatgaatcaattcattctcattgttcatctttctcttcatctttcttctttctttcttctctcttttctttcctatttctggtttgttttcttttggttcaataatatcgagaaggtctaatacaaaataacatatatatatcctctcggcagaattcttactaaaccttcaacgcaccaaaagcaatgtaatagttagagtactcataacaatttttttttttaaaattgagaaactttgaaaaatttaaataaccgtactaaaaacacacgctattacaaatgctctaaacttatttttcattttaaaatttctttaaaatttactaagtatgttctacatttataaaaactatcactactctaaatatatttaattcattgttttgggttttaatagttatttttgtatggagatatgtgtatatattaatataacatatttaaaatgaataaaatatattaaaattttaaaaatgtgagattttagtaatgtatgttaaattaaggagttgtgtatgttgtaatataaaagtatactataaaataaaaaaaattagttatgttttaaaaataaagtataataattgttaggagtgccctaatgatagaaaaataaaaatatattttatatattgtttttaaggaagataaattaatatttatattcattgttttagtaattcataatgtttttctcgatattttgatgaaacaattaaatattatgtatgctttgtctcgggcacaatcttcccaatgagtttccctaatattgtgaagatataatttgttttgaaaataaattatttaaattgatgggataattaattattgatcagattatgttttggcttttgttgggtactttttcaacatttgacacctaataaggattattggctgtacaacttatattattcagtgacaacagtactacactatctaaaaaggtatttcaataaatctcttatttatttttgtattttaaaaaaattaattaacttttttttttataattgtacatattataataatttaagattatatataaactttttaaaatttcaaataatttacaatattaaaaaaaaatttatatatatattttattatacgcaaatttatttttttatactcataataagtaattcttttaatcttattttcctatttaaaattttctaaaaatatacaaatgatctaaaattactacaacaaactaatgcaattataaaaaaactaatttttttttttcaaaatacaataacaaataaaaaatctaccaaaatactttttaaaaagtctaacacataaatttccaatacagccataatattaatgatatttttgcttttacatttataattgaataaagcaatttagttgataaaattaatcttatctccaaaattatttttcaaaaaagtattacattatttgagtatgccatttttgaaaaagattcttgccaccataattgtgccaaatcgcacgctgaaactagctattattattattattattattattattagaggggttggggcaaaaatacaaacattacattgaatagtattactaccttgtctgaaaaatattccatgtttcttatcaactacaatgctccacactaaactgtcttttttatttattattttagaaaaaaagtttctatgtgtcaaattaattgttcttctaagggattaattaattgttaatttttctctaatcttacttttaatattgcatatgttatgattaatgaaacaaatgtagctagtacttaattagtatcataaattattaataataatgtgcaatatagctgggttaataaaggtgtttagtgatttatatgagatgaatgtatttatcaaacatcatttgagatcttaatcataaatttatagtttctattaataatgaatttaaatgatgacctctctttcaaagaataataataaaagagattgaatgggctgttcatatagtgagcttacacgaggaaacaaaatagtcataattaaccgaaaaaaattgatattatattaagtttgagcatatgtagtttagaccaaggttggtttgtttttattaatggtttcgattttttattgctcaaataattaatccgaattaaaaagttccccaacataagccatatgtggtgaagtgaattaaaatataataatgatatatcatatttattatggaaagaaaaaaagagtggctctcttggtcaatattcactctattaaatgtataatgagcactttttttttggtataatttacattaatctagatatctaattcaaacccttccatgtgaaagagttcttgtccttccataggacttctttatttgtttgtttttttttttcttcaattttgtaggaggggatttgaacttgaaactttctttttgtgagaagaaatgtgaaactactttatagggcttattattgtctatccttttcatatacacattagattgcacaacttaacaacttctttactatatttttaaaatatgtcacgaaaatattaaaaatcccacagaagataaatccaataataactagggtaaaattattattttgagactcaaccgtatctaagtgactttaatggttaaatcgtcacattccattattattggacataaaaaataaatatcatagaaattcatttataacatatagaatacatatagaattcaataaaacctccgtaattcaaaaattatttctctaaggcctatttctgacaataaatcttattttctactaataaacatatagtcgtaaaataacaattaaatcaataattgtcttctaattctcatgtttaaactatgcggtcattatagtgagtgtagagatagattggcttacggttgtataagctttatggagctcctttgttatgatttttttttatttggttgtttaattcaagattgtcaagccttatactttgagagttgagtaatgttttaatttattttatcaaacaatcaactaatagagtgatttataattttgctaaaacttctattatttactctggttgtcgttttagtttgaagtctattctaactaatttattacttagtttagtaacaaaatttatcgatcaataaagataatttttccgttagaaaaatatcattcataatattttatgaattcttgtaactttttgccctttcatctacttgaaaagatatttaattctttttgccctttctatttaatttattacatatttgtatttttgagcaagtgttaaaatttaaaattatatttattataacatgaaaacttatgttttaagttgaaatacaatatattcagttttaatatatatacaacaatactttgatgataatatgtaattaattgatgatgttatattattattggtgtaattaagtattgagtcccatataacttaagaaaatagctttaaaaaaatatcgttaatcaatcataaaacaccatctataacaaattctagacactactaatacctgataacaatactcttaattaattaatataatattaatgatattatacttatactacttacgttttacatagagtagagtataattcatttaatattatatatataaatagaaaattttcatttaatatacttaagaaaaattctaatttcataaaaaaacttcttaattattttatacaccattctataaacttcttactttacccaaaatacctttatttttttttttttcaaaacctaaaaaaattaaatctctctctacatccccatcagccatgatagccaagtcctccccctttcctatccccatcaatggctcctccccattttttttttaagaaaataataataataataaaaccctcctcccttctctctagctttcccgcctacaccccttgaggatgtcagcccaaccaacttgcaccagcccaaccactgcgctgcctcccctctacctccctttcattgtggatcaatggtgtaacgcccgtattttataataataaactcgaaaattaattataataatttatatattaataatcatatggatcgggatcccgagtatcaa

SEQ ID NO: 27620 - DNA, 5328 bp, Cannabis sativa
attcaaggagaagtatcttccattgataagcatcttgaatctatggtatagtagcttctttatctcaattttcttttgtaaagatctccctttcctcgatctctcataggcatgggtaaaggtaagtattccttaattttattttttgatcttgcttctactcttattcttgctcttgcttttattagatttatgtgatattttcttaatttgttaatcctagtttttgtgaatggtttgaacaatgtatttgatcaaagttgagcatgagaaagattcttaaacaatattagttatgttagttatatcctattaggctgttaaggttagttaattgtttaactaactggttattaattagttgctgattttcatcagcccttgatgtataaataccttaattcttcattaataaaatcattcagctttttactctcaatagtatggtatcagacacttaaaacctttctctcttcttcttcttcgttccaaaaactctgttccaccattgatattcaacatggtttgaacccgtgctactggttctcgaagttcaggccaaaatcccatgcctcatacttccttaacaattccagctgttccgacgaacgatgatccgatcatccctcaagtctttgccatttctggagaaaacaacaacacccagaatcttgtttaacgtcctgcccatgaagatagctcgagtccctattacctcagctccagagatcaccctagtttaatcttggttactcctctcttatttgacaacaatttccaggcctgcagacgtgattttgagctctctgttggtgcaagaaacaagacggtgttcctcaaaggcacattaccagaacctccgattgaagatccccttcaccaccattggttctgctgcaatcaaatggtgatgtcttggatacttcattccgttactcctaaaatcaagagcagtataatgtttcttgacacttcagctgcaatgtggactgaacttcatgcctgtttcgatcaaggtaatggccctagaacttttgaactaagagaaactctcatcactcttcgacaaggtgatgactctgttagttctaattttacaaaattaaagtgtatgtggaatgaaattcaggaattaagacctaggatcccttgtacttgtgctgcctcaattgataacctagctttcttgaatcaagaacaggtccttcaatttcttacagggttaaatgaatccttcttccctgtttgtgcacaaatactccttattgatccttttccttctttttccaaagtcttctccatggttatccatgaagaacgacaaagaaagcttaaaaatcctaattttccttttcttgtatctgtccaagaatccactcaaacccctgcaattattgcccaaaacccttttgcctcagcagcttctactaacccttttctaatcgggttccctcctggttatggtgacaaaaagaaacttgaggcaccatctgtccataatgcttaaccttcagcagaccaatatggcattcttgctaatctcaccaagcaagaagaaattcaagccatcatctctctgctaactcagaaactgcagcctacagatgcatccaagtcatttgcatatgttccaagcttcaaatttaacctatttagtgtttctagctttatcaatgatacatctaacagtatgcatgttacatctaaactttgtacattacaggatactcagaacaagaagattgggacagctaaacgcataggcaacctctattttttgctacaatctgtccaattttccaaattatcatttccctgtaaacagaatattaatacttgtaatagtgcctattcatggcattctagacttggacatccttccttgtccacaacaagattactgaataaaaatttacattctactaatcaatcttcctttgatttgatacagcttgacatatggggtcctttccatattaatagcatagaaggctatagatattttctaacaattgtggatgaccacaccagacatacttgggtttatatgttaaaatccaaatctgatgtgcaatacttaatcccacaattctataaccttgtcttaactcaattttcaaaacctatcaaagctataaggtgtgataatgcaaaagaacttaacatcaagtccttttatgttcaaaaaggtattcaagtatataattcttgtgttgaaagacctcaacaaaataatatcaacacatattaaatgtggctcgtgccttgggctttcaatcttttatagccttgacatattggccatatcttatccaaactgctgtatacttaatcaatcgaacacctaccaccttattacaactcttaacaccttattaattattacataataaaccccctgcttatgaacacttaaggaattttggttgtctagcatatgcctcttctctgcctagtactagacacaaattctcacctaaggctcatgcatgcattttcataggctaccctaatggaatgaaagcctacactcttctcgacttagcaactaacaaaatattccattctcgagatgttgttttctatgaacaaatttttccactaaaagggtccctcaacacccagcaattggaaattttttttccacagctcctgtacctactttcccacatgctgctgaaactacatcaaatcctcctactggacacaaaacaacagcacctattatttctgcttctaaaccagcagacacaccagctgcaacaccatcaaacacaccaactactgatatcacaccagtaatcatacctgctgcagaattcacaccagcagcaacatcagctgaaaattcaccaactgctgcaaagtcaccagcagcaacaactgttgcaacatcaccagcagcaaaaatagttgctcaatcaaccaaaccagcacttgtttaatttcccctaaaaatccaccagcataggatctgcaaacatctaaattctcatagcatccaccacttaccaaagcaagtagaaaatctcttccccctgctcatcttaaagactacatctaccagtcttctactcatcatcccttggtaaaatatttgaattaagacaagctaagtattgcttttcgaaattttatttttcatgcttatacccaaaattgaacctactagtttgaaacaagcatccaaaattttctcaatggttaaaagccatggacaatgaattttttgcactcaagaaaaataacacctggtctgttgtctctttaccaccagcttatcaaccaattggaaataaatgggtttataaaatcaaatataatgaacaaggtgaaattgataggtacaaagctcggcttgttgccaaagggtattctcaactacatggcattgattacagtgatacctttgccccagttgcaaaattcaacacccttaagcttttcttagccttggctgctattaacaactgtacccttcaccaaatggacatagataatacttttctccatggggaactcaatgaaaaagtttacatgacactccccaaaggttatgtccatgagggggagttacctccagatcatgtttgtctcctacataaaagcctttatggtctcaaacaggcttctcggcagtggtttgcaaaattaagcaccaccttgattgaacatggttttcaccaatcggcctatgatcactcactctttatcaaaaaatcctctacaagtttccttgcacttttagtctatgtcgatgacatagtaattgcaagcaccaatgcttctgaagccacttcctttaaggcctttctaaactcaatatttaaactcaaagacctcggccacttaagattcttccttggccttgaaattgcaagatccaaaagaggcatttctgtttctcaaagacattttactctgcaactactaaatgaaactagtctccttggctttgaggctgtttctactcccatggatgccaacctttctctaagcaaagacattggacttcttgtcaatgatgctacatcttactggagtctaattggtaagcttttcttccttaccataacacggcctgatattacctatgccgtgaatagactcagccaatataatagtgatcctcgacaaccccatctcaaagctgcttatcggatcgtccaatatctcaaaggcactcttggacaaggactcatattttattccaactatgcctcacagcttcctacagaatgacttctccaactttaagccttctctgatgcagattggggcacctgccctgatacacgccgctctattactggtttttgcatcttcattggccaatccctcatctcttggaagtcaaagaagcaatctacagtgtctaaattctctgccgaagctgagtacaagtcccttgccaatacaacttgtgagatcatgtggcttcacaacatccttactgatttcagcatctacacatctcaaccaacaaccattcattgtgacaatcaagccgccatccatatatctgagaatgcagtctttcatgagcgcaccaagcatgttgacatagactgccatatagttcgagaacaagtcaacaaaaatcgcatcaagctctcctatgttccctctcggcacaatattgctgacataatgacaaaagttctattccctactcaattccaaacttttttgtccaagatgagtgtttccaatctttacactccatcttgagggggagtcttaaacaatattagttatgttagttatatcctattaggctgttaagaaggttgttaaggttagttaattgtttaactaactggttattaattagttgttgatttccatcagtccttgatgtataaataccttaattcttcattaataaaatcattcagctttttactctcaataacaaagattaatagtttttggtgtaggtgtattttttggaagtattttttgtattaagtttatactctgaaagttgttgaatttacattgcaagaaaactgtttgataaaatgtctcaaagttatttggtagaagcatgattttaatggattctctttcaattctttttttttttttggctacgagtgataaatttatctttttttttctgctggttattgttattttgatcatcttataagaagattagggattctaatctatgttttaatggttctcaaagactaatgtgccattttcacaaagcttgagtggagaatggataaggaagttgaatttaaggggtaccaagataggaaatggtgtaagaatatacagacattcaattctatcattcttttactttaggctaaa

SEQ ID NO: 27621 - DNA, 6304 bp, Cannabis sativa
  modified_base (6017)..(6034): a, c, t, g, unknown or other
cccgttgtctaatcatatcctgtatagcagaattttccatcccttttaaacccaaaatttccaaaccccctgtccaaattaaagataaatgcaaaaattagagaccatttcgtataaacccattaagacgacattgctagttgccataggcgcttcttggaagaaataacagagagcaagcatcattttttgagagatgctgtttggcctgaacctctcagtttatattatattcctttggctaggcctttgtttttatccagagtcacaattgcttttgaaccaggtgacctagactttgaaattatgacttctaagcctcaaaaatcaaagactccccaggaccttaacgtcaccttcaaggctgaactaatagagtcgaaggtgcgagccatcagagactacgtaggtagtattttaaagacttgtggtattgaatacaaacaaaactgctaggttagatcagtagctgttggcgagtttagttgttacccacctgaacgaatcactcgcgaagcacccgaggagatcaatgtcgaggccagtacgagtggctcaacaaggataggcacttggagcctcgaacacatcagggctggagcaactatccccctgcgagactactacaaggatttcctaaaccatctcacaattgccccattccagttggttcccatttcatataggatcctcgcaagtttgaaggttctgtacaaaattttgaattgggagtccctcacacctttggaaatagaatacctctactcggtgaaagcaatccctgcaaggaagaatgctgtaggggttttttattacctcaggactcacacaggcgatcgtaagatcattgttgggttgccaaataagacccctttcaaggaggatttcttctgtacgaatggcctctccctaattcgcacaaccaccttctgtataattcgtaagtgatatttgcctcagacttgttaaattattccatgtctttaattgtggcttcactaactgtaattttgcttttattttcgacagctgtctcgaaaagactagtccctactcctgagatggctgagcaacgcaggcttctgctgggtcttctattcgacctccgatcatttgaatttctctttaacggggtcaacttgaggtccgtgggtctcctcgcggagaaggagtttacttgtgattataaatatcccaagtattcttcctggcagcaggttcctgtcccagccgatgaggagaaataggattatgtggctcgggcatactacctcaagaacgtagtccctcgggaagccaaagaaggagcatcctgaggtaatcaatgtggttggtcacccacagtgcttagggccgagcgtaacactttagtgttttttcgagatagtcgttataatttctacacctagaatccccttctaatagatcgcattacccataggttttatagttggtacccaaagtttcacgtccaacgtagttgtactgaatcctactatgggatagtcgagcagtatgggaccatgttggatagggcaggtcacatagactcgagttgggatttagagccacttatttcctatgacattttcacgatcacagggtgtagagactttagtgaatattatagtccttctacctcgtcttcttatgattatggtaaatcccttaggcgggaaattatatcccaacttccccttttacttgttttcaaacaaatgtcaacacattattttgtcttgcagaaatgaatcttgaggacctcattcaatcttcaggcaagaagggaaataaaagattgactgcctcggagacttcatcagatgtcaaagtggagcatcccaaaaggcctaggaagacaacgacccataagaagcgagttcctcaagctattgatctcgaggtccctgagactgagactcaagttcagtcccctcatccgtccctcggtcatactgagaagcccatccccaaaacgagctaggccgctgcttcttcaagccaagcacttgagactctgcctattgaagttgggagtgctggctcgaagtacactagggagtttggtgcagcctgttggcgtcattttaagtccttccttcataatgaatgggacttgattaacaatcgaaacctagacgagatgcttcagaggagtgtcgataatggcctctcggtaaattcctttgtccttctcctcttacttccctttttaacatccttcaaaatactcacgcatttttacttattggtttttattaaactttcatctcctttgtcacccaacggcggggtatggagagaatgaagtacatggagagtgagatccaaaagctgatagctcagcgtgaggctgtgaccaaggaatggaatgactccaaggttgaggtcactcacctaacgaaagaagtcgaggaggtgaagaggacccacaaggccaagcttgaagctattaagaaggaggagaaggataagaccaaggcattctagaaactccagaaggaataccagattttccaagaggaacttaatgtagccaaagtaacgctcgatgggaaagaagttgagaccattgagcgatgcaatgttgttggactacgttccatctaccgagcctagatggcaaatctagggatggatttgagtttcctgggaaagtccatggaagaagtccttgccaactacgagaaggctaagagaattgatgaggaagccgaggcagcaaaagaagaagaagaagaaacatccaagtctcctaccatgtaggcttggtttttatttattttttttatctaggaaactggctttatagccaagataatggtttcgccccttgtggtacttttgtaaagacagatttgcaaagttggatggccaacttttgcttttattttatcttttatctaatgcctcatattctgcatttgaactttaatatatttgcctatttgcatttgcattcacaacttaaacaattatattttgatcaaatttaaaatactttaagcatttccattgttcatattttcctttgattttatttaagtagttggtaatctactatgtgcgcgagccgttattatctgctatgattttgatttgcaggcagttatcaattttgtttttcataagcaattataatatgttttaagcaaacttgaatatactcttaatgattcatcactttgtatatttttgattgcttgtatgaatggttatgcctcctatttagacattaggttaagtatttttttcaaggcatcttggtgtctcgtttaatttcctacgaagtgcgagccattactattcaacttcgcatgtagtttaatgttgcttttatgagttaaatctcatttacaactgctacttttgattttcctttctcgtaagaaaggttatttaaagtggagtaaatatagcatgtattttcagatgaattctggttagtcataaataacttttaaagtgaagtgggtttgcaatatatcatgtatttccagatgaattccggttaatcatacacacatatatatgtccctcaagtaattttaaagaataaaactttataattagttgaaaaatgattcatcattattaataactgaagttcaaaatattacaccagaagtagaagttacagcatcaatttactggtagtagggttgcaaatgttctatgttccaatagttctttattagcgagccattaagccgagctaattggtaaaccctggttcctactatcgcctcgatcacataacaaccctcctagtttgggttaaatactcatccagatgcgtctctcgtgtttgcaaatactcaccttagcaccaagtttccaacgtggaagagcctcttcttcactttcttgttgaagtatctcgtcactcgatgttggtatgctgcattagtaatttgtgactcagtacatttttcatcaaatagatacaaggaaaattttaagagttcttggttttcttcttgattataaaaatctcgtatgtgggtcgcaatattgacttctaccgaaagcattacctctgagccaaatgctagtgagaatggagtatgccttgttgctgtcttcttagttgttctgtgagcccaaagtacttgaggtagttcattgacccatatacctttggctgcatctaacttctttttgatagtatccttcaaggttttaataactgcttctacttgcccatttgcctgaggcctggatactgacgagaagctcttaataatcttgttcctctcacagaactcagtgaataaatcaccatcaaactgagttcagttatcagatactatcttaatgggtattccaaacctacaaattatgttcttgacgacaaagtcgagaacttttttgcaggttatggaaactagaggttcatcctccgtccattttgtaaagaagtcgacagccaccactgcgtactttgatcctcctcactctgaggggagtgctccaatcaaattgatcccccatattgcaaatgggtaaggcgaggtcatcattcttaattccgttggttgtatgtgaggtatatgtgagaatttctgacatttatcacatttcttgacaaattcatgggtgtccttatttatggtcggccagtaatatccttgttgaataatcttttttgacaagctttgccaacctacatgatccccagaaaagccttcatggatttctttgattatctcatttgcttctaaagaatacaccataggagaggcatcgatagccccttctatacaatttgccctccactatcatgtagcccctttgtgcctcatttttgttagttggaagttgcccattgagaagatatttaactataggtatcattcaggtaggcgacctatctatcatctcgacttcttttttctcacatatacttggctcgtttaacacctcaaccggtaccaagtttaattcatcaagttcattttacgaggtcagttttgctaaggcatcgacatttgagttttgttctcttggaatttgttcaattttgaaataattaaacttttccaagttcttccgaaccttctctaggtactttgctatttttaagcccttagcatggcattcccctagtacttgatttaatatcaattgcgaatcactatggcatataagatttttttcctttaacacttcagctatccttaatccagcgatcaaggcttcatactcagcctcgttgttcgaagtgttgaattgaaatctaaaagcatagtgaaacttgaagccttctggccaaattaatattacccctgcacccgagccttactcattgggtgctacatccacatgcattttccaagtgtccgtgtctcgctgaacaagcagattttctttaggagttattccctctatcaagaagtctaccaaggcttggttcttcaatgatgttcttgggtgatcagttatatcaaactgtcgtagttcaatcaaccattttatcaatcttccagaagcatgtgcttttgataaaacctgtctcatgggttgatcagttaacaccttaatcagatgtgcctggaagtaaggccttaacttgcgagatgcgtgaattaggcataaggcgagtttttcaggagggggatacctcgattctgccccccagtaacctcttactaatatagtaaacaggttgttggtgctttccctcttctcgcactattgctgcactaatcgtgttgttcgagacagccaagtagaggagtaaagtctctccagttattagtttcgcaaaaactggaggtgttgacaaatgcctctaaatgcttttaaaggcctcctcgcactcttctttccatttaaactttttgttgcctcacaatacattgaaaaatggtagacacttattagctaacttcgaaatgaatctgttaagggtcgccattcttcctgtcaaggcctgaacttccttcggtttagttggtgatggcatatctatcaaagcctcaatcttttgaggatttgcttcaatgcccctcgcnnnnnnnnnnnnnnnnnnaaattttcctaaggaaactccaaaagaatatttttcaggttaagtttcatattttacttcttcaatatttcaaagcacttcgcgaggtctgttgtatgatttccactctgtatcgacttcaccaacatatcatcgacgtatacttttatgtttcttcctatttgtctcgcaatgatttcgttcacaagtcactgatatgtcgccccagcatttttcaaaccaaacggcatgactttataacaatacagtcccatgttggttacgaagctt

SEQ ID NO: 27622 - DNA, 1202 bp, Cannabis sativa
ggttgttgggttggagagaagtgcaaatcatgtttgtcaaaacatttgagaaatgaaagagatgaaaactgaaatgatctatctctcacatattggaaattacacgtctcaaaagatttaattacctgataaataagttcagtttagcttgtaaagttaatcgatttaaagaagctcaatgaagtgtccttgacttctagttgagtacagatgcactaagaaagcgatttaatacttggagtatgagatgcaataagtgatatgaatataaaatatagttcacttcttaaaaatttactttaatggtatgctaaattgtgatgtaaatatgtatgtagcataacaaaaggtaatttaaatttaagctataatatagcatgatataaaatatgcgtcatgcttcagtaaaggttttttttaatgtgttattgtgttcatatttaatattatatttttattataattatttgtcaaaaatactatcatttttctcttctttttctccccctctctctttaaaagttactcattaaaggaccagaaaatataactaaaactaagggttttgatatatattttcttttgaaagaaaaataaaagttgagactcaaaatttttttaataacgaaatcaaagaataatgcaattttatttttgggtggatatgatttgagaggagagagatgtgcaatagctttttttgtattattttttgactttgcctcttagagaatttatgagtttcaacttctgtttttttttttttttcataacttttagagagagagatgtggagggagaagaaaaagagagaagtgaagagaagaatgataatatttttgacaaataattataataataaaaaaatctctttttttaaaaaaattacaataaaaaaaatgaataagtaccaatgatatattgattagagtagttagaaggggtgttcataaaatagtcgattcaattaaatctacacgatccaattcaatccaataaagtgcggatattcgcacttgtgcggattggattggattggaattgtacagattggatgttagttgacatgtaaaaaccaatccaatccacacatatttataaaaaaaatttaaaaattttatatacaattaaaattttaaagtaagaaaatagttactctaagggatattagcggctaaaccacctgaactttacggtttgta

SEQ ID NO: 27623 - DNA, 5527 bp, Cannabis sativa
acttaatacgcattaaagaaaatacaattttctttttttaatattaaagttttattatctagcttttcgagaacatctctttcttgtattagtcgcaatgttaatgttaaaataataaaattgattatggttgagtgttttataccaaagaaccgagttgctcgaatgcttccataacttttggatctttctcatcttcatatccaacttgtactatccttggtccattcacagaccaaaaggctctccgccccgcctcctggaaaaatgagaaaagaatagagttcaagagtagcttcacaaaatttgatgtctttttagttattagcatagaatatcagaacacaaatcacagcatgcagctaattatttaacctgtaaagatatcaagtatattgcttcaagggattgaatgcgaatatcaggatctacaactggttcacgctcgattgagagcacactaccaagttcaagtggcatttttgatgtgtcttgttcactgtaaatctgaaaatttccaccaagcaaagagaaaaaaagaaaataaatatgagttgaaagttgaaattctaaattcgcttataataaggggaggagcaacgaactataacaagcgtataacagaaacgtatcaccttgtttccagcaaccggtagaagcagagctggccaaaggaactcagacatcaaaagtaaattctgtagttcattctcagcttcaaaacaacagttccgaacagttccataaacctatagaaaaaacaaacgccttacaaaaatcaagttgagttgaaatacaaattaccatgaactacattccattccatctctttgctaaaatgaattaaaagaagcattgttcaatatacaccgctaaggcacaagcaaacatacccctttccttctcaatgaattaggtgagtcaaactgtctaaccatctgtttcaaaagccccctcttaggatccaataaaagttcccttccagctttgttctttgaaatatttacaattatggaaccgacatgttcaaatgcatcttctgctcacggcatcataaaaagtgccacaaatgtcaaaacaagtactacctaacacaaacacacacattaacaataatcttccactgaagtctacctttggcttcacttgaagatctgcaaaatgatctaacaagtttcataacatagagtccttgcatcttctcatcgccagtcttaaatgtaaaatagcaaaaataaaaagttagcattccaatttttttaaacagatgcagccctgaaaaattataagaaaaacacacctgaagcaaggaagtgataccagcatcatgttgtgtaagattcactaaaagcataaccattaagtggccaatgctagaatctggcttatacaagatatccatagaagttttaactattccaatctcaaccatcttctctgccaaatcataattttgtgaaagattaacaagagcttcagctgcaggttccgaaatctcctgaaaaaaccgacaaaccaacaacatttaaatatccaaacaccatcaatcatttaactcaagatatcaataatcacatcaaataaataaagaaaaaacttaaattgcatcaaaatctaaacttgatttttaagtgacaaagtcaattagttcaattcatttgtttcctaaatcataattttctttcttccggaaaagagacagaggtcacttattttagactgacccctcccaaattttatttgggagtttcgccaagcataagactaaaatataatagataaatacaaacatgaatcttatttacagctgactatgttttattagtgtaaaatgagattctagtctctagtgaaatcttgaaaagctaagcccctcaaacccttttgacttaaacaaccaggtagccacccaaaatttaatctttccccaaatcacttcaaccccattttcaaaaaatcacaaaacatgatgaaaatatataaatttgaacaatcaaatccctaattgttgcaataggcttttaagtttagtaaagcttaaatattagcataataataataccttaggagcatttaaaagtcgagaaagtgatgggaggagcttgttggcataaatggcaagggactttaagccatcatcagacccagttaaacctcgaactatatcaacagccgcctttgtcacctaaatacatgaaaattaaataaattagataaaaaaaaaaagagccctttgtttgagtttagttttcgagggtggatagtaaaagaagagaaggaaaagtgtacctgtggtgatggtgaagaaaggaagtccactagttcttctagctccgtcgccattgttgtcttctgtaaatgttcttagttcgtttcagggtaatgtacttaattttgtttcctaatatacgacgtcgtcttgattttacggcaaaaaacataaaaaagaaatacgacgtcgtttatccatctaaaattaatattcgcccctaaaaataattacattagttttgattaaaaattgagaactccaaaacgcataattaattaataattgttaaatttgatgtttaattaatatttttaatataaaaaataattttattacataaattaattaaaaatatatataaataaatctagaatttaatattatagctaataaaataatataaaaaaaaaacattatactaatacaaaattttacatcataataaatattctaacaaaatatttttttataatacaattttgcattatctcttcgagtggttgtgcttggattgtgagggttttaagccacatgaataattcaatgtgctcatcaacacctgaccctaagatataaatcatctaaaacacattagcatggtgtactttttctgttcgaatcgggatttgaaaccaaacttctccttaagaagatagatggaggcgattcaagtgaaatctattgtagatccaactttctatttactagtgagattcaagcagtacactattatgaactatattttagttttacattacttattagcatctttattgaaaatgctaacaatcttatctcaatatccttttcttatcaaaatgaagttttggtatcttaaatagacaactctattagccaaatcaactaacttgagtacattaaacgagtgtcattcttaaatagactatatcattcttatttcaccataattatgcataaaagccaaccaaagcatgatatttgtgagtctaaataactaaaagcttaagagtaaagaactcaaggcttctccttctcaatgctgctaggtgactggtgcctgtgtggcttcgaatcggcttaggctgattagaggcaagcttttcatctccgaaaaatcgtgtgtagcttctgactaatcaccaatcaaagctcgcggtctatgcccaatggtgaacaaagacatcccagtttgtgaaattgctctcacaaatgccatatttgcagttaaagtaggggcgcgccagtaatcaccagtaccgaaaacaaccttattctttattgcaagctttctagtggttgggaggctcatcatacgctccgagggacaatcaacaacaaccttgagacatccaagtaagtgatcagctcttaacttctcatttgtccctccacacattgatactaattccttgaactctgaacaaacactttggcaaatcatacctctctttccagatattacactacctagttccacatgaattggtttctcaatttcagacattacctgtccaatcacaaactcaaagttactcttatatttttctctcaaatcagcttctggggtacccaacagtttctcacaaccaccattactgattcccgaaacaacagcaatcaaagctgtcgtgtcgaaattcacatattcacactctttctcgacacttatcatggaaataagtgtcgagaaagaatcatccctttccgataccaaagttccaagttggaatgtgttttcagcagcacattccaaattggaaacatcatcatcatcacaatcatcatcctttgttctaatttcaagtatggatgcatctctatatgttcttgctaatacattaacccactcttcttccaaatcctcattgaaatcgaaatcgaagacagtaaactccaatccaaactcaatagccccaaattgtaatctgagtttctcataaatgacttcactgattccattagcaaagaagagaataactgaagaaggtttaagtgccacagaagacctagcaacagcaagaagtttctcgattcgaaatttcaatcctttactcgaatgggattcatcccaggaaatataattagggttcctatcagaaacaataatccaaactgggttcctattgagagtacaaactacatccacatacacagaatcacaagttttttcaccatttacagaaattgacttacatacacgtgaaactccagtaatgaatggctgttggagaatgtggagaacagcttcaatgtgcccaatgttgaaacagcacctagggtttgaggaacgggagagaaaggcaagctcagatttggccaatttgaggagggtttgttgagaagaagggttgattttggtggtggtggtggaaatcaaacttcttaatctctcaataacatttatgcatctcttctttgctaattccaattcttcattctccttcattctctattattattcgtttcaatcaaatgcaaaacaaatgcagaatttcaaactgaattgaaatgggaattcatatcaaaataattatttgattcgagtaagtacatatacaaatccatttcaatattcagagtcaattttaggagaaatttccaatcccatcaataagaagaaaaaataaagatcaatcattgtgcaatttcgttcagaaataaatgaagataaaaacaagatattattaaataaggagtaaccttgattggaatggaatcaataagattgaagcatggattgaaagatgaagctttatttagttgcagagagtggtgaagtaaagggtttgagttcagatatttctgaaggtgaagctcgaccaagagacggagacgaagacagtttcactccataactgaatatgcaaagagaaatatccttaacataccgtcaatctccaattctaatattttactcaatttttgtgttggaaaaatatatattaaaatacttttttttaaaacttttttcttaccactatttatttcactttttttaaaaaaaaaacaaaataagcttagtcattcattaaataaaataaatgttagacatctcgatcattacaaaatatttcctccggtaaggaggagatcaaaatagatctgtacaattggtgggtgaaagcccgtttagccacattatgggcaacaaaattacaagacttactaacattagaaaaactacaactaataaaataggaagatgactaaacacaaaaggagacatagttatcaagagcccaatagaactccttcccattgagagcattaata

SEQ ID NO: 27624 - DNA, 2875 bp, Cannabis sativa
  modified_base (2821)..(2833): a, c, t, g, unknown or other
tagttttcttgttgttatttgtgttgtttgtataaaaaactgtaaaataataaaaaaactattctttaaacgtaaaatataattttttttataaaaagtagtacccaatataattatttcaataatttttaacattaaatttaataatagtataacactaaatttggtctacttcttctagatggtataagccctgcatatgctattagtactgagtacggccaccaccggtaaccgatagaggcgtggtaatttgaagggttacattgattttgtagttcttctaatataaaaataccgacaaccaagtactaaaggatccatggagttaatttattttttccttttctctaaagtacaatgtacggttacaaatctctggtttctgacggtggcacaactcacaagaaaatttacattatcaaaaaattacaaaaaagaaaacaaaaggaaatcctctgtagggcctttgagatattggctgtccgtacatttctggttgtttttttttgaaggtctttctagcaatagattgtcacaccataatccatagtgtcataactttatatagatatttcttggatatgttgcggaccaaagattttgttccactactaatatcatatagtagaaattagacgaattttaaaacaaaaataaataaataagaaacgtcgacaagagtaataacttttctaactttgtttagtaatttaaaattatattattattgtacgattgtcactatatatatataacaactatttctattttaattgatatctgtcgtgtaaagttcacaaacacgctacaaattacgattttgtgaaattgaaatttgacctggaatatcaacaagttatataatgagagaaatcttagagtgaaatttgttaaattagaggatgtgaatgtaaaatatagtttttttttttttgtgaaaaaattattttaatagtgttccaaattataatttaaatatctcacataacaaaatataattcaaatttaaatcacattatagcattattcaaaatttgtatcacagaaaattttatactgttatatttagcattataatatttttaattttatttatcaattttagttaacatgctcatttgcatgacttgtattattattattattatcattaaattttatatttgtctttgtattattatttaatattttttttaataaattattaagtgagtattaaatgacattaaattttacattaatatttataattatgcattggagtacaataataaaaattgatgtaaaaatataacaaagctattttttttatatatatatataattagagacttttattaaagagaaaaaacactagtagccacagcagggagccacatcccttaacaaaccagaagcctcaacttttgactccctagcccatcgagctagcctatcagctaagacactcttagatcgaggtacatacataagacacaacaactttgttaaaagacatagaaaggttcagacaagacgaaaacaagggaaaagtgcaccaaccaaaaggtaaagtcctagccgcaaaagtagtagcagctgccaaagaatccatttcaatttggacatttgacgccttattctccaaagccaaatgcagcgccaatgcaatgccctgaagttccccttcaagtaccccatagactatagaaaaccccacagaaacctaggaatccttgattgcctgaccatgagtgtggagaacagcaaaaccagcctcttcccccacaacagatgcgtcgactttacagcaccagggacccttgtcttggatcgaaacaggcccctccatctctgcatcatacacaaccctttgatcaaaaaacaaccagttctggaagaagtcatcagttctcaagagacaatccttgtacactagatccaaatcacttattttgccattgaaaatcccttcattgtgccatttccacagggattcacaagcacaggcgatgaagacttgagtttcttcatcattcagactgctccaccatgatccaaaatccatcagactagcccagttaaaacaatcaatccttatgcctcttctaaatcaaatcccacgagggaaatggcattgatagaacaagtgaaaagtagattcaattttcgattggcagtagttgcaaatttggtgctccttatgtaggaagccaagcttactcttggtaggaaatatatcaatgaagagtttccagcagaaaaatttcaaacgaggatgaattctcatctttcaaaatttttcccataacctcattggctctttaaaccgatgttgttgacatatccaatacgcacttgtgaccgagaacttacccgactttgccaccttccgaaataggatatcagatctctcattcggaggcttgatccttagaatatcatcagctatctcctctgcaaaacactcctgaatcagcctttcattccaaatatgagactcatcttgaaatagatccttaaccttccaaagtgatttgttgtgtttaaattggaagttcgctttgatatcatctagacccctccaagggatctagggcctataccatatttcacacgatccatcaacgatgaagatacccgctccatccaagcatacatttctcggttcaagtagacttttctagcatcttgagtcattgccatttttttccacaacccacacattacttttatggcagtatttatccttaaagatccttacctagaacttgtcgtcctccttcatgatcatccagaaaagttttgatagaagagcctgttgggttttgtgccctannnnnnnnnnnnntcaatataatcagatttacttgttaataaagatcagaaataa

SEQ ID NO: 27625 - DNA, 3299 bp, Cannabis sativa
gggttggttggtttggtgtggtgtgacacgtgtttaattggaactgattacttagtcgtatcagttaatgggacacgttcaaaccaactcactccacgcgattcagaaaaaaacgacgttcttcttcttcctgttatgatttttcaatccattcgtctatatagtgcgattgagctgatgggaagaatacatctttttccttatcagaaaaaaaatacagtttttataaatactaaaattccatctgcaatatcaaatatctttgggtgtattcgacggtgctctacagtgcagtggggttccaatacagtgcgactgggttgttttatcgtggggacgaccgcgaaattccgactgtttgcacacttttaggcagtgccgcgaacgtcttaaagagagcaacctagtctacgattcaacccggaatcttttcattcagtaatatcgttcctcttttattttgctagcagtttattcaacaaatcttaataatatcaatggttaagttatccaaatttggccaaactattccaaccctttataacagtttgtatgcgtaacaaatttaattattatgctcacaactcgtactttacattgaaatatagaaaggaaagttcgtcactttaactagaaaaaactaagcaattttctgcttcaccaaacgaaactaagctttttaagttccactccttaaagctcattcttttttgggagtaaactaacataggctccatggtccatactcctttaccaaatcatggctcggttggtaacagattaaaaatttataatcatcgaatcttaaaaaccatgatcatcaaaggtgaacagacaattagtctaaagaaaacctttgaacgtcaagtccacactctattgactgttgggtccggtttgcacgtgtacctatgtacaacacgagttataataataatcaagattattttgcctaattatggcttgaactaattgaccccactttacacacgtaactcactgttttattagtaaaaatcatgaccctttgatcttaatcaaacggtaatggttgatgagacctaattaactaattaatgttagttttatagtgggacccgtcctcacaaacataatagaaagataacagcttttgcttttaaaagttggttacttttttattgttaattggatggactgtcttttgaatttggagacacaaggagtgtattcgaatcaataaagtgagaaaacatccaactgagataatattctacaaaaagagaaagaattttttatttttatttttttttttaaaaaaaaggtgagaaattatcaccaatctcaacctcaatccctcgagattctcacttaattttttacctttttttctttaagattttattaggaaaccccagtttttttttttaatggctaaggctcaaggaatgttggattccagaggcaattctagaagctaataagcataacccatgtcagcattattaatgtaacaaaatattttttattatatattttgtcaaaatactcatcacaatgcttaacaggtaatacttcactacaaagctttaaaattttataatcaggaaatgaaaaaggaaaattccctaacagatacgtttatttattttaatttttctaaaccaatgcatgattgatggaattttcttttacaataatctttttaaacttgcctccatttttttttttttattaaagtggttctcttctcttggcttttatatattctttttccattttcttttcttaactggtggcaggcatgtttggttctcttttaactcttttattattttctttttactaacaaatcttcattttattggtttaaggttctgacactaagctgtgagtgaataagtgagtgagtgcaattctggtttaggaagaatgacgaattgtactctttgatatgatgttattagtacttaaaaattaaaataaaaacaagacatgcccagttgaaaaaaagataaattgagttggaagaagtttggttgtattgaagtttttcaaatcatttctaccagctccttacttactactaccactacattacaaagaagctggttttggcatttggggtatctctaatttattctctcaaatttcatgcaccaaatggaaactatcaattcaaagtatgctgttactttcttcatcattgccttttcatgtttgttggattccacaaatggtgtgctctcttccaaaggtgttaactatgaaggtaagtagttttgtgttttttttttctcttaatgtctctgctttgtatatgaagaaatttacagatgaaataatctgtcttttctctctacaaacataattggcagttcaagctttgatggaaattaaaaattcgtttaaggatccccacagtattcttgagaattgggatgatactgctgttgatccatgcagctggaatatggtcacttgctctcctgatggtttggtcgttagtttgtaagtaaattcatggttaaaaaaaggcactaaatttgagcttatattatacaaaaatttgtcactttaaacaattacactaatgtagttgaaatggttttggttgttacagaggaactccaagccaaaacttatcaggcaccctttctccaagcataggcaacttaacaaatctccggagtgtgtaagtaggaaaaaaaaagactactactgtcattctcatcttttatgtcttcataatttgtttgctactgaccctttatttatttatttgtttattcttattattatttctctgcctgcagactattacagagcaataatataacaggtccaatcccctctgagcttgggaggctccaaaagcttgccacacttgatctttccagtaacagcttcaatggtcaaattcccaacactttatcacacctcaagagtcttcaatacctgtatgtaaactcatttgattaattttttgagttaaaaagtatttttcaagttaaagcttaagtttgataataattactaattagtacactatttggaactggattaggcgactgggcaataacactttgagtggagcaattcctgcatctctggctaacatgacacagcttgctttcttgtaattatcttcaacttttagctttttaatattacttggtatcaaaggctccattacaagttaaatgctttcttgtaatcctagggacttgtcattcaacaatttaagcggtccagtaccaaggttgtctgcgaagaccttcaagtaagaagttttctatattgtaattgttattgttgtt

SEQ ID NO: 27626 - DNA, 4687 bp, Cannabis sativa
aaaagtaagagttggtggttcggtacataataagggttggaacatcgaaaaggttgattataaagatacttcagtagctgaggagttaagaattagaggttttagaatcatcaaaattgagcagctggaaaagaatggaaaagaatgatagtgaccctgaattgccatcctaaaatctcttctttttatttttgaacaaatcattctcttctttttcattttggcttaattaatctttttctattatataatttttgttaataataagtagagagaatgatttttgtaataatacgcagtgtgcttcatgcgtgaattttgtcactgaaaattacaaataatttcaaactcgaaattttgtctcaaaatgactgtactcaacatatcacttcattcacaatttcatatataatagctatgtatatatagtagtaatccccaagtctatggaccaatcaaataaccccatttacagtagaaaaaaagaaaaaaaaaatcccttttcatatcatttatgtaataactatgtattatagtatatttaaaactaatcaaccgcaaataacagaagaaaccgataaaggaaaaagcctagtagtggaatacttgaaattaataagagaaccattgagcaaaggtttcccatcattaacgagacaatcatcaaatttaagacgtttgaagattttggggttgatgagatttaccgagctaaaccagccacatttgaggtgaatgcctgagatgttacagccagtaaaacagttatttagaatttcaactgagaaggttggtataccatggggcatagaggacgtgggactttggctcactattatatcagagttcgaacagttatcaccacctctaattcggtccaattctattcttccagattcttttcctgtaaatcaaattaaataattaaataaacaaaatagcccctccacaatgaacatgagagcaataaattgtaacagtgaaaaaggttatatgtattgcattaattacattaatgatgttccactttacaactaacttaattaaacacgtaagagtgaatatgagaatataatgtatatacaatacattaattcatataaaaagaccaacaatagggaagaggtggtctacagacaaaacatacttttaggacgtgattcttgatatctctatacgactaatcagacaaaaaaaaatgagaaaaagtgtgtaaaaaaaagatgactcatattgcttttatttccttttctttttgctttgcgtattctaccaccttacatgtatgtgtatctttccactttttcaactattacattaaattcttgtacacttgaaaattacaataacctaatcatattgaattaattattagtttattgcttaaaatagcttttacattttctttattcaaaaagaggaatgcacctatcaaattaggggtactaattagtctagtactacaaattcaatggataatacacacaatctgtactcactataagaatatatatattaaaaaaaaaggttacagttaggacaggcgcacgttagcattaaccataacgaaaaatgggcgtacgataaaatcactgacaattgtgcttaccaccaaggagcttgcggtgaatttcagttgtacctcgactcatgagcaggatgttctctccttcaccattaatggagcttcgttcgtgttcgttacccaaaactttaagaaagaaagaaaaaagagaccagaaattaagacaactttttcagaaagtttaaataataataatattgctaattattaaaggagaaacaaaaaagaagaatacaaaactcaaaaaaagcatgaaaatcaaccatggcggtcgctgaaagaacaacaaaaaaaataatcgaaaggaaagagtgtatgattaccaggtcgaaatgtgaagagtagtaatacggtgaagagtgcggctaccgacgcggctaccttcttcttcgatgatgactgtactgttgaaatcatctccatatttttttctccctctctctaaaacctgtttttaagagagagaaacaatgttagatatgaaagtgaatagtaccgtgttcttattgcttgtgaatatatcacatcaatggcggatcaatcaatcaaattcagaagaataacagtagccgtcgattttatggaaaatctctctctctctctctctctctaatatttgagaagactcacggggcttaggtatatacaccgccagtatataactatatatatatatagattagtggtactgtagaatagataaataacgaagacaccattaaaaactagacagagaaattaattaatgaaaaataataaactcaaatctcgaaaatctcaatcaagtcgtaatgattttaccggatataaaatatttctcgaaaacgaagcgttgccaaaaagaaaagagaaaacaaagaaaaatgaaatagagattttccaggaaaatttcgataaaaggacaaattagggagcgagtagccgagatcagtaacagtactactactactactattagtactattgtactactgccatgttttctctacatacgaccacaataccaaaccaaaaaaaaaagaaaagagagaaaagcgcacaagttgcagacacatatatatatatatatattgatcttaatgatcagacaacaatggcagaattagtactagctagaaaaaaaatggtggaaagcggaaagccatatttgacaaagcactaccacaatcgcaaaagcctatatctccttattcccaaggattaatttcacaaacaacaataacaacagcagcaaatattacggatctatacataatacctttggaattgggatttgaatgtttgagtgttgatcgaattagggtttttgtgtttttagttcagataagagaagagagctaatgaaagtgaaatatagacaaggaggaaagctctcttatatatccgtagtttcggtgtattttaattaatttaatatatatatgactataacaaaataataataataaaatatttttgttattttactagtagacattaatataatatataaaattaatatggattttttttttttatataactagcaactatattttctcaaaatagaatgtttcaaattcagatctctgctgtgaaatattaaaatattaaaaaatatgtatacctatttcttttacttatatcaactatttatgtaaaataataccatatcaattgttactaaaaaatgaaagaattcttataagaaaagaaaaaaaataacagaggggatatctttctccttccatttctttagaaaaaagaaaaaggaatatctaaacaaattgatggaattgaagagatagagaaatatcaaattttgagtttgtaaaaatgacattgacttaatgttttttttttttttttgtatgagtatttaatattagtaaaattgtaattttttgttgttaatatgaactttttgggagttttaaatttattaatagacttaattgttacaaaataacgtttttgtacaagtgtcttgtttaacacactaacaaaactctgtattgatgaaacttaacgaaaattataattcaaaaaatattggtatttatgttgaaaaaaaaaattattatattttaaaatataaagtgtgtttggacaaaaagtaataattacatataaattattaatattttgtgtggcaaaatagttagtaattacataaaaaaataatattttttaatagttacacagtgtaattccgcttaattttcatagaggcaaaaaaaattgaaaagtgtaatttaaacttctcaattacctttaattacacaattataataattaaatagtgagacaaatatatcaaattacataattacctttacttatatacaaatttaattacactataaccgttaatattccttactatttttttggaaaagaactaatattctttactattattacggttataaatatattttgacaaataattttatattaatataagaattaaaaaagaaaaaaaaaaagaattaaggaatagttaaagtgcacgtgcgggtgttaattgacaaaaccaatcaaggaaaacaagcgtgtgacgtgggaattgccccaacgaaccacaaacaattataccacgtctttgtctccaagtttaattcggtgggtcccacataagtatcttacatatgtttttttatgactttttggaattttaattttaaattaataataataccatatgtgattaaaaacaataatagaaatttctataacgttaataaaagtgattaaaattctctacaaatcccacaaaaagtcaaaatctttatctggcgtgtcattcatgatgctttatcggtagctacttcacttgtttgcagaaatatcatttactgattccacttgctccatttgtagacaagcttgggaattaacaggacatgctctctttagctacaaatatgccaaggctatttggagagctcgaaactatatgttcaattagaacgcgtgtacatcgatgcattgtggagactacttgttacatctttcagcaacctacacgaaattggagatggaacaaattttttgtacaatgtgggtcatttggacagaacgtaacaaagtggtacatggttctaaagcaagagctgccca

SEQ ID NO: 27627 - DNA, 1493 bp, Cannabis sativa
cttctattgtaactagtgctgcaatttaatttacaataaaaaatcttattgaaactcatattgcaactagcgctgcaactactttagaaacccaaactgtatggaataattctcttaaaatataatattaaattacaatagtaatattatattttacaagagaattaaggatgatgaaacatttctcttaattaataaagtggaatgattactctctctctctcttggttaaatctattccactttaaattcataaaactaaagagtattaaaaggacatgatagctaggcatctaaaagggggttcgaggatggtaaatttctgagttggtacaacctatttgtgtactgaattacttaactatgatttcagattgaataaattaacaagaatctcatacaaattcaagaccatgcttcatgcttttgacaatatgtcataaactttatcataattaacctttcacaatttaatccttattcattatcggtttccataattgtcacatattaaagtaacaacatatccctaccaagaaaaaaaaatggtaacaacatacccataatgcttcaataagaatgtatacatattagaatgattttttttatgtgtcattttcttgttttatctttcaatttaatgtattttctttatttaattttttattaattaaggtggcgtttagtgatacttttattttctaattttaaaaatagaaaaatgaaagtagatttttatttttaaaatacaaaaatgtgttctataactacttttgtttttaaattttaaaaataaaaaacaaaactgtgttcagtaactagttttgttttataattttaaaaacacaaaacaaaagtgtattctgtaactatttttatttttcaattttaaaaacaaaaatcataaatttaaattttctttttcttttttttaaataaaaaattatgaatattatttatttttatttttaaacaaatatataaaaattataaaaaattaaataaaaaatactcattaacatcttaaaaaaattcaagtaatttaaagtcacgaaactcattatctataacacaaaattaacaaaatcataataaaatatgaactaataattgtccaatcttgacgaaaaatattaaaaatattctaattgttaataagcttcactcattatcttcatcgtcgatttgctctccatatatgatcagcaattttatcacggacattagccatttcacgaatttgatctcttaaaatgctaaactcaatactatcattcaaagtttcgtgaatgttttgtatagtagcatcttgtacttcaggaatgtcttcatatccatcaaaatatatgtctttttttgcatttgtgcacaaaactcctcatttatatgcttccacgactgctttgtaaaagttgtagtattcctattgggaaattttattttctatacttaaaaaaccttaatattttattcttaaaccaatacatttcaaa

SEQ ID NO: 27628 - DNA, 3732 bp, Cannabis sativa
cttcactgtgcaacttagaacccaacacccctaatctcgacttcaacatgtaagtccccccttttgtaacttttacaactagtgatttttgggtgtttaatttttgggttttgcaatgttgtggatttagagattttttcgagtagttgacggttgttgtaacatcctaataatgaagcacgctacattgactttttaattacagtgcacacctttgataattaaagggttttattgaaaatcgtgataaatttaaacttttgcttaaactttttaacttttataattttatactcatattcatacacaaagtcagaatcctgctttcaaaacatttctttgaatataaaatacactttacaaatatgtcacacaacgactacaaaatgaagcctaagtcgtcccgagaccaaactctccaggtcgtaccctcttgacatgtataatcattcccgagctctggactcactgctgctcagccttagcctttcctttacctacacatgcaaataatatatgtgagtcgacagactcaataagaaaagtatacaacacataatatattaccgacttgtatttacgtatatttttaaaacaatcccaaatatatatttcacacagtagtaatttttaaaagataaaaccctaaggggtgacctagtagtaaagaagagtcttgggaaaaaaagaacttggggccactagatgagatttttcgatcgatctgtcagagccaaaaattcagaaaaatgtattttaaaaaagaatattgatatggtactagtggtgcttgtgaataaatgatttttaccctctgtaaatttaggtgtatttaccacacgtggtggtcctggttgttgtaacaaactctgtcctttttgtgtaccgttagaatattctttattatatgtaaaaggtatttgattgtgtaatgattgtataggattctctgctgtaaatgattggtatataaatttaattggccagctctgttattcattgagctgagcatttttcaagtttctttgtttgttattttctttaagttggtatcagagcaatccgtacaccggtggtgttcgtttctttttctcctccatggcagacccttcaactcctactgctcaaggtgaacaagacagctcagctggaataagtgcttccagttttgttgctcaaccctcagctcctactgcagcgatgccaggacctcatgttggcagcacgctaactcaaccttcgctctaaagctggacaggaataattacaccttgtggaagacaatggtctctgccattgtccgtggtcaccggttggatggctacttgaatgctactaaggtaaaaccctcgagttcttaccctcagaaatctcaggtggaaattcagttgttgtaaacccagattttgaaacatggattgtccatgatcaactcctccttggttggctgtatggatccatgaccgaaagcatagctacagaggtcatgggttgtgactcttcaactagcttatggcaggcgctcgagactctttttggtgctcattcttgtgtcaaaatggatgagtatcgaaccaagattcaaacctccagaaaaggagccatgtccatggccaattatcttcgtcaaaaacgttagtgggctgatgttctcactcttgctggggatccctaccctgaaaagcaactggtgtcgaatgtgttatctggtttggatatcgaatatctgcccatagttcttcaggttgaagcaagggtctctacttcgtggcaggagctgcaagacatcctcctaagcttcgatagtaaactggatcgtctaactactctttctggtgcaatgaaaaatactggtttaactaacccctctgctaatcttgctgctaccagaccatctcatcctgcaggaaataaaggagctcacacaggtcagttttgacctggaaatcgtggaaattcatcctaatagagaggaggaagaggccctggtcaattcagaggcagaggaggtggtagaaatcaaaacaactccaaaccaacatgtcaagtatgtgggagatatggtcatagtgcagcgtactgctacaaccggtatgatgaatcatacatgggttcggatccttctggttcaaactccgctggcaaaaactctcaatctgctaacactggtggtggaggagcctcgacttttgttgcaacaccagaaatggtggaagatattgcttggtacgtgaattcgggagctagtaatcatgttactgcggatgtcaacaacatgaataaaaagaccgattacaatggtcaggaaactctaactgttggaaatggtaataaacttgatatcactcatgtgggtactagttggctgaatggtaaaaataaatgtccattaattcttagtatgttttacatgttccaaagattgccaagaatttattgagtatttcttgacagccgataataatgtttttgtggaattctttgctcaatcttgttttgtgaaggacatggacacaaagaaggtgcttctcaaagggggacttagagatggattgtatcaactttcagaccaaccaagtccttccttcagctctagttcgagtcctaagtctgctggttttagttttccctttactagtttagtgtcaaaatctaaggataagcatgttgctgtatccaagttcatttccctaagagacaaatggcataagtgtttaggccatccgtttaatcgtgtgttgagtcatgttaatgtaaaaccagttatgaatgaaaaataaactttttgtgaagcttgtcaatatgggaaatcacatgctttaccatttgctttaaactcaaatcgtgccaaatctcctctcgatcttatacatacagatgtttgggggccagctcccatcacatctaatcttaattacaagttttacatccatttcgcggatgaccacagtagacacacatggatatatcctctcaaaaccaaaaatgaggcacttgctgccttccttcaattcaaaacgcttgtagaaaaccagtttgataggaaaatcaaggccattaaaacggattggggtggtgaatttcaatcctttgctaagtgtgtcatagagaatggaattgaattcacacatccttgtcctcatacatctgcccaaaatgggagagccgagaggaaacacagacatatcgtcgagatgggcttgacacttcttgctcaagctcatatgcctctcaaatattggtgggactcattccaaactgccgtctatctaatcaatagacttccaacaccaatcttcaaagataaatctccctatgaaatcattcatgatagaaaaccagattataagtttctcaaaacctttggtgttgcttgtttcccgtgtcttagaccttaccaaacacataaattccaattccactgaaccaagtgtgtcaatctagggtatagtgacgctcacaaaggctataagtgccttagttcaataaggagactttatatttctcgaaatgtcatcttcaatgaagatgacttcccttttcgaactggttttctaaacacacaccaacctgaggcagctgttaatgttcaagttccctcctggactgccttgttccaatctaaaagttctaataaaagcaatcgatacaatctatctactgaagtccctggagaagacaccaactctgagtctattgttcaagctcgaaatcaggagagtcaagtttctg

SEQ ID NO: 27629 - DNA, 1867 bp, Cannabis sativa
  modified_base (179)..(180): a, c, t, g, unknown or other
cataaatatgttgcttagcgactataaaatataggtccaaatcatcctgagatcgaactctctaggtctactcccttaatatgtacaatcatcttcgagctctagatttacttgtgctcagtttttgtctttcctttacctacacatgcaaacaacaactgtgagtcgacaaactcagnnagaaaagcatataacatataacatactagcgacttgtatttaggcacctatacacctatttataagacttaacaaataatcaagaacgttcttaacagaagtacgacctttgtaccacatgcaccaagtacatttggtcgcattatcctcaatagttgatagaaaagtgtcgacagcacattggctccctgagggactgacacgtagacccagttcctgatggaaaggatgacgtattagtagatagctcccatagagctagcctcgcttaatgtgaatttgcgagaggatgtgattaagacagggtctactcgcatactatacctcgcatagtcaaaagaataagcaagaccaggaggatttaatactggtcgcacatataccaagtatatgcgatgaccaagtaaacctctcctgtgactagtaaagatcgtttatttacatgggtttggtccaaatgactagcgtgttagacgactcgttagggactcgcatgttccacgttgtcaacacatggaatgtccgattatccaatcatgatgaatgcagacatccaaacgattggcctgaaggccatcctgcgagcataacatcgtagagattgtgagcttgtgtgtcgggatatgaacaggcaactcgctgcttaacaagtcgcacatgttgctgcacttaatacaaaaatagattaaaatattcttcatttattctttaagcatttattttgagtaaatactgtaagttattataaaaacagttttaaaccgattagtcatgtaatcttaaaatacacttgcttttttatataaaggaatgatccgaatcaaatagaccaagctaaaatcattgtaacaatggactaagcaagctgagcactgactgaactactataattctcttgcgttctctttatttctgctttcattttatctatttagtagccaataatttgagtactcgttaatctaaatgagtgctcgcacatttgtaattggatattctaattttcttcgaatacacatataaatttggtattgtctaaattaatctgacaacatattcctaatatatttttggagagagtgatgtaaagttatctagacctccctaaagccttatatttttttaagagtatctatgatgtactttaaggtacctaacaacaccatattaatgtagcgggttgtaagtggttactaattctctatattatttattaaattaaaatatttaaagttagatattaaattatagggtaatttacggcataaatacttaagtttaattctcagttgtaaataaatacataagtgtaattttttgcggtaataatacctaagttaaaattctagaactccgtaggtactcgaccattaaatattaaaaattaaaaattaaaacaaaatattaaaactatttaaactatttttaaacaaaatattaaaaatttaatgacttgcaccaatcaagaattgtcacgtttaacaacaaagtagctacagaagttacagaattaaaacttaagtattattaccgtaaaaaattaattaagtatttatttacaactgaaagttaaatttaaatatttatactgtaaattactctaaattatatcaataatagtacgttattccttaataagtgaaaaaatatttataattaatggtaaaaaataaggggtatttttatt

SEQ ID NO: 27630 - DNA, 2488 bp, Cannabis sativa
  modified_base (1907)..(1909): a, c, t, g, unknown or other
aaggattttaaaaaaaaaaaaaaaaaacatgaaataccaattagaggagcacatgaacacgaagcaaagtaacaagatggagttgtgagagagaaaatgaaacaaaagagaagaaagagaataaaatgatagatgttacttacctggaattggtggagtactccgagagtttgcctttagtggagaagacgatcaaggcgacttcagcatcgcaaagcacagagatctcatgtgccttcttcaacaacccagaacgacgcttcgagaatgtcacctgtctgttgatcttgttctcgatcctcttcatctccactcgtcctcgccccatgatgtatatgtgtgtatatatatatatatatgaatatattttatatatatctaaactatacgcacacgcaacactactatatttgtagctcccctcccaacttacaaatattcaccttgattttcgcagaaaatttcttaagaaagaaagaaagagaaacgactttcgagtcgtcgtcttccaaagaagatagatatatagagagattgaaagagtgttttagtgtaaatatggtgtgggaaagattggttctgttatattatgcagaattttatgtatatatatttttggaaaattattgaaaaccatcctgattttagatggctagtattataaaaccgggagtggtttcgtctaaaatgttgtcgaattttgattggttggtttggtgtaataaaccggaattttcatttaaatctaatttaaatttgtcatctttctcaccacacactttattttgtttttttgttatttatttttttttaaaaaaaaaaaattacatactttatttcctttagtgactccgcttttttcaacttttaatttttactttttacttttaattgcgtttcctcgtatatttgcaacccaggtacaaaattttgtcatctatgtgctatgttatttattaattatttttttttttttttttggatgaattttgaaagattaataataaaaattaataacacatagtagttctagtaaagcaataaatctatcaaaaaaaaaaatgttgttttgttttgcttttcacattttcactttagtgataaaaaaaaggaattacatcaccggttgaggagattctaccattcaaaaaaactcattatttattctaacagcatgtttaatcaatcgataagccgcaatattaaaattgtgcataacatcaaagaaatgctatgttatacccgaaattcggctagtacatcagaggaagacacgtgtcaagctgagaagaataaagaactcaaacatgtaatcataattacacttgacatggaataactcgttaaaagcataattaacagagtatgtttacaactcggatgactgaacagtcttatgcatgcgagataaaaatgtacaaactattgccttctaccttgatgagaaaccatgtaactttaggtgtgcaagacgaggcactaacctcgttacgtggaggagatataatgacaatagagatacttagcgtacaatgtacgatatacaagctaagtataacagatgggtgaaccaaagcgagagacaacgaggcgtccattgcagaataagatcaaaaaaggcacggaaaaaatcatacaaaaaaggccctgagaaaaccatcagaaatctgaataagattgactcgtggactatgcaaaattttaactgcaaaaccaccgtaaaaaatcctgtgtgttcatactttttattttacagcctttatttttctgtgtgagaatgtcactgttaggctcaaatttggttaacgaaaatctgtgttagcagtttggtgctttcattgagatcctctgtgaaaaagctaaaaaaaaaaccctcatttcttttgaagaaaaaccacctccttcannnctgaaaatctagaaaatgttaataccccacataaagaaattcatcatcgttctgggaaagagcccatgggctccagaaggtctaccaacccacggtctcaacggaccacccgctctaggaggactcaacctgagagtggccccaacactcggaccacacatttacgaagaacccaacccgacgttggtcctagtacgcggacaacacgcttgaggagaactcagcttgggagtggccagaaccctgggacgagggatgaagcgcccaatcgtggtggtgcccaccctatgggagaaggtacttatgaaatagaaaatcgctgcctaagacgccgtctggaagaggcgcagcggtggaacgctgaattagaacgtgacggagtcgcggtcagggtggcacaggggactaatgctcaaaatcaacctgaacctagagtgagaagaccacgaggcagacctcgtggctcacgaaccaggagacaggaaaatccacgggaagaacaacctattaggttttgtgccctaaataaaatccattacaatctgattagtcattaatttaagaaatttaaagtgattt

SEQ ID NO: 27631 - DNA, 2569 bp, Cannabis sativa
  modified_base (45)..(52): a, c, t, g, unknown or other
cactttagaaacccaaaccgtaattttttttaaaaaaaaagttannnnnnnngtatatggggtaattcccctattatttttttttattttaatttggtttgagtagagtatttttagctttgtaatcacttaaaaatgtgttaaaatgaaccagttatgatttttacaaaactgatggttacaccatttttttgaaatctgggttaagtaacgtttttgtaaaaataattggggacatatcttgggaaaattattgtagacttctaagacatgtaatattcacctgtgaaaatattagatttttattctttatatatagtttggtactgtttattatgcaaagttagtacaaaaatttgtccctagacagtatgtgttcttgaattgtaaaaatagtttgttatagttgcacttgtccaaatggtttaaaaatttacagagagctaatttttaatgtacctaaacccagaaaaatttcaaaggttttggcttggtaaatttttagcctttttggcctaaagtgattaaataaataaaattaatttttttattataaatgttatccgaattttgcacagggtgatgtggcctctagcatggtgacacgtggagaacatagaaaagtttggatgtataatttttcctcaacgacccgaccagagaactctatgcttaaaacaggtaagtttatgccttaagaaagaattaatccagatagaacctgctcgtgattgtccgcaaagatttttattatccagtgaagccaaatcctctgagaaggatatcacacagaataagatattcaaggatatttgccataaatatatccttatccaaatcaaatccctattatgtgatcccttaattgttaagagaaacttaattaatgtatttttctccaataaatagtgatccatttcattattaagggatcctaaaattatattctcttgagacctcttacgttgtcaagtttttatttttagaagtctaatgtatgtttaagagtttgcataagacttagcattgccatttttttaggaatattaagtagtatccccataacttaagttaagaccactttatagaaagtgatgaaatatctttcttgagatatattaaagactacattcataatttattgagatcaagaattgacaatctgaaaatatagttacctatttagattccaactccattgctatgttaattcacgtgaatcaacatttaattacgtctttaagattactagtaagttgtatcgttgagaatcttaattatttttttcattataaaagttagatgcatttattgttttgaaaatacatctagtatggtgtattatagagtttcatactaagccaagagtttagagttatattttcagactattaagaaaattttgcgataaattcagttacagtatttatggatataatagttctagtcaaagttagcatatcgacatcgactatttagccataaagaagcataagttgtcattaagcatgcaagactgaattgggtgatcgcaatatccttgactaaaggcatgccgcaacacaaattcaaggatcgtaaagtaaatatgagattcagtttttccttatagagtttttcgttgtataactaaattattcaatgaaactctattttcgatattttctcatattcatgtgcagcttaatttcatttgagaaaattatctttagaggaccagaataaacataaggtttaggatttttttgcttaagtatattgttgcattaagtatattgttatgtaataaatatatcgtaatacatgaaagataatactcgtcatacaatgaagatatattgccatgatttatatgtttgttatatagcaaggataacaatctcctattacaatttcttagtcaacctttatgcctgaaaatatatgtcgaaatatttttgttcattttttttttctcatgacagtgttcgttataattacaacatcattcctgtaaatttttgaatagttgacagtgtcgacaataagtttgaagttttttgaacacacatggtaaactggaatattaagaactctattttcgatactgtaaattaactattatgaatttctttaaatttacagggataatattgtaactataacgaataccactataaaaaaaatattttggcatatgattttggagataatagttgattaagaggttgtaataggaagttataattagcactcatctaaggataatcgttgggttttaaatggtaaattaatttaaatattgacaagtggaagaatgttataatattttatatatagtaatagatcaatgatttgatttataaaatataattaattaagaatattctaattatggtaacaatttatttaccaaatatttcagttattcaatttaattatttgaattaattgtaaaaatattatgacaattaatatcacacaaatactgatgaagtatctattgaaaaattgttgtgctccaatagaaatatcaaaccaacaaatttacaactctatgataaataatacaaatgacaaaaatatagat

SEQ ID NO: 27632 - DNA, 4206 bp, Cannabis sativa
  modified_base (29)..(31): a, c, t, g, unknown or other
aaaatgctcatctggttaaactatcaaannnttcaaatttaatttaaaataatatttaaaatttaactaattctaaatatcaaaatttgagaataatttttatatttaggtttaattaactaacaggatgtgaccctttacgtggcaacatctaataatttgtagccacattttatatacaataaatataagaatagaatatacatttgatctattaagttttacaatataattttattacatgtattagatttttaaattactattttctttacattaaaatgttatttatatatataattttttctttataaataagtgtggattgaattggatcggttacttttacatgtcaatcaaccacaagtgcggattttaaattttccaatcctatctaatccacacaagtgcagattagattggattgaatcgtgctattttatgaatacccttactttttagttaaaaatattattagtttgcttttcaattcctagttcatgttctatatacggccattaaaattgctcattaattaattgtgcatgcacatggatggctaacttgtttgattgatgcttttccaataattgttaatgatgtattaaactttgattgttattaattaagggtttaacttcaacaaaaactaaaaataatacattgccattacgagaaaaatcagaactttaaaaaaaggctataaggttgcgaactttccttcaacaaagtagaaaacaaacattgaatcttcaactatatagaggatggacaaagtagcaaaataagtatatataaacaggtaataaaaagaaaaagagaagagtgttgtgcaaagttgatgctattatttacatgttatatatcattattggtaatgttttttagtggcatttatttacaagggcaacagaagataaaacccaagaacatagtatccacaattttccgtaacacagtcaagcctcctatggcttctctaaaatgcacccatagtagtagaaacactgttaataaccttcacggagaataaaagaatatctgcacatctgacataaaaagtgccaacattaattaccttcttagagaatgacaactactgtaattgagttcataaaaactggaattcccagtgtggggaaaaccaaagagaagaaacaaaaactacactagcaaactaaaaaaaatacctctaatcaacctcgtcgcaatcgtcatcaaaatgattctccattttcaggccttctatgttattatttacatacttgagttgagcctccattcttaagctctctttattatttacagtctcaagctgagttgtcgtttttgagatgtcattggtatttacaaagcgctcagttgctactggcgcctgcagaccatcacacctagtttcttcaatgccattgtgaagatctgccgctacagcaccaccgtcagccaaggagtcgagcgaagcagagctgcttctgtgagaaagactgccattttcagacaccccagacttttgatataggtgcctcccattggtattgttatctataccatgagtcctgtatacaaaacaaaagcaacaatacatacattcactatacaagctccgactaatttgagcaagaaaaagaataataacaaaagacttgaaacccagactaagtgtacctcatcttttggtacttgatagtctggaagtagtcgaaaactggaaccaagtcttttgatctggtttcgaatgtacgagtgggaaatctttctatctcaacttctccaccggaagaaatttctttatccatgttaatgtcctccatcaccaacgactgaaagtatatctaatgaaaaaatcaacgacgaacatatcaaatgacaaatgaaagggctcacatgagtcgcacattaaaatttaatggcaaaattatatacctcgggttttgcccatagtggactccgagcttcatgcatctgcaattcagcttcagatataaacaaatgatgtttttcttcaagagtaatctttccttttgtccccagaccctcagcttcaggaaatatggtatttcctttcttagctgcctcagggtatacctttttactgtctgccatgccattgtcgccataaatatcaacattatcttcccgttctctcctattttgtttctgacatatattccacttctggatagcctcaaccagtaatcttgcatcatgctcttgacctgattcataattagtgtttaaccccgacacagcagtcattgcatctataccagttgatattcgtaatgcatactgtatcatgcaaccagaaggagaaaaaaccaacaggtgttgtttcatccttgaggagctacaatccatgtacaatgctttgcctttgcagttgtggaaagatgaagctacagccccagagagagaactcatcctacctgttgcagctgctgctgcgccacttacagttcctctccagctatgtccattttttattcgacttacagcagagagagtaactggtacacctgatggaccaaggttctgccgattaggcatttgtagacctgaattgagtggccaactgctatgcgacctattcacagcccccaatccattacttttgccagtaaaaatagcatcagcatcagggataattactgatcctcccataggatttatggcaaagagatggtttgttcccctagaggaactaatcattatccagttgctgccatcactgaagctaatatcctgtatgacctggacccagaaaataaataaactactaaacacaaaagcaacaaattaaacaaaattaacgagacccatgcagtacttactgcattagtaaaaccacgttgcagcctgtaaagatgaacatatgatgaagctgtatcacatgcagaagaacttccagcatggccaggcattattttaaaaacattaatgttatggccctgaactgaagccgtgactagaaggataccactaggatcgaaacataatgctgaaataggactcttgtgtgctctgaattgagcgataacagctttactaacaatgtctttgacaatgacctgacaaaagaaataataataatcatattgagaaaaattcttagagagaaaagaaaaagcaaataaaatagaatatgaagtaaacatacataccattccaacattatctgcatctgtcaaatggccattaacagttccattgcctttccagcctgaactgcccaactgatgagcattattggcatcaggcaagagctcggagcaatacctggacagtttcttatatcccatgtctcccagggtcacaattcccactgcaagttgcttgcttgattcttttgcatagtgggcaaccatgctcccatttgacgggaaacttgcagaaggagtcagatgttgtggacttacacgcccagcattacaggatacaactgggcacccagtgtaagccagccaccttggacccactgcaagaggtccataccctataccccctggagttgggcaccctgtaactatgggatttgtaagaatagtatattccctctccaaagttgaagcattaatgcagtgtatctgaaatacataatggctaaattcataaaaaaaaaatacttaagcagaagatacaatatagatacaactttaagaataaaaaagtatacctgagtggctaaagtgatagcaacaactcgggaactgcaccttacagaataaacagctgatctaaacttgatattgtaaacataagattgagaccttagggaataaaagaatacagcagttggcacaaaacttccattgcttgcatcatggccgttttgaatgctcgaattgtgtggagtgggtaatacatcctgcatattatttccaacagaaagattcccatcagcacaaactaccagtaatggacggctgtctgcaaacttgtcttcagatctcttcaatgcaattggtttacgtaacatttgcatgaatgaaacaggaccaccatgtctagaaactaggtctctaacattgtcagcctcttcaacatcccaaacctggaaaccagatctgtatcccagcaagaggactcgacgaatgttatctccctcaccctccagcttgtcaaacccggcccagtttaccttcatgtcaaatgagaagaaagagcaaatagtttagaaggggaaaaagttatacaagtaaatgctga

SEQ ID NO: 27633 - DNA, 2404 bp, Cannabis sativa
  modified_base (719)..(732): a, c, t, g, unknown or other
ttttattttaatttctagaaaaaatctgattggttaagatgggtcctttaaaacaacactaaaaattgcttccatcaatgatgttctaatactccatctttattggtcctctctcatatttattttttgcataaatattattttttacactattttttataaaaaatcattaattacactttttattttaataaatgacaaattaaatcttatatttttttaaaataatattaaataatattctaaattattttttactaaaataaaatttaataacaagctgatataaatatatcataacaaaactaattatgttttctatatctattcatgccaagatttatcttcaagataattttattaaaaaagaaaaaaattattaaaaattaagcttagaatcttatttttataatttaaaaaatacataatttattttgtaattcaataaaataaaaaattcaatcaaaaacttttacataatacagaatctacataattaagaaaaataaagaataatcatatatatatatatttataaaaaaatgattaagaattaaatctaatcataatttcaatataaaagaaatgattttattacaaaatgatatatttacttgttgggctgggctggcagcaacattagtggggacgttttgtccaaaaaggaaggaaggtgtggatattttaggagaggagagagaataataataataataatnnnnnnnnnnnnnntaataataataataatatgtataaggtgacgtggccacgtggagtgggacccattctaggtgtttgccactcattttgaaggggtctctcttatccagctgtaaacttacacgcgtgttgcccactcaactcgacgattatgtgggccccacccttttgctaacttcaccacctcaacaatcaccactttacttattttcatttaatttgataatttcaatttcattatcttttattaagttaagtgagctcattatcttatcaattcattttatttgtcggaaatttttatttaataagagtagtgacaaaaacatatttttgagattttttgcaaaagtgtaatgttttcaaaatatacatagtcatatccaaaatgtacataactatatatgagtagcaaatcctttataacatatcgacacttgaaaatttataagaaaaacctagtaaaatacccttctgatctctacattatacatttatcagcaccagaaacaatattatcacataatcataatttattatatatatatagctaaatgtgtaaagatttcatagagttgttgttgttgtaacaatgagaaacattgtagaataaatataaaagaaccgtaatcgcattttcttctctctatacaatataacactttcttttgcttttcttctttttcctgggacacatacaatggaaaaaaagaaagaaaaaaaataaaagctcacaaaaactaacacacctatgaacaaaacaagaactaaccagtggaagaaccaacatgatgatccatcatcatcatataccttagaaactcaggcaatttccttttcttttctctctctctttaatcaaataataagtacacaaatatatatatgtatatatttgtgaaagaaagaacaaaatagcaacttcccgcaaaccccaacaaaatatatataaatgagtgtgtgtaaattgtaatatatatatatatatatatctatatcatatgtatgcttgtatttatatatgtattcactttgtaattcttctctttccttgggcatgaactgcctgctttgcaggcctgtaagaaggttgaaccagttgactagccccaatggatgattttcgtgatagtgcaggtgaaggaattagggatggaatcatactcctggttaagaacaaacacaaaatcattgcttttaaaattagaacattcatatttgttaaaacaaaacttaagaccattcatcatatagaagcaaagctgtgtaaaaactgtttaacaaaaattatggattggatttttattttgttaaataacaatttggatttgtgtctacttcaaaacagaacatagtaccttgagctcaaaaatagaacataataatactctttagagatgttatgatcaggtttatattttgagtaaaattaggcttaagatattcttatatactattttgaaaattacaggatttaaattgtcatttaataaaacagaatatctgatcggtaacttatggtaacttatgcaaagtacagaatcaaaatggtattattacccatatttttaatagtgaaaaagttttgactagtgcttaagtggtaaaaacgatgccacacaagtgtttttatcacaaatgcttttatgggaatgcattggaaaatttacctggtttctgtgct

SEQ ID NO: 27634 - DNA, 2921 bp, Cannabis sativa
aaaattcagaaaaaaaaaaaaacaattcttaattttgtatttaaaaaaattaccctgtacatggaggctttgtactattttcgtcacacttccattgtccaattgttttatacacttttctgtaaaaacataatatcaaaaatacataatttactatttaatctgacacacattttttttttttgctttttttgataaaaattcaaaagaaagaaaatacctgtgtactctttgttccttgactctttctgtgatttgatgatgaatttcagtagattttgtaggatcaagggctggttgtgatatttccaatccttcttctctaactattgacaaatatctaaatccatacaaaaataccaaacatctcactaaattatttatacataatcaaagtcaaaagtaaattctcatacctaatttttgtaaatagtgtcacatattaatacagatgaactcaaatattaagtgaatggatactaataactaataagttaccttttaacattgaaatgtttaactccaagatcttcatcccaaagaaatatataagcatagtctgaaagaatgtctggatgcatgaaacgttttgcaaaccacctaataaaaacaatatcaaactattatataacacaattttaatttctattatatgtatatctatacatatatataattaattaatataccatttagtttgatgtaaagcagagacatgtatagcttgatcacaccattcaaagtttctccattgatttacatttccatcataatgaaatagcatcacaacaaaattactcttcaaaaactgtaaaacaatgagtaagaaaaataacattaaaagttattaattatttaaaaaatttattaaaaaaattgaatttttaacaagaaagaactcttaccttattcacaattgtattaacgtttttctttaatttaatccccacagccattgccagcaagtttttttgcactttggggttctgtacatattaacaaaaattcactgtaatttcaatatttcattatattatgtagaaatatacacaaaaataaaaaagaaactaaagaaatgtaacctttttaattcttggaccccacaatggttgcatttgcaagtcagaagtcttgctgactattcctctaggcaaatcaacttcatttcttttctaaaatacatataatatttaaacaataccataagtcttgatttgaataaaaatcacattataatttatatatatacatatagatacagatattcattccattcttgagtaatatacacattactaatagatgaattagggacaaacctcataagaattgggaattgttgtagcattgagattgcactctgaaaggttctgtttaagattgtaaacctgaaaataatattgtattaattatttataaacaaaaaaaattataatgtgaaatttatttatagggagagacaatagatataatagggaacaaacctgagaagaattgtgataacttgtaattgtagcattgagattattcaactctaaaagactctgtttaaagattgtaaacataaaaaaatatattgtattaattatttataaacaaaaaattataatatgaaatttataaacataaaaaatgtttatatatatactgaccaatttacaatcagaggcagattttgcattccaaactagaagaagggaagaaatcaccgcagccaaaatgataacataataataaaatggtttatatcgtttattgttataattattattatgaatatccattcttctagatttctttgggaaaatcaaacaacaatggtgttattagtatatatcaaaacccagagaaataaagaacaagaagaaaagaaaataataataataataaaaaaaagagtgacttacaaaagttgacttgttcatatctttcaagaaaatatatatgtacactttgtttctttcttcttctgtttcctgtttttgattgtctgattgaaaaaagaaaataaatatagaaagagatgtgtaatatatatagttatatatatatatatatatgtgtgtgtatattggggtggtggactatatagatataaagggcaagaaataaggcattaaaaagcagagcacgtgaagaagcaaaggttaagttgagtaagagctagaaaaggtagaagtaccaagattacgtcttaaatattttaggagaaaaaaaaaagagattggaggaaaatatatagtcaattataagtaagaaaaaatgtcttaatttgttatcaatcaatatttattattaccaattatacatagttattatatgaaaatatatcaagaagatacgaaaatgggagagaaagagaatgttaaggaatgtatagtacctaataacaaaatcaaataccatagaattaaaatggaaagatatgtatgattcatgaatcaacattaaagttttattttcatatttgaattgccatttaccattacaatgttatagtagatatggtttctttcatttaggcagtgaagcattgtgctcttttcaagacaaaaaaactatatcaatataattaggcataatgtttacagcctacttttttttcatttatttatttaactaattaatttttttttttttgagtatattaatcaaatttattggtgagagttaaataatacattggacattaaatttggtcattaaataaggaggattttatttggtatttaacaataaaaaactaagggaaccttaaaaagcaaaacaaaattaaaagttggtggattttgcctaaaaaaattgtttgggaggtgtaactcaccaaatagcaaaattttgatagttatatgtggcaaattaccctatccttaaattattaattaataaaaaatagtttatttattttaattattttgaat

SEQ ID NO: 27635 - DNA, 3329 bp, Cannabis sativa
caaaattcttatttttgtaactttttttattgaaagttactttcaaaaaatatggtcaaatgctcctatttgttctcatcaaaaaacaatttttcaatttttaaaaacaaaaaataattttttaattatgatatcaatgtactaaatctatacataatatatatagttagctctacacatactactcaaaacttacaaataaactcctagtataacaagttaattttaccaaatatactaaaaaaaaagtgttattaaatgaacaaagtacctatggtcaagatgactaagtgcatgtttgacccatgtgttaaaaaactgttttttataatgtgttacacaaaatttgtgtagagaaacattagttcattattaatgttgacactctccaataatataagaacgcgatcattgggaaacacgctctttgagacagtgtttaactctcaaaataaactaaaattttatttctcattagatatccctataatcagacttggctttgggtatacgcaaattaggcctatacttaaagttcatctagcttagtggtccaaaaaaaattatactcttttaaaaaaatatttttttttaattaattttgaaaataccacaattttttcaaaataaagacccaaaaatatttttcttcctatgatgacatactaaatttcagaaaatctctatacaattacatgttttcaaaacattatatatatatactatttataaattagtaataaactctttgtgtaacatgactacaacctttgtaattggctacaccatattcatgttccatacttctatatattaaatatggaatgtttataatttataaagagaagaagaatatacctaaagccaattggtttgtgaggtgaatgaaattgaggatgaacaatgaacctaatataattcctccaataatggagttggtttatttggttgtcccctttatcaaaattggtaccataacatattgggtccaaaacataagtatccaaagacccttcaaactctttcttatcttcttctaccatattgaaaaaattatcacatccttccatcattttcttcattaaatcatccgaaatgccatggttgatcaactgcatttactcaaatttcacatataaatttcacagttttcttaaatgacttaaatgatgatgagatttactattctaaatatgtagtatgtgcacatattaatactcatttataagttgacgataataataatattgtgcgtccatatatggagggaggcagaaaataattatgaggggccaaagtgaaaaataataatttaaggggagctaataaataaatttaaaaaaataagaaaatattatataaatatatatatattaaaatgttggcctcccctggcagagccataattgctttttgaaaaagttgtaattctcatcccattcggggtgggtatccgtggatatttattcccgcaaatcaaattttcatttctattcgagaggacaaaaaataaaaactggatatttaaaaaaatatataatttttgttggaaaaaaatataaaaatcttatcaggagtaaatgtaaaaatgtacatagacaaaataaaaatataaaaaaattataaatttatgtataaaatttgaaaaagagaaaactgaggtaaggtcgagagtcatgtctcgacctccctctgctattaatatacataaatttgatacatatttatataataaacttttaattaccatgaaaaatccccaatcttcacatgccttgcggaggtcaaaaaggatttttgagcgctgatcaagattgtcagaggtaagaagagaaatatcaatagtagggattgaatattcgaaatgatgagaatccactacttcttcatcactaggtttcacaacaaaagcgtatttggaagccaataaatttgaatcttccatagtgatgatatgtatatataaagagaaaaattatgatttagtttagttgtaattattataagcttaagcatttctcgtgttatatttataggcaactataaatggtttatgcttatgaaattattatgccacttgatgtaagaaaaatataaaataaagaaccacttgatgtataaaatttgattcaaagtatttttataattttaatatatttttatataaattcaataatacatgaattcgtacttatcaccacaaacaaaaagtattcataaaccatacctgcccatccacggtttaatttgcagccaatacggttactagggaggtaaacggggagggacgggggcaggaattgttccttcatcccatacctgccctaatactgtttaaattaaagcagggacgagatgagaattacctgatgggagaaagattcttatcatgcacctattacatatatatttttaaaaaagatgatatctcaaagaaaaataaaaaaaaatcatcataaaaactcattaaaacaataaaaataagtggaatagtgtgtataataaatggagttagcaaatataaaattaataattaaaaataaatagttaagtgttatttttttaaagcagctaagtgtgattattaatatgtaacaaaaccgaactgtctcattgaaatcaataaaaaacttagagcatttaactgtaataattatggttttaaaactagaatatacatatattatatattgaggcagattcggagcgagtatctattccttcgctcctgctctgaacccgactcgggtatgaacatttcaatcaatattccatacttgtcctgaccccaaaattcaacccccactctattaggggtggatatcctaacccacgaatataattgtcatccctaactgctagagtagtatagggtcgtctatagtttttataagacctaggacaatttaaaaaatgagtttttatttgaaaatgaaattcgaataagtttttttatgtttttctagataaaaaaattaggaagcctgtgttaggaaacactgttgtaaagaccgcatatggttaataccttgaattattaaataattagggtttatgtatgagatgttattatcattaataaaatacaattatgggaatttaattgagttcatttatgtttttatgttattatgctatttaattactcaattcctgtgttgtgttcggaagctgtggagagcgatgttgggcctttagagagtcgcattgtatataatttagaatactatcggggtattattgttaggtattagaggtgttgtgaattggacgggatttgtaaatgtctaaaatgcccttggtattgtttaacctttggcttaagttaa

SEQ ID NO: 27636 - DNA, 3995 bp, Cannabis sativa
  modified_base (3426)..(3427): a, c, t, g, unknown or other
  modified_base (3605)..(3605): a, c, t, g, unknown or other
ttagccttagtgttctcatcataccaactatcgaacctatgggtaattaaatcaacgctattctaaatgaagaaattatattggctatctttaaattgaactaaggttgtacgctcggtcctaaggacggtaggagaccatccataaacacaagaattattacctcggggagccccatctttaacctcggtggcttcccgagtggttatatttttaaagtaatggataagagcaacatagttgcggtcttcttcatcctcgggcactggaactttttgccaagtagggtacttgggggacttatagtcatttgtacattagtccttgttaagaagagcgcatgacttttaattatctgcgtgtaataaaaagtcagcaactcgcaaaccatatgaaaggttagtcagaatctcgtgtctattttggatttcaagtggttgaatatgtctccttgcaacagctaaaaatataaaagaaaaaccagatttagtaaagtattaaaatcataaaaaagacaactctaaatcaagattttgggaatgattaatacttacgtaaattctaaatatggtcggtgttaattgggtggaatctagttgtctaaaaagaagtcttccttaaattaatttttgttgagaagcctctctctaatcgtacgataattgatttgagtccccatgtagtaaaagccttatgctccttgctttctcgcaggacaggctttgacggagtaaaagtataaaatttcaaggggtgttggacactccaacttcaagatatggtagagcgacttcaagcaggcaagaatcctataagagtttggggcgagttgaaagggtgaaatcccaaggtagttgcagaattttttgaaataatccctaaaggggagtacagctcttgaagcccctatctttgaggactcgcttgtgctgtaaccttcatcttttaagacacgttcaagggggaaacaattaaattttccaggtgcaactgagtagatgcaacatcctttctcgttcctaatgctacaagatcttagaacatccccagcataagggacaattgatctgaccctagacttgatcagttctgcttcaaatgtagcagtgacagtaggattcaagggcatcttggatttgcgagctttaggagccataagttcaaattccaaggcacctggtgaaaaaacaacagtgactttggtaaaaataatggccttgctaagaaaatatctactaagttaggtgactcaggccgagttacttctcgtagataacgatgtctagcctcaatgacttcttgtaagaatcgcctatagtggttagaaacctcttcctgattggtcctaataagatttttttctaattgttttgtcattaattttgactatggactaaggtttatgagtttaaggtttaaaaactatgcttggaattgaggatagtctgtaactaaaggctttgggactgtaattttgagttgaattgagacataataatcacaaaatataatgcccaaattcttagaaaaacagagcacagataaaatctaggacctgcaaatcacgtaaccttaaaatttctagacctagattacttgaaaatatatataaaactcactcaaacaacaaatgatccaaaatgaaaagaagcatatataaaaaaaaaatcaaaatggataaaataaaaaggttaataaaaagagaaatcacttattagtttgacgaaagaatttggatctcgaagagcttcttagtgcaagggcttggatcttggcaattttgggattgagatatgaaatcgatcgaagtttgaagaaaataagtgagggacagtgagggcatgcaatttcagaaagaagatgactgaggttttttggagctctaaaagcttcgtgggtgatactgacaaaattgaaggaatcttgaatttcatacccaaaaggtgactactgttcgatcacaatgttgacagatcgaacggatgggaactattggaaagagaaaaatcagaataattaatgtttaaatggtatatctcaaagttttgaactgccaaaagaaaacatgcaatttttaaataagaaaagtacgatcgcacccacaaggcaattaaaaagtcctttatattttaaaaatcactttttaggggacaattgttatacccatatttcgagcagtaatatagtgctaacacatgtaatatagctggaatacgaaccagcttaaattatgcatcaataaatacattcagatgactcatctcgagaaatacagctattagaaatacgcaaactcatcatcctatagataataacaagacacgagtaataaatacctattgatgagccagcgagacgaataaagaaagtccatctcaggataaatataatacattacagaattgtttggaaagcgtagataatgagtttgcaactcattgacgtcccacatacacgtgagtatattgaaagatcaaagacaacaacttcagcatgattcatctcgcttctgtcacgctgtaataagtgtctcatgtataccttactcaacattaatagaagaacgcaagaaatattacaacatatacttagacgttggctcacaatgaagtgtctagaaaagtattgttgaatcgcaagaagtatgaagcgtagtgatcggcataacagtctataaataatggcaaagaacaattatttataattatcccatgtgatgtaaatatgaaacatgatgaggaatgtctacgtttcacaaacagatacaagtgataagatcccaataaaataattgtcatcctagacttttataaatatgaatagaacttaaaaaacaaataacatccattttgggaaaagaaagagaactatatctattatgcattatgtaaaataatttattgtattctacatataatttatcaactcagataagaaagactcctgaactataaaaatttaacttttgaaatcatattaaaactttcttgttatttattattattataattattaatttacttaattaattttagaaattatttattgttaaaagatttatttattagttaacgaaaatctatcttaatactcttaaataagattatatttttctataaaacaatagagttatatgtttgaaccaagtaccaacaatttattaagtagccagtaaccacaaggtccacaacacatgttttgtgttgttttttgaaataattgttttttcctggtcaatgaaaaccgaagtgtcagattacatatatgtgaatgtgataatttttggactgtttaggggtataagtctattatatatataatataggctaattaaaataatttttgtccaagtttgacatgtactaagtcatgtcctttaaaaaattttagctgttaaaaattttctctgaactattgagattgttnnatttaaggacttttgtttaatttcatttaattttactgtatcagtgattgtttatatactaaatcatgctccccaaactttaatatctaccaaattatggccgaaaaaattttgatatgtactaaatcatgccccctgactttcatccatgtgagaatttttttactaaaattagacnaaagtccttaaatttaacaatcttaatagttcaaagagaatttttaacggcaaaaaatatttagaggagatgatttggtacatgtcaaaattcagaaggaaaaaatcctaattagcctatgatatatatgtggggagattgtgaaactatcaaaatttacttaaaataatcacccatatatattaaagagtattgttattggacagtagtgtccaacatcttctataagaagcgttctacaattatttcgcaatatttttaaaaaattatttttttaagttatatagaatctagtatttaattacattaataacagtataacaccgagaatagtacgaaacactaataatatcttataacaatactctatattaaatgaagttttataat

SEQ ID NO: 27637 - DNA, 2280 bp, Cannabis sativa
  modified_base (48)..(83): a, c, t, g, unknown or other
tgatactcttatttgtttaatttcctatcgttttagaagttcatattnnnnnnnnnnnnnnnnnnnnnnnnnnnnnnnnnnnnagatcctggtaaaataacttccaacaaatgaatcccagtcacgttttcctactcacccaacatccacgttgacgtcacatgtcaacctgggcgctgggccccaaaatagtcttcaaaaaaatagtcataactccttcaatattgatctgattgacatgatttaacttgcattttgaagctattttaatgttctatcaagtcatttaccacacttcaattgtaattctgaagttatcgactccgaccttcaccctcaatggagttacaaatttaagctacaacttacctaaagcgtgtcctgtaggcgtgactcaagctccaaaaattgatcactaacctccgtaattaattttacctttatatcattatcaaatgtcaaaaatagcctaaatgcattttttcatattttttggaatatttaattattgtttaataggacctccttccctataaaaagagagttccacaagctcattttttaagttcaaaagagtagtcataaggttagagcatctctcttaaaattagagtatccagacagacttagctatttttctataatctatctcgtgagaaataaaacttgaagtagatgtagctccattactgtcgcgatacatggactgaactactataaatagttgtgtatctcatttatacagctcacaatatattcccaaaattctagtgagtgagtgtaggttacatatttgtgtccagatttctacatcaacagttaccccaattgtacaaaagcttacataccactagaccatgcttgttatacattttccattgtagggatgttaacttttatgaaacattttccccctaaatggctctacaaacttacctatcttggataaattcttttctcctctcatatgcctatagtacctttaaataacaatgcaaatcccactcctcctcatacattagttctcatccctaggaatccagcatcaactttagcacctgtacgtattgcacaaaacaaaacaatttcccaaaacaaccaaggtaggtagacacatctctaatccaggtcacttaaaagactttgtgtgccacacttccactgcacatcccctagacaaatatcttaaatatgaaagattacattctagtttcttgctcttaaactggcttaattgctaaaagctattgaactcgagccaacttcttatggtcaagccttaaaactgacttaattgctaaaagctattgataatgagtttcttgctcttaaacaaaacaacacctagtttgttgtgtcatttcctcctggttgctatgttattggcaacaaatggatttataaaactaaatataactctaaaggtaaagtagacatatataaggcacgcatagttgcaaaagggtacactcaacagcatggcattgattatgttgagacctttgcaccagttgcaaagttgaataccctcaaactttttattgctctagctgctatagaaaactagtcacttcaccaaatgaatatcaacgttactttcttgcatggtgacttagatgaacacgtctaaatttcaatccctaagggctatgtacacaaggggcagctaccccaaatgttgtttgtatattaaacaaaagcctctatggtttaaaacattcttcaaggcaatggtttttcaaactaagcaatacccgacttaaccatggctttactcaatctcctaatgaccattcactttttatcaggtgctctcctaatgcttttcttgcactcctagtctatgtcgatgacatagttattgcaagcaacaatgatttggacgcatatgcattcaaaaccttcttaaactctaagtttcagcttaaggaacttggacctctatgattttttcacgtattagaatttctcaatttaaagcaagcatattagtttcccaaagacaccattcattcttcaagtactcattgagactgactcccttggagttaaagctgtcagcactccaatggaaaccaatctatcacttagcaaggatgttgggacccctatttcagatccaacttcatacagaagccttaatcgtataatatttgaccatcacttgacatgacattttatatgcagtcaattgcctaagtcaatatctcagtgatccaagacaaccccacatgaaggctgccactagaaaccttcgatacctatagggtacccctaact

SEQ ID NO: 27638 - DNA, 1858 bp, Cannabis sativa
  modified_base (1596)..(1605): a, c, t, g, unknown or other
tccacgtcagcacaagacaaagtgaatctggacgagacatatactactaggactaatgatcgaagtgcatgctgaaaggacaacctcggtaggaaaggcaacagctggagtcgactatccgaaactccatttcaggaggaacagctagccctccaacactctcttccggaggaggactaactttcttgaagactacacccagagtagacatgatagtcattcggatggcaactatcattgtacgagacttcttcctgatagacatgttagctttttgggaacatacttccgggagacaactaactttacattactagaacaatctattagaaatcttttcatttgaaggaactataccatacataccaaattctctatctggttcttattatgaactctatcatcaatcatagtgcttggctctttagtggaaaacaggattaatgatatccactactaaattatataaaccagataataagtcatcattctatttctaacatttacttatttattagatacttatgaatcagtcgtagtttatttaatctggttcttggagaaaaagaaatcatgaaattcccatttttttctttcctttagcaagatatgttgttttttcgatactaactatgcccgcaacttcttccaaccaattggctggtaatatcattctaacacatttttcaaagttgcataagttaaattttttaactcttctttacaactcttttacacttactgttagttcaaattgtacacctcctttccaagtatcgaatatagacttgggttcatgtcatttagttcttcatctctaacttggcttagatcacaaaataaggacaaattcttggatttgtcaaatgctagcatttcaagttccatctacccaatccattcaatgtaactccatatattgttgatttgagctcaaaccaatttgatgggttcattcctattccagatgttgagatagatttacttgatctatcgaacaataaatttcctagtcctattccaaaaaacataggtgattccctacataacatggtattcttttctctttccagcaacaagatagatggacttatcccaaattcaattgacaacaaggaatctctcattgcccttgatctctaacttaataggaaaaacacccttagctttggaaatttgtcaaaactagatacactagatcttggtaagaataatttgttaggaactgttcctgactctttggataaactaaaggtgcctttgataatattttttcaattgattttctgttttttttttaattttaaaagtaaaaatattttcaagaacatgttccataaaactgtttttcaccttttaattttttaaatgaaaattaaaattttaaaagttttgaaaacaaaaaaaaaaaaaaaaaattcactcacaattttattaaatattttttttcttaatctatattttagactccgattctaacttggaccttagaacctggactccagcctcatctccagattcggacttggactcgacttaaataaatcaaaaaataaaaaataaaaacaaaagtaatagaacacacttttatttttnnnnnnnnnnattaaaaaataaaaatggttatagtacacattttgtaatttaaaagcaaaattttaaaaatacaaattttattttcatttttgtgattagaatattaaaaaataaaaatattatcaaacgcaggctaagtttgcttcaaacattgcacttaagtgacaacaagttttcaaggaacatccccatcatctttccagaatttgccaaggtaggaaacacttcttagtatggaaccacattagcttggaaaaggtta

SEQ ID NO: 27639 - DNA, 1977 bp, Cannabis sativa
  modified_base (1494)..(1502): a, c, t, g, unknown or other
tatgagaatcgatatcaataaagcctatgatacatctgatttggagtctttcgaggatcttttgaaggggctttgttttccttcgagattcatcaagtggattttggtttatttacaaggtacctcttatactttaatgatgaataagagattccaaggcacttttaaaggcgaaaaagggttgcaccaaggagaccctatctcctcactcctgtttattttgatcatggattacatgactagattcttggcttattattctagtaagaagggattcaaatttcaccccctttataagtctctcaaaccggttaacctttgctttgccgatgatttaatcatatttttcaaatgaaacatttcaatggagcttttactttcttttatgtgaatactggattaaaggctaaaattttgaagtcccttgtttattttgagggtgttaaagatgagttcaaaatggctatcttgaatatgattcaaatggaggaaggttctttctcgctcaattatatgggtgtccatcttcagtcaacaaaatggaagactttgaactgtggtattatcctagacaagttgcactcaaagcttcacaattgggccagcaagaacttatctttagcaagtcgtgctcaaatgttagggttttatgtcttgaaaagtctataaagacaattatgattattaataaagagttgaaattttgatatatgcttggatgttaaattattgatatttattattgggtaatttatataaatatcaaaaaattccttattcatatatgaggttatgacttgtacctgtatagagaactaaggtcacttagctataaataaaatagtcagcaacatattaaagttatagaatctttcatcaatggttgctagtacgattcactgatacccgttcttcggtgcaagtaatctagattctgattatttatgtaatatgacatttaagtgaaggtgttgtatataatagagattatgtatgacaatgaccgatatgaataaaattatttttatcaaacatgttgttcactataaagacctaatttatattataatgatgatcaatagtagatcgacctaaatcctgaatactcatgaactcctattcatgttattagtttatttgattcattcgttaaaatttatcatagaaaatgattcttacaacttctgttttaggaatctaataatgtggatgactgggaacatgatctacaattatagaatcttgactttcctaatggatcgaatgttggttccctttaagtgttaattctggaactaaaaagttatgcataatttcagatgagatctaaattatactttcactagtgaattaacattactaaaggataaagaagtaattagaaggatagaataatattttgacctaaactaattatgaatcgacacaaggagaaataatcactagaattgattatatcaatagacactgtagtaaaactcaataaatataatnnnnnnnnnactaagagttcaattccatatttgtagggaagtaatcatggaattaataaacgtgtttacttggttgatgagactcaataaataatctagtttattgaagcttagaaatataggtccatagtcaaatcgccaccttgaaacactgttaagggtaagaatgaagagttgtataatatcattcagaaaaatttattttgaattggtaaaatagtaattatttatttttgtaataaataaataaattttcaaattaattaaatagggaaaagacaaaatttgtcaagacaagagacaaaagttgtcatgacaaaagacaccatccttatcttaattaggacaaggtacgcgcctaccctatagtaggcatccctattgattttgtctttttgggttaattacttaactaattaattcaattggataaatatttaaatttagaaagtggttaaatatatttcaaattagttgagatatt

SEQ ID NO: 27640 - DNA, 2159 bp, Cannabis sativa
ccagaacggtttgatgatagctctattgacttcaaaggtaataattttgagtatattccatttggtgctggaaggagaatatgtcctggcataacatttggtgttgttagtcttgagtattctcttgctttaatgttataccactttgattggaaacttcctaatggaatgaaacctcaagatttagacatgagtgagttatttggcattgcagtaaggagaaaagatgatttgtacttaattcctacaatttatcatcagtcacctcttgcaaattaaatcgtatattatgagcaaataataatatttatttatgttggcttggcttgattaccttttaactttcatttgaaggttaatttgaataaagagaaatgtattagtgagatcatttttattttattttattgtcaagcacttaattttcaatttctttttcacttgtacatatgttagcaaattatttgtagtattatcttttatttgcatcaactgcctatataaatacataaaagtttgagaaaactttatcactctgcactctaaaagttcttggaaaattttattgttccaatatacttattaaaattaaacactttatttgaaaagcctataattatgcacttcatgtttcttccaacctccatgctaggtattttattccaaatccagtttgcaacagatgtagagttttaattaaaatattgactcatgttttgctaaattgttctcgaataaaggaaggttggaaaaattcattttgaaaaattgtactttcgtaaatgctaaaatatttattaaattctaataattaaaaacacaattataacgatctgcagtaacagattgaaaatctactacaacggaacacaaatttgcaataacgaaataaaaataattgtgcatgatgtaaaaacttaacacaagagaattatacatggtatcagtattcttttgaacactactagtttacgggatcacgtccaaaaaatgaaatcaattaataaaatctcaaaaaaaattaaaaacataattgacttaaactagtttagactccctctaaagctttgtagcaattctttgtaattcacattgccaatctaattttttaacaccacctatcatcaaacttctttcgtctttgatgtgtgtgtgcttacttcgtcttaaagtaaggcttgaacaagttttctcccgaaaacccttcttcattcaagttcttcaactaattctatgaacagttaaagaacaatgaaataaacactaaaacctagctaaacactctagatttttacaaaagaaactctttcctcattagaaaaaaatatgaaaaatgaatctagaagatgtgaatttatttggatattctctaggtcctatttataacatataaaaatcctagaaataagcacaacacgttttcacaaccatacaaaagctttctaaaaaaatccctaatttggagtgacaagttcgcaatctacaatgccacataggccaaaacaataaacttttcaaataagtcaaagttcacgatttgtactttatttccttacatgaaagggttaaaaaatctgctgtattcatagcaaaaccgaacagatcaattattacaaatttagtgacaattattctaaaaatagactaattaggtaatctttcaattccttctcttttatgaaaagttccctaacaaaaattgataactatatgattaaggctcaatttgtacattttagatctttatttatgcatattaaattaatataaattaaatatttcatattattaatggtaagtttagcttagttgaaaatatataatttatttttaattttgtgttatttttcagatttattagtaaaatatgggtatgtttggggctaagcaatagcccaaaatcccaatttgatcactccatgtcatcaattataattcccactccaagttttgaaactattgtccaaaccgtaggtgtttttctcaacattgcatttgaagtgggccaaatgaagaccaagcccaagtagtgcccaagtaatttgccaaattaatgagaaacttacaaaaatattagaatttgggttaacttttataaagatactgtcacacggaaatcttttcaaaaatactgtgtttttataaaacaccagtaaaac

SEQ ID NO: 27641 - DNA, 1041 bp, Cannabis sativa
tattagtcacaaataaaaattataatttatttttggattgcaatatatggtataagctaatagctgctgggtttttttgcagctgagtaatattttgatggtgcaataaattattcttcttattcacaaaaaaaataaaaatatattactgataatgctattaagctaacagttaaaccaacaatgcttcagataaagactttaaagtgtaatacacactatatatggtttgataaacatacctgaattctggtttcagcagcctgatcaagaaatggaatcaagtcatttagtagtttcttatggagagtggttgcaacaaatgaatcaaagttatgatgtgttcgtgtccaaagctgaaacattttcctttgaagcctccataaatcagaatcaacattaataattccatctccaagaggatcaagcacctctctaaattcttcccctttgggataattggagaatttagtagtgtagatgtgttgaagattcaaaggatgacatgttaggatgaaatccatgccactaaacaatgggcctttgaactcaaatgttcccccacttttggtcattacttcagttataaactcatgtagtcttggcaaattgtataccagggtcggcaacatccccaatattggccaattagtgagtattgcatttctattacgccaccaatgatgaataataataattacaccaaataatactaccacaccaattatcagtaccatattattattattattgttattggaatgtatatttatattctatatatccttgtatggatatatctctaatctctgtttagatctccctccctctctctctatatatatatatataaatcatatgagattattatatagtatataggtaacatataacaaaaagaaatagctagaagaaactataaatgatatgcttatttattacacagcatggccattgctcaattattataaatgttgccatattttttataaaaaattctatggttggatatagttctcattgggcaattgagaactatat

SEQ ID NO: 27642 - DNA, 9002 bp, Cannabis sativa
  modified_base (2642)..(2651): a, c, t, g, unknown or other
ctccgaggcccgacagaagagggggatcatttgctaggaaaagggttgctgaggcagtcaacagatgcatagagagagctctccccttcatggatgaggatcagtaggagcttggtgacggcaagccaaataggctctactctaccggtcttcgactttctctggtaagttgtactttctgctttgtttaccattctggcgcggtgtaggttggccgtccatgaggcttgttgcatgtggctggctggccttggatgttgttgtgaggggctggccggccatagcattctcaaggggaggatgggcgaccactgttatgactttgacactgatgttgttttttttttttttattttcaggccttgatgaagttgagtttagcacatgatggctccctaggatcctcagatgctctttgggatcaagtgaagaccttggaggcttcctttatggtaaaggacaaagccatatctaagctggatgctctcctagcagagagacagagaatggtttatggcttagagacaatgcttggcgctagaaacacagacaacaccacacaagctaccttcatctccgggctaaagtttgaccttgatgagcacaaggagaaactaaggaaggctcttgatggccagcaagccataagggaggagtaggctgacttgtcctctgaactcacttatgagttcaagttgtgaaacccccaagctagtttgtcatacattggcagtgaggcttttgtgaagagaatgttggcccgtggaaaggcacttttcgagagccagattgaggcagaccaggtccttacctatcaagaggggtcatcatcagagactcatgacgaggggctggccaaacaacctatggagaggtgcctagttaggacactgaccaccaggccaaccaacatgttcatgttggggccgtttggacttttgcgatcctaatctcccagcattagattcagctcctcttggccatgcacacatttagacaggattttcattagtagaacatagcattatgtttgcataacatagacaatattttcatgttccatatagcctatggctttttatggtcagtgtcatttagctttagaacactacttactttaatattctatgtggcctatggcctttttagaacactactttattttcagtcccatggctttcatgttagtatctttggcctataggccctctatttttgaacactactattgtttggccctgtagcttttttctcatgaattgtgtgaccaaccaggtggtctttaatcctagctatcatcttatggccttgacaagtaagggtctacatttactttgccatgctgaagtatgcttgcatgacttaaagtttagtagcttattctaagcattgaaatttctctgcataagttctttgtgcttagttcgatgccttgtatagcatgggtgccccccaagtgaccatgcagacaagtgtcttggtaacttgctattcaccatgtttcagacatcagatgggttctttcttagggtgctatccatagtacgcacgtggaactgaagaataaaattaagaagttaatctatgaggaagtggtttagacataataaacagaatataaacattgtaatgtattaattaattggtctttattgcggtgaaactttcataaattgaatctataagcttacattacacaaatttagcttctcctctaagacagtgttattttgttgacaacttctaccggcccatctgcttgagaatgggccacaacaaagaagctcttaatgatgccatgtctgttgtagaaatcagtgaacatgtcactgtcaaactatttgccatagtttgacacattcttctagagaaggttgaattagcatatgatgttcttgataacaaagtgaaggattgtctttgaggtgattgttgctaaaggttcagcttctatccatttagtgaagtagtctactgcgatgaaagcaaactgtacccctccttttccctttaggagttgaccaattagttctatcccccacactacgaaggccgaaggagactgcatcatcgtgagctctttgggtggagcccttgggatttttgaaaatctctggcacttgtcacattttttgacatagtccatcgagtctttgatcattgtttgcaaaaagtactcatgtggaattatcttcttagataggctttgctagtaacatagttattgcagaagccttcatgcacttctatcattggcttttcaactatgcctttggtgacacacctaaagagaggcatggaaaagctctgtctgtacattatcccgtctaggatcaagtagctagcagcttttcttctcagtttgtctgcttcattttcatcttattgggaaggctccaatttggaggtaagctgcgataggtgtcatccaaaatgtcgacttcttctaggataataatgttggtttcctcgaggaactgtatgaacaccaagtttgcttttttagtaatggtgttgcttgccagataggcaagtgcatcattcgtagtgtttttctctctagggatctgcctgattgtgtagcctttgacttgacttagcaagtatatgattttaatcaagtaggccaccattttttcacnnnnnnnnnngtattcacctaggacttgattcataaccagttgagaattattgaatatatctatgtggttagcccgtacatcatgtgccagcttgaggccggctattaaggccttgtactcagcttcattgttcgagactttaacgtcaaatttgattgctccatgtagttactacccctaggtgttgtaaaggtgatccctgcaccaaaaaattggtcagtgcaacttccatcaacacagagtttccatgttagtgatttgggatttttgttattgctcttgtttttctcctgagagagatctcaagagttgagtcggtgcactcagccacgaagtctgcaagggcttggccctttatggctattcttagttggcatgtgatctcaaactggccaagctcaatggcccatttgagtagtcaccctgatgcttcaagtttctgcaaaacctgtcgcagtgattgattggtgtaaacctttgtggggtttgcctaaaagtagggccttagctttctaaaattcaagagcaagctgtaggtcagcttctgcatgagtcagcatgagtgggtaccaacttttgtcaccgattagccttttgctgatgttctttaacagctaggggtacacgcctagctcttcattatatgtaggggtttagaaaacataggttgttgggccaattgttttttcaactcctagaatgtgttttcacattcctctgtccaatcaaatttattgttgcctctgagaatgttgaagaagggaacacatttgtctgtagaattggacacaaatctgcttaatgcagcaatgcatcctgttaggctttgtacttccatgacagttgtgggaaaattgatgtccaaaagggcttgaatcttgtctttgtttgcttttattcccctggtgttgacaatgaagccaaggaattttttcaagcttacaccaaaggagcatttcagggggcagatttgtagctgcgaaggattttgaaacacttgcataggtcctccacgtgcccccaacctttttagacttgacaatcatgtcgtccacatacaccgccaagttgcggccaataagatctatgaacatcatgtgcaccagccttttatacgtggcccctacattttacaacatgaagggcatgactttgtagcaatataggcctaggttcgtcatgaagctagtgtactcctaatctagtggatgcactttatttgattgtaacctgaatatgcatccatgaaacttgggatttcatggccagctgtggaatgtacaagctagtcaattctaaggagtagaaagctgtcttttgtacatgctttgttcaagttggtgaagtcgatgcatactctccacttcttgttgggttttgtcaccagtactgggttggacacccactgaggataaaatgcctctattattaagtcatgggctctcagcctttcaacctcatctttgagcgcctgggcgcactccttgtccaacaaccgcctcttttgttgaaaaagctagatgcttgggtcaaggttgagtgcatgggtcatcacggagggctcaattccgacaatatctccatgtgaccatgcaaaaagttctaggttttcccttaaaaaatttatcaatatcgattatatttctagagttaagcctttcccaatcttcaatcttcttgttggaaaagtgggatcaacctcctccttttctaactcttctataggcacgaagcttcctaaaatattcttaaagtgaggatctatgtaagtgtccctgccttcggctagacttcattgccccttgtagggttcattttctgggtctttgcggagcatcttttcttttttgtcctttgatagggccaatttgtaatagtgatagtgacggccagacagctggtctcccctcacacatgccaccccgtgctttgttcgaagtttgaggcataggtggtagatagatgttactgcctttaggtcgttgagggccggtcagcctatcatggtattgaatgttgatggaatgtcaatcgtgacgaactgtgccatcagtgttctagtcgttagattttctccaactatgaggggtaatctcatatacccgacaagtgtgatgcattggccaaagaagccatacatcaattggttgcaaggctctaggtcagtgagttggagccccatcttttcatatcttgatttgaaaaaaatgctgaagcaggctctgtcgtacaccatacatctttctacggttatgttcccaatttgtacagtaataaccagggggtcattatgcgggaaaattacttgaggagcatcttttttggtgaagaagattgtgggatctataggcttttatttcttagagctctggtctttgacaactagaatatcacttttgggcttgttatagagtattcgagcatagcgctccctagctttgcaagtttcacctgtaatgtggggtcagccaataatgaccccctcgatgtcctaccactggtggttgcattggatctctattcttgggcgccttgtgcatgagtttggtcatcttagacataacgacacaagtggggttcaatgtccctcttcaaactttgacactcattggtcatggtcaaagtcgttgtgatatcgacaaaacttttacatttccctctagcccatctcctttttgataggaaagggctttcgatatgggactgttctttgagtggccatgaagatggcctcaagtttctctattaggagggttaaccagatgtacttctcctccctgatcttttgtggtgtgggagaagtgttaaacttcccctttttgccactattcctcccaaagttgttggtgttgcgcttgattcaaatgtttttgccactataggcctgagcagagttgttggtgtctgcctatgcgcatgtgggtcatgaggttgctggatgcctcgtgactgcttgttgttgacatgccccgcctgggcctgtcgtatggcttcttcaagttttgataaaattgtcagctctatcaaggaactctttcacgttgctggtagagatcctctagatatcttttgataagtcactcaatgggtgtatgtgccccagtatggtcgtatatcggccttcttttgtaaagccttggactttggtagcctcagccataaacctctcgatgtaatccttcaaaggttcccctttcattgtttgactttgacaaggtcttctagttgcgttggtacaagtctcgaggacgaaaattttgtctaaaattcttgtgagaactcagcccaagaattgaaccttcttgcggtgagtttgaagtaccattattgagccgtctccaacaatgtggttcggaatatgtggcattgcacatcaactgtaaccttctagagatcgaggtgcatctcgaagtatttaatgtgagctagtgggtcttctcacctgatctacatcttccataccggctttttgaacttaggcaagggcaaggtatttatatatgccaagaatggtaatccccttgaccaatcaaatttaagtctgaaggctttggaccagctatgccatagatcatgtccctcagtttgtccttctgtgcttacacagaaggatctgttgctagggggaattaactgactaaccctccttggggaagcattagattctggagagataggggctgacagctataccatgtgagacagaatggtgaaggtcggccagacctttgctgaattataaaccctgcccagccattcccaagtacaggagttggccttggctggtcaggcctacacctagcttttgtgcttggccggccaaacctacattgggcagggtctggccccccagtattctttcgtggtcggtcatacaaggagagggtagggtcgggccatctacaatacttacatggccgaccaaacctacaaaggcaggttctggtttcccgtgatacttgcacgatcagccagacctacaaagggcaaggtctagccgcccgtgactccgcgttcgactgatgttggttattaataggagctatatcatgacaccgattgctagagtttggttgatttagatgtctgaaatgatcagtttcacttcgtgaatcactattttgggtgtttccacccgctcttggtccttgtaagtttaagattgacttctaggcacctcgctccctttcgggaggaagtgtagtactctggctggccaagggtgcccctgctgatggttggctgaccattgcctgtacaataggagtgttgctgagccagagatccctggtcggcctcccatgtcgttggttgccgggatctggccgtttttgtcgtttcacctttgacgaaaggtctgtcctccctgtagcaagggatgatttgtcctagttcctgaggaactaggtttatcaacatgtcgatagaccctccataatcaatcaacaagtcttccttgaagtagatctcagatgagatcctggtctcttctatcagttctctagttgaattgtcttatcagaccactagcctcttggttgcggcgatctaactctgcatggtgagatagaaggatgtactcttggatatccatccatctcaagaattcgcatctctattgagcaaaaaaatcacaatcagcagcgcgttgttcttcagttaggcttgtatggcctacagcatctctgagtctggctaactcgagatcttctcccaagtcaagatggagctcgccaatcgtaggcttgccaattattgggccaatctctccagcataatgtcgaagacgagatgcaattattattccaggggttgttgcgcctaggtccttcctttagtaggaggtgccaatggtgggtcttcccttagaggtaagggccagctacttggatccaccgagatgcttgtatcagtttggccagctgtagtggccagacttgtgacgcctgttttggtgataggattcaccacatctgtagtgttcatgacgattccagttgtgactggaacctaagtatctggatcttctgtttgtagctcttgagggagacccaaagatgcagatggtgcgacaggggttcttctcatgttaaccgtggcgcttgatatccacgctctcaatgaaagcgccaaatttgaggctcaaaaagtgatcaaccgacaggggtcgtatagatctgatgctcatcatgtgttgcacaaacaataatgaaaagtaataaaaacacatatttgttatagaggttcttcccccttgtaataatgggtaatgacctactctccttttaattgtattaatattgagggttaatactatccagattagtaatgtatgggcatgtgagagaggaagtgaagaagagagaagttgttagacttaggcttagagcttggaggaaagtattaggcttaactgagtttaggctttctaggttagagttaatgcctttatataggacgcctaagccctaggttacaacttgaaaccctagatatttgtatattttattagttaactataaaagaccgaaatgccgtcgaatctatatattatttagctattttgttgggcttctagggcccaatttcaagcccaagagttgttgtcaacgtgtagaagtgcgtagaaaaccctacaaaacacctcttcgccggccaggcccttatggaggacaggctggtcgaccatggtgcagtcccaaggctagtcgaccatagggtcggccaaggatgcttggccaactcctgtgagggagctggtctatcatttgatgcccgtttgacgcccggggtctctgtttgcttaggtgctgacttggccttcttatttctgaattgtattgccacatgatactaatccaatccacgtaagtacgaccgcgtcaagaggacaaaaattaggataacaaagaaaattgtacattatacaaaatgatgagttattagctaaatcatgatatacgtgatatattatcatatgatccctatctagctattatatcttaagtactgttcaaatattaatttcgtacaatatatattttttgtattctttatttaactttggaaacaaaataaccataataaaggaggcacatgtcggtaccatagaatgacagtgtgtttaaatttttttaatattattataaattcaactcatgctatttgttgagcttttcctttaaaagggtagatgattatggtggccctagtaatgtttcttgggtgaagctttgaaaacggaaacaagaagggggtttgggctttcgaaacttaatattttgaaccaagaatttcttggaaaatatgtgtgggttgtggtaacaaaacaagatattgtacgactaatttgtcttgtgg

SEQ ID NO: 27643 - DNA, 1039 bp, Cannabis sativa
attccatactttagggcccaattcacagcccaaatcatgttatccacgtgtaaaagtgcacagaaaaccctgtagagcttctcttggtcgtcctgacacctgcacggagtaggctaacaagtcatggtgaagtgtagaggctggctggctatagggccaaaccatcaagcaccattatccctggctttttgtactgttttgacgatccaagcatcccacattcttcctcaacagttttcttgtagtgggtaagctttctattcccactattttacttgatttggttgattttgtgatgaatgcatgaacactatttcttgctttcaatatcatttaattcctacattagattgttgtcttgtaagaattttgatcccatgatagccttaggatacgtaatgtggcatttctagacaaaaaaaatctagatctgaccttcattatgattattggctctttgagtcacaaagaacatgaataacacataaaatatgttgagatcttgaaaaacacaagtttttatccgtgcaggtcctggctggccaaggaggtcttatttatgacctggctagccaagggaggccgtcatggggtctagtcggccaggggttgtaccccataggctggccagcctaggcatggaacaagggttcctggctagccactaggctgcgtcacgggctctggtcagccactaaggtctagaaccctgactggcgaaggctaaggctctaaggggcaaccagtttccttccctctgttgacctcgattaaggtcttgtgacggccttcgaggcatatacaattggagccttatgtgtggttccccttgggaactctatataaggctctatagtgagtccattgtagtcaattgtgtaacttagggcttactatatgtcttagtaagtgtacttaaggtggtacttggtcagtaattgaacttgtacatagtgatttacctggaaggtaccattaggtattgttgagtagaatatgtttgtagctttgttatgttgctcacctccctttatctctt

SEQ ID NO: 27644 - DNA, 1505 bp, Cannabis sativa
agaaaacatcaacagcttcttcgaacctaccactgcagccgtagaaacgaataagctcaacgaagatgtactcgggcgtctcgaaattctcgacgagctcgatccgatcgagaattggagggatgtggtcgaagcttagaggggtccggattagggttttgatgaggaagtggtaagcttcgggagtggggtggcaattgtaggaattgaaggaatggattagaagggagagaagattgttgtggttgtggttgttgaggagaaggagtgatcgttttagggtttgtaaagcttgggattgattgaaggtttgatgccatttggttttgtatggtgaaatcggccattttctgtgttttctgaggaatttgttggtgagagctaacggtcgagtggcggccatctttgaaaatctctcaacactaaatttcaaatgctttggtttatataatgagtcaagtgtgtgaaaaggacaaaatgcccaagaacatggatgtgaatttgaggcaatgcattccatttccaatcttccttacaccatctcaatgttaaaatttgtgttaaatttggctaaaaacaatagttttcaactttgttttgtttactgtaacatgaatttttttttaaaaaatactgtgtaatgtgttaaatttttactgttgttcaacggttgtttttagttgttctactattatttttaattgtcctgttttgttgttttagaaaaagataatttttttgttaaaaaatttgtgtaacagtaaaattgtaaattttttaccacaaattcaatatttttataaaaatcccaaaaaaaaaaagaatttgtattatatttgacccattatttacaggtgtgttctaatgtagaagatgtaaaataaataaaaaaatataattaataatagagaaatgttaaaaaatactattggtgtctagtacaattaccggtgtgatatttctattagtataattaagtatcgagtcacgtataatttaataaaatcactaataaatggtaaaacaatacctattgaagtattggacattactggtgttcgaatgcaggcccactgtaaaaggcccaagagtgaaatatcaacactaaaatattcctttgaaacagcgtgtcccatcaaaaatcccatacaatacaacatttattagagagggaggaaattataaatttgatgggtttttatatatatatttttttaaatatgattttttttccaaaaatattatattatggaaaaattaaaaaaaaagttaaaaaaaatataggaaaatcaagtaagggtaattaattaccataagcaggtaaccagacatttttttcatatttttttgaccattttctataatttttctataaaataactattttgagataaactatatttttataaatttatatattaaaaaccataaaaataaaaattttcccattttataataatttggaggactaattacataaaatactaatttttgtaaaaaaaatt

SEQ ID NO: 27645 - DNA, 2775 bp, Cannabis sativa
aactaagcggtctttacagattatccctttgcttgtcttgtaatcacatccttcatcatctaaggttcccaaagaaattaaatttcttttcaaatctggaatgtgcctgactttgtgcaatgttttgaatgtcccatcaaaacttttaatgacaatagaaccaattccaattacactgcatttgtgatcattccccattacaacactacaaccatttacggttgtgtaatccatgaaccagcccctgtttggactcatgtgatatgtgcacccactgtccaggatccaatcttgatctttaagacaagagctggtgcaaacatcaccatcagttgagttctcatccttagtttcattattgatgattgtaagaacatctccatcagaatcttcaattactgcatttgagtcattgttgttgtcctcttcttctttgtccttcttcttctttcttttatctcttaaatcccaacagttcctaatcaagtgtccaactttaccacaatgatgacacttccttgtttccctaggtcttgattttgatcttgaattagaccttgagttttctctaaattttgaatttcctcttcttggtattctgccccgaaccattagagcatcatcagatcttgattcctgtttagcagctctttgccagttcaactcagcatcccttgatctgagtgtactcataacgtcttctaatgttaaagtatccctgctatacatgatggcagttctcatttctttgaattggtcaggtaaagcattgagcaaaatcactgcttgatcctcttcttttatagtttcacccatattagtaagagccaatacaattttgttaagttcatcaagattttgatccaatgtaacagtagcactcattttaaatccataaaactttcctttcaagaaaatcttggttgcagtagatcgagccatgtataattgattgagtttactccaaattctaagagctctcttctcaccaatcacctgcctcagtacattgtctgcaagattcatgacaatggcagatctagcttgcttcataacagtgtctgattccttcttcttggattcatccatgtccttcttcttgatatcatcagaaccaagatcttcatctaaggttgaatctaacttctgatagatcagtatagctagcatcttctctttccacaaactgaaatcacccgtaccatcgaatctttccaaattgaaccttgctgatgatgagcccattgcagcggcttttctagtttgatatcacaagatttgagttctagaatttcttggattcttcccggtgctctgataccactgttgtaatcaaacaacacaaactcaaacctattaatgatcaattcatcgacatgtaattaaaccagcaaactagaaaaataaacaagataaataaactatgaaaaaacagaaagaaaaatacaagaatttatcctagttcggatctcaaattttagtcctactcacactctcccccaaggtgatttctccactatgaattagtaattacaagctccgattatagtacaatgcactcaagaacaatcacagtcagatttgactctacaacactcaacactagagcaatcttagccaactctgaacttgatcttcttgtagcattctaactcagcctctctctttctttcttgccttaaattgaatacaatgaagagccctttttatattgttagtagctaacatgtccagcacctaaaaactcatgacaagtcggttattaactaactaaccgactttctaaaacaaggaagtttgcaactgaaaataacagcttgacaaactatatttggagaaaaaacaggtttagtttaaaatggattatcttccacagtttggattgtataaaagtaaaatttatattaaaaaaaaaacttataaatcaagttttgaccctataaagatataatctgacaaacttataatttaaaaaataaagacaaaaaaaaaaaaaaaaacaaagcaatcccattaccgtaaaatagaggtgttggaaaaaacacaaaaatcaaactactctctctagcaacacaagatttttttctctttcatgcgattcaaattgcttaatttgtcacacgatcaaaatcaatcactaaagatccttcatcaagaaattggtttcttcataaagaaacttgtttttaaattaagaaactactttcttcatcaggaaactgattttgattatataaaagtaaaaaaaaaatggtgctcagaaaataaaagagacaatacaataaaataaaaaagatgaagcaactccattatagtaaaatagaggtgtttgaaaaattactaaaaattatcctacaaaactgctaaaaacaaattaaaacattaaatgtggatttcggaaacctgatttacatatatatgttatattaaataccataaaattacctaaaaataaatttaaaaaaatgtcatataagttggtcaaacttaaaaataccatatttaagcaaacaacttttaaaatcccacgttgagtgtaaattcttaaaaaaaaaatagagttaagaggcctttacacaattgaaaatattttattttatttttatcattaataattattttcaattattatcaaatgaagcatattttttgaaatatttttggacattattttttaatttggtttttttttttctttttgatttaagcgtgtatatattataaccatgttttactgggactcgaactcaggacttccaacattcacacactcac

SEQ ID NO: 27646 - DNA, 4831 bp, Cannabis sativa
  modified_base (351)..(354): a, c, t, g, unknown or other
accagaaggattctcctctagtgaaggtgagcatttagtatgcaaacttaagaagtcaatctatggattaaaacaatcatcccgccaatggaatctaaaattttatgatgtcatctcttcctttggatttgaagagaatgtcatggatcaatgcatatacctaaaggtcagtgggagtaagattttctttcttgttttatatttagacgatatttttcttgcatctaatgataaaggtttgctacgtgaagtgaaataatttctttcaaagaactttgagatataagacatgggcgaagcattgatcttatgtcataggccttaaaattcaaagagatagataccgaggtnnnntaggtttatctcaagaagcctacaccaatagaattttagaaatatttcgaatgaaagattattcaccgagcgttgctcccattgtcaagggtgataattgaatttaagcttgtttcaaagaatgattttgaaagagaagaaatgaagaacattccttatgcttctactgtcagaagcttaatgtatgtgcaggtgtgcacaagacccgacattgcttattttgtcggaatgttaggaagatgtcagagtaacccaaggatagaccactggaaagctgcaaagaaggtaatgaggtaccttcagggtactaatgattacaaacttatgttcaaatgaaccgacaatctagaagtagttggctacttagattcagatttcgctggttgtactaattcacgtaaatcaatatctagttacgtgtttatgtttgtgagtggagttgtgtcttggaggagtaataaacaaactttgacttctacttctactatggagtccgagttcgtttcttattttaaggctacatcacatggtgtatgctaaagagtttcatttcacgtcttagagtgattccatagcaaggccattaaaaatgttctatgacccagctactatttatatggctaagaacaaaaaaagtagaagtcgaagcaagcacatcgacattaaatacttagctattagagaacgtgttaaagaaaataaaatggtcattcaatacattcgcactgaattgatgattgtcgatctaatgacaaaagacttgccacctcatatatttaaggatcaagagaccttggttcccttatgtaatttgtacaaataaagttattattactataacttttattttgatattttctcatatttatgagcatcttaattctatatttgaaaaatttttagaggatcagaataaacataagatttatgatttattcgcttaagtacattgttatatagtaaacatattgtaatacatggaagataatacttgacatataattaggacatgtcgctataattcatacatttattatgtaatgaggaacgatgagcttgagtgttaaatctaaatactgcccaaaagagagaatattataatattttttatttatagaataagaccaataaattaattttgagataaatgaatattttatattcattaaatcttgacacaattaattggttaatattttatatatgctcaaattacgatattcattacctgattatgagattttttgaattaattgtcaaaactcaaaatattctgataattaatgtggcgtagatactgatgtagtatcccacctataaatataggatctcggtcctcgacctcttcactcattttgtgaaaacagcaaaatccatctaaagagagctgagagagtttggaagcccaattttccatattgaagctatcgctggagattgaagccgaagattaatgacaagagatatttcggtccttttatcgcatatacagtttcgatatgtttataatttattccgctttacataccaatcatatatgcttcgcatttcatatctaaataatctaacacattctacattaaattagcgtaaattctacattaattagaataactattggaggtggtctaacaagtgaaacacatttgaattctttttcgagtaagctttgtatgtagatctggttataaataaaacctcacttcccttcctttacagggtcaaagctaaatatatacacataaaaaatgcatatatcatgtatgctgatatatttcttagtcgtgcaggtatatatgtggccactggtcacaaagagaggtatataaatggccatatttctacctcttacggttaagtaatggttgttgttatgtctgtttagtgtttaacatacataagttattaatattacactttcgcaagtttactaatcttttcttttctcccaggtttctggcatactaaaaagaagttttggttatatatagaaatggtttataaagaagttctcctttcttctaaaacaaacaaattttcaggcatttttatgtgtgcatgtagctagcgattatatatacatgccaaacaattaaacaaaagacaacccctacaacaacaagcttaatcccataaccaataagatatcaccaaagtttttttcataagaacaataccactttagtaaattttgtggctaaacaacaaaacaataaaaatcctttgtataccatatgatcactttgtttaaaacaaaaactatcatcataacctgaaatttaaattaaaacattatacatatatgaatatctttatataaaacctatcaaagaaagagataaaagagagactagatactaaaaatagttggaagaaatgtccttcaatctgtttttttgtttaccttgataattttttactcatctgggcactcgatcttttaatggatgcaattctctgaagcctaatttgctctctaaatttggctatgaattcgtcagctttcttatccacatctgggcctccatctccaacactactgttatacgatgtcgtttcaggactctcttttgggttttcaacgacatcgttttgtcccaaacgacttccaatttcatcatcttcactctctgtctcttcttgatcaaattccatcatcattttctcaaccaaattttcttcttcttcttcttctcttttttcatcctcatcacgaagtttgttgacacttggattattctgattattattacaacccaaactctcacttatattgctatcgaaacgacttcttgtcatgtcgtttgagtaagtagtgtttggtttaaacgacgatgatttgtaaggaaacgacggtggtggcggtggtggtggaggaggatacgacctgtcgtatatcgtcttctttctaactctgtcctccgaaatcttggcttgggattccgatggagtattcggcgaagagggaaacgaattgggtcgggtcaaacgggcgggttgaggctccgaattccgagattcgacccgactgaattcatcaatctcttccttcatctctaaccttcccgatctcgatcgccatggaatcggagaaggaagaacaacactttccttaaacttctcctccactttgtcataatccaaccctccgaattcccggttcgaattgctcgaaaaccttctagaaccggtcatcgagttcgaacgagaaacatcaccaccagagctcgaaacggcaccgttttcaatgtccgactcaggaatccgagacctcaagctccgaaccggtaaaagcagcggtctttctccagttctcgatgacccgttgctgtttccgccattttcgtttgtaacagagctttctttagctacgacgaccatcggtggttcgttcctgtagtactgactactccaagtttggaccttgttgtcatcagacacagatgggttctcagattcgtcatcgaaaaccgacgaaacttggagaaatcgggagacgtaagattgggcattgtctaattttgcgttgttgccgttttccttctctacgtcgtcgtttttgcgactaaatagaccgtacgagatggctatgccgacgaagagaagatggatgagctcccaacttctggtgagtaaattctggtttataaaatcaggagcttgtgatgggaaaagtggtaaaacgatcatgaaaattgtaactatggctgctttatagagaaaattagattgaaacttattgttactttggttttgttgctttgggtctgaaactaccttttggggtttggcatatgtgtcttctgcttcacctgccattgatgaacacatagagagagactaagaaagaaagaaagaaagaaagagagaaagctttggttgatgatatggggttaaatttataagtagcagagcacagagcaaagaagaagacgaagaaaaagcatgaaaagaagacttagttgttaaggaaaagtagagaaagaggaaaggttttgagaattgtgataacaaatttcactccattcttttttgttttagcttttcttttagaaggttctgtttcaaatttatatttacataaataacctttttatttatcaatttgtcccatgtcagtgtattcctttttctcaactaagattctttcaatatgtgaaaaaaatgattatgtaaaattttgtataatggggtcatcgatttgatttcaggattatatcccaaataaaatcttgctaaacgtaatgtgttatcaaaaaaattctcaacactaactttgccgtagtgatttattataaaaaaaaaaactttgcagtagtgttaaaccagtgctgtcatagaacattaaaatttgcatagattttatgaccaagaaaaaccagtagtgctggtgaaagaagaattcgaagatcatttccaacgtattcatgtggtcacactattgttaaatttatgtggattttagttggaggtaata

SEQ ID NO: 27647 - DNA, 1640 bp, Cannabis sativa
  modified_base (1329)..(1332): a, c, t, g, unknown or other
aataataataataataaagcatttttttgtaatttgtaaatttaaaatttaatctaaaatctaaaaaaaaataattaattaaataataaattcaaaaaagtaaagatcaaaataatatagaaataccatatatttttacttaattttataattaaatatacatattcaaggattaatattatttgtgaattttagttgtgtttagaatttaattgtggttaatcctctttgagtgggaaattacaagtgataggtggttaatgtttatgttcacatacggttgaacatttgaataagtataaataattgtttatatttaaaatacaaggaagtggtctttgattttgttagatcatgttgtttgggaggaggagatgcatacctaattatgtaatacaagtaaatgcataattaatgtgtagtacaagatgctaatgagtgtgtaatacgaggagatgcatagttgagtgtgtataatataagaagatgtataactaagtgtataatatgaggagagacatagctgagtgtgtaatacgaggagatgcatacttgagtgtgtaatatgatgagatgcataattgagtgtgtaatacaagaagatgtatagctgagtgtataatatgagatagctgagtgtgtaatacgaggagatgcatagctgagtgtgaaatacaagcaaattcataaatgagtgtgtaatacaagcagatatatagctgagtgtgtaatacgagcagatgcataactgagtgtgatacgagctgatgcatgtgtaatacgagtatacgcatagttgagcgtgtaatacaaacagatgcataactgatgagtgtgtattatgagaaaatacaagacctttgtattatgaccaggtacatgatccttgtattacaacccgttacaagatcattgttgcgatatattaaatgtttgtcgaaataacatcccaacaatgttaaaatactttttttattattattatataattgtttatattttaagagaaatttttaataagccatatattttaagggataagatagtatcgaaagtttatggggccaaaatactaattatttatttattttttttatattattttatattttaaaatgatataaatcacttaaattttatcactgtatacttatgtacatatcggtacactttagcttttaacaataaatattgaaactgtaaataacataagagtgatgttgagagaattttgccccaaaaaataattttgtagaattaaatgttacaagtagtatagttcaattagtttaattgtcaatatctcttatataataataataataatannnntaataataataataatacaattaatttgatttatatttaatcagtaattctaatattacgtaccttacagcatgtttaaggtcttcttggtatgttgattgtacaacgttaaaatctagtttagcaagttgaagaaaagttgaattcatatgatgatgatgagacatttcagcatacatatcaataaaccaccttgcctccaaccttttcattctccaatgcactggaagctccaaagcatgctccactaatttcaccattaaatcattattatcatcatggtcaacagatatagttttaccttgcct

SEQ ID NO: 27648 - DNA, 4140 bp, Cannabis sativa
ttcatttgaagtgtataactagtgcaagtttgagatatgggtttgggcccaaggggtacccagttttgtgcgcatgggtgcatcgttcccacaatcagtaaacaaaggtttcctgattgcctatatattcggtaatatcgtttctcttttattttgctagcattactcaacactgactgctaaacacacaaaataagaacgacaataatttggaaataaatataacccaaaaactaaaacgacaacaaaatggtacacgacatcaactacaatagtacacgacataacaatgatataaacgacaatatatagaatcacatacctaaaaaacgacaatatcttttgtgaacgacattaatcagcaactaacaacaggagaacaagtgagctgtgctaacaatgaaaagaagcaaaaacattgaaaacgaccataaaccaacagaaacataaagtggaaaaacgacagcaaccttagaaacgacaaccaatctataatgacaacgacaaaatatgctaatacttttcactttaataaagttgtcacctttagtctttccaaagtataattaacgactcataaatatttaaatacagtaaattatgtattaattggaataccctaaaattcttcaaaatagataatagaagtcgaaaaacgacactaacctgaaaacccatatacaaaaaacgacaactgatatggtggggtacaccaaagcatcttccttcttctatttattttttcctaatactaaaataaagacgtaaaacaggaaaacagtactaaaacgtaaaaaaccaataattactctgaaaaacgacaagaaacttttagaaagagaggcaaagtgagatactaaaataacatgatatggataaaacgacaacacacattgtcgtcatggtggccaagccaaccactaatgaaagaagatgaatccttatccaccacacacttcagtaatttcattacttattaattaattcagcttaaccttttaattaagagaaatgctaaagtggtgtctaccaccattctatgtgtcaatatcactattggtccaattaagtctagaatcccatataatttaatataataacttttagagagtatcactaacaaattgcaatgcgacatatcaagaaagtgttaggcacgtatctaatagcaatgcactctaattaatcactgattcactgtgctatgattataaatgaataggtagtataggttcattattggttgatttattcatgaaaaaggcctaaacaagcccacgagtaacacaacataagaagggatgactcatctctattcttatgtatggacctaaacaactaaaatgaccactctatatatgtcaaataatgatatttttatttttattctattttcaaaataatcaatacaaaccaaaaatcaaaatatgctgaataaatttcttctcgaactttgacatgtactgattcgtactattatttttttttaagaccgttaataatttcactaaaatgtttaagattattcgatttaaaaattctatttcaattttactaacgaaagccttacatgaatagaagtttgggaacacaatttgatacatgaataatttctatgttagatgttcgttaataaatttgaatagatttagatctttaaatcgaataatctcaacaatttaaataaatttttaaaggcctaaaaagtacacttcaaaatttgaaaaaaatatcctaaataaataaaaaaagtattaccattctattttaatcttttatttaattttcgcactcgaaaatacatactaaaatatttttataatatttatgttcattatagttataaaattaaacctgtaaatttttaaaaaattctacctttataatatcgacaatagaatttataatattcaagtttactacatgtgtaaaagactttaaaattattttctaaattattcaaaaatttataaatataatagtgtaattataataaatatcttaaaaaaaagattaatttatatattttcagataaaaattaataaatctgaaaacaccaatctcaatatcgtaattaatcacatctcaagaagatcacagccgtcgaacgtgagccacatgatgttgacacgtgtacaaatcaatgtacgtttcacccatcacgagcgataggcatcgattttaatgcctcattgtccttttgtgttccccaagcccattttttctctctcacaatttcacaattaaacaaattttcatcaccttcttcttcttcgtatattttctccgtagaaagtagcagagttcttcatcaatggcggattggggtccagtgatgatagcggtggttctgttcgtgctgttaagcccgggattgttgtttcagattccggcgaaagggagagttgttgagtttgggaacatgcagacaagtggtgcctccatattcgtccactccatcatcttctttggtcttctcactatcttcctaatcgccattgatgttcacatctatactggataaaaagctttatattaggtcaactcaaccactccaactctcaactcttaatttattcgctatttctattttccttttttttttacatattaaaactctgatcttgtgaaatgaacgatttcactgtttgtggatttaagtatattattattattattaaattaatgaatattttgggttgattaaagtaagtaacaatactaagattttgcctttttttttttttgtctgtaaagaagttttgctttttaattcacaggaatctaatctctatctattagcttttgattttagggatatttttgcaagattaattattaattatctaccatacattttttttaaaataataataataataataatgtattattacttttgtatattattgtcaagttatatattatgagttttggtacaaggctacaactacatggcaaacattttagagtaaaattccaaatattaaattcattaattattattgaattgaaaaaacactagaatgacaacattttttctataattcaaaaaagtaaaggacgtcgaataaaaagagccactaaaaagaaaatgacacaaaagccaaatcatagtgttagagcactcacaacaagataatactaggtaaaataaaatagttaaaaatttaaaatttagctcttttaaaattaaggtattatatcccatcccaaatttacatataactcgaagagataaatatattttatattttttttaattaattttttattttattaataaaatatatttaaagatataatatttaaatgatatagagaaaaatataaagaagtatatatatcgtgtaatataaatgtgtgacgtaaaataaaaaaattaaagttttaataagagtattttaaaagttttaataagagtattttaaaagatagagtaaaaatactttggggtgctcttaaatctataaaactatccaagttaccttgttgaaactaaatttagatcaaggaaataacacaagtccaaaccaaaaataatgagaacataaacaacatagctcaatacttcttccaccaatgtaaagaagaataaaaaataacttccttgcggagaatagatatctcaccccgatcgaccaccactaaccggagaaaggaatcgaccaccaccagttggagaaagaaatttcatatcgcttaccacgacgacagtaagatgagatccaaattgttaagagtggcagctacaaaacgtgtgctactgcagtaataccattctatagaggagaaaccgcctaatccccgacgccaaacctgcatacgaagaattcttgtaaaggattcaaaatgatattaatcctgaaatgaataggcaaatacaatatttaagtgacttaatatattggtttttctagtgcaataagagatgttttagtaacaatcaatcactaagtggaaaactaataagttgttatcgttcctttaatttagtttttgattttgggttaggattcaaaatgatattaatccttttcgttttttattttggattttcgggattcagcttgtttcctaagagttctacatttttttagattttgattttgctagttttggaagaaaaatggttgaga

SEQ ID NO: 27649 - DNA, 1154 bp, Cannabis sativa
agtgagtgcgagcaaatgaagattagacatagagcgtttgatcctcagggctacagagtttattttgaatagccgccaggcgacaaattttgtaattaatattttgtagcagttgtaacttttaaaatacaggattccagtttatgtaaagtttattttatttaattaaaagtttattaagtaaaattttgattaaacacaatttccaaccaacttattgattagttcggattgcacaattaattttaaatcacgataacaggcatatcctaataaagtgttccaattattttttcgactggaaacatgattaaattaaattaaaaattgtaaaaacagtggcgggatagaacctttttataatattatttacctttcaagaaataattgacaatgccaacacaacttaatataatatttagttatcattatatcatataatatattatattcggtgagcacatatataaattatcttactacttaattaaaatcttgacataaaaaaattacacagatatttggtttaattaaggtttagacaaaataaaataaaataaaaaacaatgaatacacacatttacattattgaaattataaaaatttatacgagaattttaacttattattaatatgaataggaaaatttcatttactattcataaaaaagtccctattagaaaaatcactttcctaataaatttatactattttatcttaataattccacattatatccaaaaaaaactcttcccatttattttatttacaaaacttaaaaaacttaaaaaagttttttctctctctacgtctctctcatcatcccatccaaaaggagccaccaccttctccctctatttcttcctctagatccctctaattcgcccaaagatcctactgccctcaacccacccgatcctccgtggaagcccaaatgtctgccatggaagcgtcccctgtctccagtcctctgtggaagctcgttgaatacccaaaatgtcccaccacaaagttcagaggtcggagctcgtggattaatgggtaagtgtttttaaaatatttttttaaataattataaagtatactctacttttcagtagatttatgtggttgttgtttgtatttgttttattttgatgtattcttcgctgaaa

SEQ ID NO: 27650 - DNA, 2858 bp, Cannabis sativa
  modified_base (892)..(898): a, c, t, g, unknown or other
aaccacttcctacgttttcttgacaaaccaaaactgtataagttggaaggcccaattacagtccatggttgctatttccaccaaaaaagtagaatttatggcgactatagaacctttaaggaagcattatggcatcagggagttctttttgagttgaaacaaatcaaaggaggagtgattgtgtatttggatagccaatcatccatccatctttgtaagaattttgtttatcatgaaaaaagcaagtacatagatataagactccactcgatcagggagaagttagaagaagggttggttgacttagagaaggtcagaacagaagataatcctgctgatattgggactaaggtcttaaacttaaacaagttcaagcattgcttgaacttgatcaatctcggaagttagtgtactgagattcctggaataccaaccaatgatggttgcattctttcttcatcatcgttattcttttaacttgaagtagctaggtggaatttgtggtatagttcctctaaatttgtggaatagttcctctaacttgaagtagctaggtggaatttgtgtctaccggaccttgttaccggacatctaacttatccatctaaaaaagagccttgtagaatgatagtcgtgtctggatgggagttctccgatgactatcatgtccactccgagttcagtcttcaagataactagcccttccctggaaaggagttccagttggctagttgtcactcctagaatggtagatccagatagtcgactccaacagactctatcctttgtggaagcatcttcagcgagagtccgtggtccttgagtccgggtgctcatatataatccaagaggctctattacttaagccgacatggagacttcgctcaaagannnnnnngttaagttagttatttctaactaagttaacaaccttgttcttgtagccaccgactttaggatcttgatcctaagcctataaataccaccttcacttatcctttaacaacagactgaattacatgagtttgagaactctgttaagttaagattgagagtttgagagagaaaatattgagaactagagagagaggtgcagagaaagagcgagattgggtttgggttttgtgagaagaatcttctgtagatgaagaagattcttgggtgtgagagttaaaatactttgtgagaactcaatggagaatctcatctcgaatgtattgtacctattcttgctcaatcaataaataaggattatggtggtgttctagtactggagtagagccatagatcacatcgatctgttggatttgaaccagtatatatcttgttgttgatttctttattttctgcatttattgtttttggttttaatactctgtttgccctttttttgtcgattattattcatggtttagtaatcttgtcattgctaattatttgattgtttaaaatttagttaatttgattctacaccattagtcgtaattttctcataataatatgtaaacaaattgtaggacatggaacctctgcaaattttagtacaaaacaatgaccattgggatgacaacaaacactatattgattacaaatcaagtggagaattactatcaatatattgcacttttaatcaactagtgaaaatagtgatgggggaactacaatacaaccctgatacaacacaaatacaactaaaataccatctgaaagaaggattccaaccactacaaatcaagaatgataaaagtatgatgttccacataaaggtattaagcaaagaaattgattacacacggtacccgttgtgtgtgaacaaaatcagcaacacggagagagaaacctttttggcacctaactaatcaatgatgttcaaaatatgatgatgacaacatatcacaataattgagcacaggcagatgtgcaacatcattgtaacaacccaacaacaacaaacaagcaacaactatctgttgcaacgattggatcaattcaagatgatgctattttattcgacactatgactttaatattatagtcaaccatacaacaaccagaaaacaacaacaataaaacttctgcagaagatgaatacgtgcaaccaaaaatggaaatgttacaataacttgaaaataactagaaagaagaagaagaagtcgacaacacagaaatgattatcatcactgataaatgacacgaaacaatagaaaagggataactttacaaggacaaagatacattgataagttccctatgctactttgcaatcaagaaaatatttcaatacaaagtagtataatcttgctctaaagaatacaatattgtttgtttggactcaaattgcaaatgaagtttaaattcaaaaaatggaaacacgaaaacatgcataataagaagttatcaagaagaacacacatgtgcagttccaataagatttggagatctacgaccagaaactgcaaagttgatagaagattttgtaaaaccaaagttcttgaacctgaaaacaaagtgcagccctgcagatataaagggagaaatgaaagacaaatacaaaataaagatgaattacatgaaggcatgacgtagtagagaacgagcacaaagttagctacatggaaatgctaaagaatcatacaatctcttgccaatgaagactgttggattgggagaccttagacattcctttgccacgtgtctccatcccaataaatgagggataatagtatttaaaccccctaatacgaaatggtttttactcatttccctcccattttcatctttctcccctcttcactcaaaattttaaacctttaaaattcttctggattttttcgaaattctttcctacaaagaacgat

SEQ ID NO: 27651 - DNA, 1711 bp, Cannabis sativa
tttagtcacggaccttttaatcacaatttataattagccacaattttttcacttttaatcaaaaattttgttgtgattaaaagtaagattttttgtagtgatttttatagttctacaattttttagtgtagtttttcttttgttttaaaatcaacattgttttcacgttactgcttcgagaaaacaaagtaaaaataacattttgttttaaaaaataataagtgaaaattttgtagaaaacaataactttaaaagtaagaaaaataaaatatctagaaaaatgtagaaaaaaaaaaaaaaatctaattttaagtacattattgtgtaccatctgtagatcaagttgcaaataaactgttagagagtcccaaataacattattggttctttttctctttgtttttcccagacaaaattttattagagctttctgtttgtagaaaagcttcttttaccttattgttattattttgaagataaaatataaaagaggggggaagaaaaaaaaagatgaccttatctttggtttagttttcttagtgtctctttctgtaatggcatcaattgcttttgtttgatgtattgtttgttcttgcttgtattattgctcacttagtcgatatcacactatcactatataatttcatcacgtttattttttattttattttttgcatattccttttacctctttactctaaattatacctctttttctttttggcttcattttcaattaacaataataatatgatcatatatagttaaaactttgcttaatttgcacccatgaaggaccacagcattagcatagaatgtaagtcatgtttaggaaaaggcaaaatcaccttctttcattatgatttttgaagtgagctcatgcaactaactaataactattcactaaactttatgactaaaccctaattaaagatcagaaaatctaggcttttcccattaattaattaattaattagttgtctgcattgtcatgtcttattctcaagtttttaaatatgtataagctttactgtttcatagattttgacattttaaccaaaaataaaaataaaaatgccatagcattgcactacatggcatcatgttcttatttccaattcaatccttagggaggaatatttataggataaaaaattaatatttgtccctatggattaggtcgaagacttatgtaacacttaataaaataatttgtgtgatataggaacatattttattgtttaaaaataaacaactgttttaaaatttattttttgtcatataccagtcaacttaatattacatctatgttataaaacttaaatttcaactaactattatgtcgaaaaaaaaaaagacaaataagatttcctcccccggcccaacaaaaactattgcctttgttgagttatgtcattcaaatttttggttcattttttaatatacttgataatataatgaaacttaaagataaatttcaaaaatatatatctttatttttagaattaatgtttatttatgtatggtttgtttggtataacgtattacatcgtattgtatagtattatattaaattgtatttcatgtaatatttttatgaaaaactagatgtggtattgacttttatagacacctaaatatataatattttagtgtaaattaaaatttaacatagtattatataaacatatgatatataatccaattcaat

SEQ ID NO: 27652 - DNA, 2539 bp, Cannabis sativa
tatcttgcttaacttcgagttgttatccttgtctatcataatgtagaaagaatgctaagtgttagcagatggttcgcctcatcaagtttctttagctagaattgcgaggtggctgtctcactattcataacctgaggtttctttgtatgattgtattcactattttgaataaataaattatcttctttggctgtgtaccctgagacaggtgtgtgtctcgtcaatataagtttcaatagtcctttatccttgtatcgcttaggactatgtagtcagcgaattatggatattttctattaatcccttattaacgagttattcttttttgtattaaatgatataatttcattatatcaggtggttaatattccattgcaagacacgtgttactttctgaagtgtagctgaatttcggatataataataatatatattgtggagaatttttagagggtgtgctttttaattaatcaattaaataatgaatgaataattataattataaatttaataaaaaaaaaatcaaaaaaaaaataaaaaaattaaagagaaaacaaaatatgtatttagtgtatacaaatatattgattttttatgaaaatttattaaaattgtataatatcaatttgtggatttatggtgtaataaaatattaaaaatgagagaattaaggagaaaagagaaaaatagatttcgagaaattttagagtgtcatatcaccgcctcatttatcttctttgtacatatattgattgatgatttatttatttgaaatatttttatttagtaatatgtaatgaataagtagatatattttagtacaaaaaaggttattataattttttttatttaagtttatcaaaacaattttttttaaaaaaaaatgttgggttgtaccaactttagcttttagttgtagcttaatcataaatttttcaattttttcaataatctgatttctaactctttaccaaacccatttatacaatacaacttctcaaaagctataccaaattcgctcttaatacaagagacatggtatgccaactcaatttgtgtatacatgtgtaagatatgtgtgtgctatcattattcataaattatattatatatagcactacaataatatataattatatgaaaaatttatataatcaaccaaaatttaaaaaataaactttagaaaatgagctttgcattttttttataaaaatactattatagtaaaaacaataaaccatattttttttttttttttttggattttttatagtttatttatagttctattatagttgtcatgagattattttttgttattttatcgttgatttatagttgttgtaatgtcgatttctagttttttttttcttactttttcttaagaaaagtgtatgttataattttaaaacttgtttgtataaaaaattttaagttgtaaaattgtaaataaaatataaaaaaaaaaaggtatttttgaaaattcccctaattatataatataatttgcaatttttatttttttatttgtaaattgtagttataaatgataaagaaaaaaaatgacatttttgaaagaaataaaaatacggtcatgcataactagtcaatgatactccagtaactaatgggtgggtttgggttacacccgaaatccgatacccaaactcgaaaaatgttcaattctacctcaagcctcaatagatgcagctgaggcttttttgagatcaatattaaattcatcggatgactattttagacaagtaaatttaattttgaattagttacaaatcttagtactgggtcccactaaagattgtatattaaaatcccattaaaatagtgttatacacttatttttccaacaataatgctcatctaaaatattctccactacttgacaatccagtaatcatttctgtctacctatgcccttcttgaatcttccatacccacaaactgtctggatattaacctcagtgcctatgttttcgagattatacatggaagggtttaatttggtagttctggtagtgtgatcatatttctatgtatagttattgtcccataaaaggtgaataacatatggtttccatggaccatgatcatgagattactagctatgataataaaaggtatcactttaaccttaattatattatatatgcatccaattgggatttgcataaaaacaatgactttcatgcatggtactggaaacaaaatcttggggagatctgtgtccgtaattatagatcttgtatggtgctggttggggcctcggagcctatttagtcaaacatatttttggttttgttctttttttattttattttttttttaaatcaatttattttttttttaattttttaacagcccaactttttaattatgaatgagaatgtcaaacatgatagatggtgggagaagctagacttttaacattgaaagatggtttgagatgtaaaataaccataaattcaaaaactagtaaatgtctttttcttaaaataaaaattaaaaaaatagtaaaatataa

SEQ ID NO: 27653 - DNA, 2582 bp, Cannabis sativa
atttatgtcttagcagaactaggacaagcctcggctttcttaagttctttggtactacgatggacttggagagaactcagaagaactttaatactacttttgattatctacccctgagactattttcatgctttgtcaagatcgtttttcccatccaatccataacaaatttgttacatcttttgacatatgaattttgcaccaacacataatttaacacacctgtgccagaagtcactttagttagaatttcttgtctgtaaagtttgtgcttgatttgtgatttgtatatgcaaacattattactcgatatttaatgacacctatgccagctggctttgtctatgcaaaagttggcctgatctcccaagttgccttaactttggttttgtatcggcttccttcatattgattctggcttctggccttcgtaatgaagcatcttttcactcttgaatcttaattaaaaaacaaatgaagttccaaaaaaataaaaataaaaaaacctgctagcatactgcataattcaaatcaagtacttgtataagtttatagaggataaatttgattcaagttcactagcaaccatttgatttgacttttggcataccaccctgaagagagagagagagagagagagagaagtaaagggtaatccaaatgtgtcattttcaattgtaccatcagtgtactataacaaatacatgctagaaaacctcatttctgggcaaggaaaaacaaattgttttatagcatcctcaaatatccattggagccgcaccttcttcagctgcagcaccctggtcagcgggagtaccctctgctgctgcagagccctctgctggtgcagcatcctgatcagcgtcaggaccaggttcagctgcaggaacctcttcctctgccacaatctcaaattcatcaatcaacttttgtacagtctcctgatctaatatatggaatgcttctccagctcctaacacagcaattgtacagattgaactccgcagcttttctccttgcaaggtctccctagttgcaatgagtgcatctttaatcaaatcctccctcgtcgagtctttgaagctctcaaacctgcgttccaagtacgtctttgcagcttgtgaacgagaccctatggcaaaagcctgatactcaaagtagttaccacttgggcagttataatagaggtgagctccagattcatccaacccaccaactagcaatccaacaccataaggtcgtttccatgagcgttgagtgcacacctgccataaagataagtgactaaattacggaaatgtgtcttctaaagtaacatgaaaaacaaaatttataatcatagagaactgaaatgtgaacagtggtcaccattgttttttttcctccatagttcaaggaaagcacatattaggtactaaacactttctataaggatttggggaaaacatagaaaatgttcacatagcgccagcaacatagataaacatagataataagtccacaaaatcatgttgcatgtaaatgcacaaaatccacattcccctgtaacaaatacatattttcagggtgcctacatacatatctaagaaagcaccagctgatttcaaaagaataagatgtcacaaaagatagaatgatcatttattgactacagactaagaacaagaacataattaatgcatctaggagaataaaataacagttaaaaaaaaaagaacttaattaagcattaaaattatcaagaaatcggagttcctatactatttgtcacacagcaattgtgcaaaagacatgaactttaagataaaaaagaaaaaaagacaatgttaagttcaataaaagttcgattataacttcatttgattattgcgcctccacaaagcacaatatgtcgtaatgctctcacttccaaaagttttaagtaacatctaatatctataaatgtaacaaagttcagtgctattctgggtaggttcatctccgaagcttaactctacattggtttgggagccacaaaagaaaaacactgaagcacaagcaagaaccctagctaacatgtacaacttgagcttaatagaagtcccgaataacccataatacatgttgatcaaaattgaaaatttaagcctcctgagtcctgccctcaactaaaaaaagaactatattaacactcatttctttcacggaaagtcatactttctaccaaaatcatatcttgaaatagatttgaaaacccaaaacaaataggtgaatggagtggatgccacaatttcttagctttactaaaacatagttccctattccagatttaaaacccatcagctaattattcgaaaagcataaaatacaaaccctgtagtaatactaataacaaacagatcatcatagaacaaaagcaatagagaatgaatgcaagttaggtttctacaaaaaaaaaaaacgaacctgggctttatcggcgagttgaacaacgagtcggccgacggggaggggagattcgtaggtgtagttatagttgatgcactcggatcgcatgtagcgggagagaacccgaccgtcagcagtgagaccggcaatggcga

SEQ ID NO: 27654 - DNA, 4326 bp, Cannabis sativa
tttttttttttgaaagaacagattgttcattaagcaagaaaagtgatgggaatcacagggggattgccctccccttgatacaaaacagccatctcactagaaattctagcttttttagctaaaccatccgccaataagtttagagaacgactaataaaatagaaattacaaacaaggaaatacttagaaacattaattatagaaaaataaacatttgaaagcttccaatcagggcaggtgccagaagaagataatgcattgatcgccacctttgaatccgaaaggataatcacttctctccaaccttgatcaatcgcccaggacatggctaggaagatagctctgaactctccttcaagagctgattgtgcctgcaatctttgagtcttaacaaaccagttcccagcatccatatccactgcaatagctgcaatacctgtttcccctcctacccatgaagcatccgtaattaggacatgtctcgctgaagagttggttgaaggaaagcctcttctctaaccagacctcccttggattgaattcccaagtcctgatctcccttactgatccgagacaccatctgcatctccaagaaatccttttcagcccttgccaaggccaacacaggattgacaggaacattttcaatgtaatattcattccgctgatgccaaattgcagagagaacacagccaaagtaattaagtaactcgactctgttccctccatatggtaaatcattaaagtgaagcaccaaattttccaaaacttccgataatgattcacctaggatgtccccaatcctaatgtgcttactacctccaaaccaaatggacttagagaaactacacctacaaaacaggtgcaggggattctcaatgccagcatcacacaagtcgcaaactttgtcaggcaagaaatgcaatcgacttttggttggaatcgcatcatttagaatcctccaaagaagaacagaatttctaggatgaatgccagttccccatatccacttccaaatttctttgacaggttcgaacctccaagattggtccacattataagctgcctttacagagaagtgaccattttgggagtgtttccaaaacacctggtcttggaatggaaaaggaattcttggtatagtgaggatacaatttcccaattctgtgccaaaaatttgaagaatcaactccggattccagtcattgcccgaggaaacatcagctagagttctgatagtgtaacctctactccttatgtcatgcattagagtcataaattcttgtaattccatccaagggatccatggttgttgccaaaaattaattgaaaccccagttgcagatacagatattgaacccttagagattgttgatcttgtatccaaaatacattttcaaaggtatgagtcactagtcttactcttcacctcccagaaggttgcatatttgcagtatttctttagcaaacaaatgacccacggcttgtcttcttttgttgccaaactccaagccaacttggttaacaaggctttattcatgtcttcatatcttcttaagcccaaacctccagctgcttttggttaacaaatcttctcccaagcctttaaagcgagataccgatccttatccacccttccagaccaccaaaacttcctcatcaatgcatcaagttcacgacagctggctaaaggaactttggatgtagacattgcataaacatgcatagccgaagttactgacttgatcaatgttagccgtccagcataagagataagttacatcttccacccttctagtttcttcaacatgctttccttgaatctcagataatcctcttttttccttctcttgaacacaaacgggttgcctagatgcctttcctctcctttgacttgctcaatgttgagaataccaaggagattgttcttccttccattgcttaaattctttgagaaaagaacaccagattttggtttgctacacgattgccccgaccaagcttcataaattgagagacaatccatcaacttcttagcttcagaggaatttgcacgagaaaagagaatagtatcatctgcaaacatgaggtgtgaaaccgaagctgcagattgtgcaatcttgatgccgtgaactgaaccttgagcctcagccttagatataagtttcgaaaggacctcttggcaaagaagaaacagaaaaggagagaggggatctccttgatgaagacctctcttaggatacaatttcttaagaggacatccattgagaagcaccgcataagaaacacttgtaacacaggccatcaagagcttgcggcttttgtcattaaaaccattcgccacaagaactttttccaagaaaatccattccatcttatcataagctttatgcatatcgagctttaaagccataaaccccccgttacctctcttgtgccgaatcttatgaattatctcctgagtgagtatagaggactctgctatccatctaccagggatgaaagctgattggagaggggatattaagtcattcataaaaggtcagagcctatttgataagatctttgcaatgactttatatgagaagttgcataagctgatcagacggaatcgatccacactaaggggaaaatccacttttggaataaggcatataaatgtgttattaagagtaggatccatcacacctgactggaaaaattccttgactgtagcacacaaatttgttcccacaacatcccaatacattcgaaagaaacaccccgagaatccatccggccccggggcctttagagggtgtaaacagaaaacagcttccttgatttccacatctgaaggagttttggagataagctcatttgactgatcatcaatccggttgacaaacaaactttccaaagtttcatcaatataaggtcgagaggaagtaaataactcctggaagtaactattgatgatacccccaatgtgtttcctctccttccatatccttccttctttgtctttgatcgcccaaatgctattccgtcttttccttataacagtcgctgcatggaaaaatcttgtgtttctatcccccaatgaaagccaaatttctcttgatctttgtctccacatacactcaagcttagaccaagcaatttgaatttgagaaagaacactggtttcttcaatttttaaagcttctgagatagtttgactttgaatccactctagtcttttctccaacttctgaattttgtattcattagtgatttggccagttttcttccaactttgaagagccttctttgaactatttatattacgaatgaaagaagccgtggcattactatcagaacagacccaggctttaataatctcccttttacaagagtcctcccaagaccaagcttcgaagaatcgaaatggaatgtaacttctcactgcaaacaggtgtgtatcgaaaataataggagcatgatctgagatggatatagacaggttacaagtaccagcattctcgtaagacaaaatccagtcagaagaacaaactgctctatctaatctttccctaatgaggcctccattgaatcttttgttttgccaagtgaatttatttccaagaaaacgaagatcgaccccaccagtattgagcataaaattatttagccatttagtttcagcaggagacactaatcggcccccagatttttcttcttggccacgaatacagttcaagtcacccaaaagtacccacggcagagtacattgtgaacattcctcttccaaagacttccaaaagacctccttaacactggaatagcaaacaatttctaatgtcattgagtttgatagtcccagatagtagcatcatagaaaccatcagcaaagtaattaatcaccaaatcagtattgatattccacattaaacaagaaccccctgccagaccagaggcatctacacaaacaaccttcgaaaagcctaaaaatcgagctaaagactccatcttgcttctgttaacttttgtttccatcaaaaaaatacaatccaccttgtattttttcacccaagccgcaagagcttggggtgttgggtctcttgcgaggccccgacaattccatgaaaggaacttcatggggcgggtgggggcttgataagggtcgcctcctcgcccaatggaaaattttgagaactcttaacttgcacttccaccaaatttagagagttgattagattcatgtaagtctctcctccttcaccagaggaccctatcggtttcttgccttttttggatgttgataacttggatcttgatcccttctttcttcttttatcattcttc

SEQ ID NO: 27655 - DNA, 3080 bp, Cannabis sativa
  modified_base (339)..(342): a, c, t, g, unknown or other
  modified_base (2358)..(2359): a, c, t, g, unknown or other
ctatctgacattttctcgcttagattgcatgtgttaggagggaaaagaagatcgacgggagtataagaggaaagaggttagacgcagagagtgggcacgggcagggatgcaggtggcgacaggcgagggcgcacaagcgcgctagccctgcggggggcgagtacgggcagtgcgctgatgactccaaatattacacttaataatctttgggggtcaacaactatatttactctaaaataattctattatgatatagtactaataattatttattgttattattgtaacattgatattatttggtattttttttttcagtgtaactctatttagttatannnnctcaattagaatataatttgcttggtctcaagtatattcttgaatagaggttctaccgtataatcaaacacgatatgtacattatgatttaaaatgacatagttcccaactttttatttcaaacgtccataaaaaattacattcaccttgtagtatgacttgaatattttagaacatcctacgtacatacataaagtcttaattaacaaaaactcatttattgaaacatccatttctccatcagggagacatgtcatagtctactgcataaggataaattataaacttttattacatattaattaaatataattctaaaataattttaattaataaatatttttttataattaaaatactaattataacttcacataacttatcaaaattataataaaaaaaaaataaaaaataagtatacaatgcaattttctctattataaatgatgaaatatcctttctaccgagtttacatctttctaaaacttttccacttaaaaataataagagttaagcacaactccaaaaacttttttatatataagattgtttattataatcataattgtacaaagaacaaatccatgaatttatgttatgaagaatttacaccacggtcttgtcttttgacatggtagttttgttcttatgtggtcttgctaaaattctgtcttattgatctcttttatcctagtattatttcttataagattggatcgtgtgtgtgtcttatttctgattggattgtttgtattatggagcctgggaatcgttttccatctttaatagtagagcaatatgagggcttgaacatagaagatgaagaagaagtgggaattctgtacgaaggggaagatgatgatttgtcagatattgatgatagatgggtactagttggccgttttcttacgaaaagatccatagattgtcaagcaatgcaaaataagatggcggttctatggcaaccaggccgtggtatgtatgtcaaggagttggaacataatctgtacttgttccaattttatcatgaggtggacatagaaagagtcatggagggaagctcgtggacttttgatcgtgttccattgatctttaaacgtctcaagtatggtgaaaacccacgattagttattttaaataaattggagttctgggttcaaattcataatttgactacggggttcatgtccgaccgagtggttcgtgatttaggcaactatttgggtagatttgtaaaatcagacccgaacaactttattggtgtctggagagattttttcagagttagggtgaagattaacattgacaaacctctcaaaagaaaaaagaagcttgaaagaataagaggaatagtttgctatgctcaattcaagtatgaagacctgtccactttttgcttcatttatggtatactgggccactctgaaaggttttgtgaaaaactctttgatactcccctggaacagatagaaaagccatataacttggaattgaaagctacaccaagaaggagaagtcatacgattggagcaagatggctacggtctggttcagtcaataacaatggtggttactctgctacgggagggacgatgatgacttcagagcacttctctggccggggagatagtcaggctggcgatgctataattgggggaccagggacaaagattcagggatccacatttactaagccgattgttgtggagggagaagaggcggtcaacaaggaagtcaatgctgatttagtgggagggtcaattgatcaatatcctaaagatataaggggaaagtcgtattgccaagatacaattgaagtcattactgaatataatggagaggatcctttattgatattagaaaataaaagaagaagaatgggccaaatacctatacaaggaaatttagacaaggttgggttgggccaaatacccaacagataaatctaaacaaattgtggatgatggtatcatggattttgaggaggaaactaatgacaacacaaaaaacttgtcnngggcgggttctgtttcgcaggcccgccaagaattatgaatgtcctaagttggaattgtcgggggcttgggaaccaacgggcggttcaattcctaaaagagttggtaactcaaaagaaacccgattttattttcctttgtgaaacaaaaagtggtaaaagtaaaattgaaagattgggccagtcacttgagtttgaaggggtttttactgttgaagcccaaggaagtgctggtgggcttgcttttttatggaaaaatcaagattatggtagtattgttgggttttcaaaaaaccacattgatttcttggtggagtcggctgagaaaaggagatggcgtctaacaggaatctatggtgaatccgtgcgtgctcaacgtcaacaaacctgggacctgcttcgatttttggcaagagactcgtctcttccgtggtgtattcttggggatttgaacaacatagctcatcatgaggagaaaagaggcggtcggaggtatccccaacaacttatcgacaggttctatgaagctcttgaagactgcgggttggaggacatggagttggttgggcaccctttcacttgggagaagggtagaggtatagacaattggatagagagccgccttgatcgtgcattggtgaactcactttggacccaggtttttgatcttgccactcttttcaatcttgaattttcttcctctgatcattgtccattatggttg

SEQ ID NO: 27656 - DNA, 3564 bp, Cannabis sativa
tttaggtcatacagggttggtcgacctatcatggcattataagctgagggtacgtctattacaacgaactgcaccatcagagtcctagctgttggatctctaactgtcaaaggcaatcgaatgtaccctatgggtgcaatgccttggccaaagaagccatacattacttgagtgtggggtgaaaaatcggttagttggagccccatcttttcatatgttgatttgaaaagaaaatttgaggagggtctattctccaccatgcatcttgcgacagttatattcccaatttgtgtagtaatgagtaggggggtcattatgcaagaaactaacttgagtacccttcagtgaaagagatagtgtgctctctgagctttggttgctttgagcccctctctttaatcctaggatatcacttttatgctcatgatgaagtgtttgagcatagcattccctagccttgctagtctcacctacgatgtggggtccttctataattacctctaaataacctgccactagaggtggcataaggtctccattctgggcaccttgtacctgagtttggtcgttctgcacataacaatgaaagtggggattgttcaaccatatatggaattccatctccctcctcaaattctaacacttgttggtgtcatggccgaagtcattctgaattagcagagcttcaacatgtccctcttgctcatctcccttttgtggggcttcttgtacgggacaattccctgagtggccatgaaaatggtcttaggtttctccatctaaaatgtaaagtaggtgaactcctcctcgttatcttttttattttatggaatgggagaagtgttgtacttctccttttgccaatatttcttccagagctattgttgttgcgcttacccaagtgttcttgccacaagaagtttgtgtagaaatattatcacctacatgcgtatatagaaagtcgtggggctgcagggtgccttgagactgcctattgttgacttgctttgtctagacttgtcggacagcttccttgcttgataaactcgtcagctctatcatggaactccttcatgttgtttgttgacatcctctggatatatttccagaagtcactcaattgaaggatgccccccaatatggttgtatactggccttcttctattaggtctttgaccttggtggcttcggccatgaacctttggatgtaatcctgtaaaagttctcattgtcgttgcttgaccttgacaaggtcttccagctacattggtatcaacctcaaggatgagaactatgtttagaattctcaagaaaactcattccaagaaataaatcctcctagagccagcttaaagtaccattgctaagttgcatctcaaaatattttatttgtgtcaatgggtcttctctcctagtatacattttccataccggcatgttgaacttgggcaagggcaaggcattaatatatgccgagaatggtgatccccttgacctatctacttcaatgtatgaaggttttttgcaagctaggaccttgatcatgtcccttatttgatccaattgtgcttgcatagaaggatcaattagcatagggacttagctgattggcccttctcgaatggactatagtctttaatgtgttagggtttggctggccattcaaggaaggctagactggccttggttggcccaccccattatgagtagctcttgatggtcgaccagcaatgtgctaggtatggtctggccaccagttctcccctgagtggatggtgcagcatgtgctttgatagatggtagatcagaccaattgttagagtttggtggatctagatatctgaagtgacaagactcacttcttaagttgttgtcttcggtgttttcgacaaattctcagacctagcaagttaaagatggacctctatgttacttgctcccagagtccctgagatgaaagttcacctcgctagctgcccaaaggtgtaccactagggggctggcccgccagaggttgacataatgggggtgttgtagagcttaagatccaagctggccccccaaactatttgttgccgagatcttgctattctcaccactagaccttcgtcgcaagacttatcgtccttcgggtaggggaaggtctgttctttttcatgaggaacctagttggacagtctgtcaataaaacctccccgattttttgactagtctctcttagagagtatctctgatgagatcttaacctcttccaaaaaatttctcattgaaccaccttataaggtcgctagcttctatgttacggtggtccagctttccctagtgagatcagaggatgtactcttgttcatccatccatcttaaaaatttgcatcttgattgtgcaaatacatcgcaaccaacaacgcgtggttcttcagtttaactgacttgatagatggcttctctaagtctggctaagtctagatcttctcctaagtctacatagggctcgcatattcttaggcccattccgatagcataatattggggaccaaatctagttgtaacacctgggggtcgctcaatgtgggttattccttcaatgggacgtgctagtggagggtcatccctaggaggtatgggttgattgtttagacccacaaaaatggttatgttgacctgccagctatggtggccaggtttgtggtgcctgccgatgtggtaggagtggtcaaatttataggatttgtggagattctagttattactagaacacgatcatcaggatcgtccaccataggatcttgaggaagacttgaggaggcagacgtcattgccagacttcttattatgttaaccatgacgtttgatcagataaattaacaactcactctcaatgaaatcaccaaatgattgacctcaaattttgccaaccgacagcggaatcaaattttatatggatgtttgccacgtattacacaattagaatagaaaattaaatagatactatagttgtattgatagcgcgtaatgacctacgccccttttagttgtattgataccagagataataccacttagatcattatagtaatgggatctgaagtggctctcttaagaatataatgtgataactagagttggcaaattttaagtgagaatagagcaatggacatgtgagagagagatgagatgagttatcacgcttacaacttaaggcttagtgtttgagacttagggttttagggtttgaccaatgctctttatatagtagcgcttagatccctaatattccttaagaatagataaataaagctattatttacataataaattaataaaacacatatgactaaatttcccctcaaaaatagggaagatgatgatagtttctctctattttcatgggctgtttaggcccaattcattgtttgactacagatgaaagctacacaccaaaatcttcccaggtgaaaggctggctggccatgcttgtcataaggccagccaggggtggctggccagcccccttgacgtggctggttggtcattctgtcatcccacctaattacatggatccct

SEQ ID NO: 27657 - DNA, 1602 bp, Cannabis sativa
  modified_base (885)..(887): a, c, t, g, unknown or other
acccatttatttccaatgatgttcatgcctggccgttttggaaccaaataccaagttttattccttcgcaaagctgacatttcatcacccatagctgagttccaacctggatgacataaggcttcttcgacagtggctggttcatcatttttccactgccattgtgcttggccaagatatactttcggtttaaaaattcctgctttagaccgagtaatcataggatgagaaggctgctgaatgagaggttcattgtgagctgcaatatcttgcagttcgggttgagacacacaacctgtattgtgagttaaagaaacaccagcactttgttctacatcagcagagttatattcattagactgagatacctgctgctgatctttattgttggaatcgtgtgagttggtgtctaaggttgctgcttcagggacttcagaggaagatgttgatgtgttgttgttgagctgatttttggaagactgaaataaaacagaccaggaaggaacactcacacagatggatttttcaggttgataattattgagaaaaccagtttgaaagggaaaattatcttcattaaaaataacatttcgagaaatataaattctccctgttgaacttagacatttgtaacctttgtgagagtcactaaagcctagattaacacacttaactgaatgaaattgaaacttgtgagtttggtagggtctaatacaaggatagcaagctactccaaaggttttaatgaatttataatctggtttcttgttgtatacaacctgaaatggtgatttatttttcaaaattggtgttggaagtctattaattaaatagacagcggtttgaaaggagtcccaccaatatttgagaggcatatgagcttgnnnaagaagagtcaagcccatctcaacaatatgcctatgttttctctcagctctaccattttgggcagaggtgtgaggacaagaatgttgaaaatcaatgccattttcaatgacacattttgaaaaagcttgaaattctcctccccaatctgttttcaaagctttgattttcctgtcaaattgattctcaactaaggttttgaattgaacaaaagctgaaagtgcttcatccttggttttgagtgggtagatccaagtgtatctactatgatcatccacaaaatgaatataaaatttgtagttgtagcttgagatgatgggggctggcccccaaacatctgtgtggattaaatcaagcatatgattagcacgattggaattggtattaaaaggtaaggcatgggatttcccaaactgacatgcttcacaaaaactattcttttcattcatattgattgttacatttgcaagacttaacacttggtttaagactcgattggaagggtgaccaagacgcttgtgccacttatcctttagggaaataaaactaggattaacacacttcttactggacacagtaacgacaccagtttaaggcttgacagactcgaaaatagacactaaacttggttggttggaaaaaccttcttaatgatttgtgagttggtataagccatccttaagagtcccttgaagcagcaccctctttgactccaga

SEQ ID NO: 27658 - DNA, 1148 bp, Cannabis sativa
tcttagggaagaaagaattgtactggagacaacgtagtagggcagtttggatgaagtgtatggatcataatactaagtactttcaccataaggctttacagagaaaaaagaaaaatcatattgagtaccttattgatgagcagggaagagaacatcgtggcgaggaggggattctaaggttgttcagaggtattatagttctcatttcactactatacaaccaactttggaaaagattgaggaggtggtccaggttctccgttcgcgggtctcagatgttatgaatgtgatgttgttagagcctttttaaggaggaggatgtggttcgggcagtgaaaagtatgaatccaattaaagctctgtggaagaatgggttgtctgctttgttttaccaaaaatactgggagatcactcctggagatatgtttgtagagtttgtcttaaggtgcttaataatgatgttctgctgcaacatcttaatgaaactttgattgctcttattccaaagagtccaataagtttgtgtaatgttgtttataaaattgtttccaagtgtttggcggagagattaaagttaagctttcacgatactatctcggggacttaaagtgcttttgtgagtgggaggttaattcatgacaatgctatcattgggtttcaaggaatgcattgtatgcataaggatggatttggaaatgggaagaaggtggctctaaagtgggatatgtcaaaggcgtctgatcgggtggagtggaaattcgttgaagtgatgatgaaaaggttgggatatgatgaacgatgggtggctaagataataaatttttttacttctgtatccttttgcttccttatcaatggggaagttaagggtaatgttattccgagtcggggtctacgttaaggagatcctttatccccttttctttttctattttgtggagaggccttatcttgtttaattcaacctgcggaggttcatggtgatctcaatgggcttcaatttggtagaaacggagtccaggtgtcacacttattttttgcggatgatagtcttatgttttaaaggctaatagtgaagagtgtcattgtctaaaacgaatgctccatgattattccaaagaaaatggccagatagtgaatttcttaaa

SEQ ID NO: 27659 - DNA, 7391 bp, Cannabis sativa
acaatctcaatagttcagggggaatttttaacggccaaaaaagttcaggtggcatgatttggtacacgtcaaagttcgggaggcggggggaattactaattagcgtaaagttatatgttagagtgctgatgtggaattctatagtattcataatctatttttttaattttgagagtgtttcatctttataaaaaaaatatatatattacgtacttcacttattttttttcacatgtaatggaaaacaaaagtccacattgtttaaaatttattttatagtgcttaacgtagtatataaataaagtttatattttttttaaacattagtatgtaattttatttatatattatatgtataaatttgaaaagttattttaaaattttaattttttattaattatttagtcgtaatttttgtaataattacttctaaattgaatttttatataaattaatttaagttgataggttattttcataattttttatttttagttaataattttgcaataattatttggaataacaatttttatattatatttagttataaattaccttttatattttaatttttaatcgcttatatcaaatgctaactaggattgtacacctgtgtacatgtgacagtaaaacttcaaagtggataaaaatatgtcacgtatacacatgtgtacacaatgataatccagttaatatttaacggtgatatttcacttgcgactcaaatttgtaaaaaaaaaaaaaaaagtgaagttaagagagtttttccacccacaaaagatcaggggttaagcgtataaaattaaaacataagggaattttaacaccaattctcaaagaataccaagtaaacccgacaaccatactcttgccatatccaaagacaatgtaagtttaaaaagattgttagctaaagagttcgtagaacgattacaaaagagaaacttagaaacattaacacagttacaaataacatcaatatctttaaaaattaggccaaactcaaccaagaacaaatttctcttctgtgggatatggataacatgttgacaatcttattcaatctccacattgttgaagcctagatgcgaacatagaagtaaattatatgttaatttaattatatttagtatttgtcacaaataatatcactatctttctatatatttttaaaaaagaaaattacatttctaattttaatactattactttgtttataatacacatacatcaaaaaattatattttaaattatatataactcaataagtacaaaaagaaaatataaggatattacaaaagttgagcaacaccgcgcgaagcgcggctttgttccctagttattatatattatagtgttctatattatatacaaactgtttatcttgggttttttattttttctaacacatacagctaaaactaaacacaattctcaatcattaatttgtgcagagtagcttcagccttcttgaaagactttagaatattttcttgtacactttcaatgtatgcaactcacttcattctaccaaaagaataaaaattaacaataagcttattctgatcaactttgaagtttattatcactagaaatgaagtttttgtattcaactacagtagcaaaataaaaacataaaaaatgaaagtatttactaaattaacatgtaaacaactaataaacaaagctatatcaacataatcattaaaaaattatagatcaattgactaattcataaaatcaaaataaacaaaaaataatactagaacaacaatacgaagctccatttaaagaagaagaaaaattacaattgaatatgtcttctttctttaggctagtgaaaactcaattcttttggacattgcatcaaatacatagcatgtgtgtctttatatatatgcacatatatatacacatacaaaaaagtatctactcccattataatatatttacaaaataaagtttgcaactaaagtcacatccaaatcaataatctattttcgaaaaaaaaaaaagtgtaacttacaaatggaatagaaatggacaacaagcttagtgtgatcaactttgacattcaaaataattaaaaattaaactttttgcattcaacttcaatagcaaccacaaaataacttataaagaacaataaatctacatatttattttagatttgaagataaaataataattcataaaactcagaccaacaaaataaagacaataacaatatcttcaaatagcttaacttaaagataaaaaaagtacaattaaagatgccacctttctttttgggcattatatcaaacacatggcatgtatttctttatatacatatacaagaaaattaacttaaaaaataagaaaaacgaacacaataattacaaaaaaaaaatattcagatccaagcttatactaatgtattataaactaaagaagaacaaaaggagtagaatagtttagaatgttaactcatttaaacaaaaatgatagtaaaaaaaaacttgaaaagagaaaaagatggttaaacaagaggggaaataacttttagggacttagattggaagtgtgcaatggcaagggctagagtcgatcatctttgttcgacggtggggtgttggcgacaacgaggaagcttcaaaaaaagatgggatggagtttttgtttttgttttgttttttggataatgaaggaggggctggagttgaaagctcaaaagaaaaaaaaaaaagtgtatattattatttttgtaatttttaagactttaaaaggtagaaaagaaaaaaaatgagaaatgataaatgtaaaaatttctgtgtggtaatataattttaaaatttgactaaatttcagtgtgtggtggaaaaatctcaacaatttattgttatatcttaaaacaaattaaaataaaagttggcatcctctacaagttgaactaatgggactcaaagatgctttatgttagattaagaataaaggttgacctcaagcggtggtgaagtcggattgccttactcttattaatgatttgaataatgataaaaaaaaaagtagcttttcttatggctatattttacatgattgtaaggttttgattgaatcttaaaattatatttccttttcttttgtaaaacggactgctaataacttttcacatgctttagggtgggcttctcttgttgagggtgactgtgttctttgtggggattctttatccactttattctcttccatagttatggatgagttggttgaatgaagcttattttcttttttaaaaaaattgtggtataaacttcataaaataataataataaaatttgtgtttttgacaccttattttttttttagattttccctcgtgttttgctctcgcagctccaagctggtggccatggctaaaacgaggtccaagattcaagggaaggctagatctatggcaagaaatcgaagaagaaacaatctgaattgactcgggaagcaattttgattatggatcgatgtgaggaaaccagagttgaactgcttgaggtctcggaggaggaggagacaacggaagacgatcctactcttgtggatttattccagaaacctctgtctccaagatcatccctaaagcttatacagaggtaggaagacgttcagaaggactttcttcagtttctgcaggccagcaaccaatgtaatagtgatgtgaaacaaggtaaatcgccaattcctcctctattttgcgagatctggtattgtgcgaaatttggaaccttcttttaaacagtctgtgagtacaaacaaagtaaaaatcactcttgatgatattgaggaagaaatttatttttggcaagcttccataggtatgttacgtgcttggtgcgaaccctccattacatgttactggaagggatttgtaaacagggcatggaaggataagatagatagggtgaagatgttgtcatatggaattttcattatcagattcaattctttgaaagatagggatcagattctggagggtggctacatattcttcaaccgaagacctgtcatcatgaaggcatgggatccaaatgtgaattttaagaaggaagatgtaaaaaaggttccaatattggttcaacttgaagacttggtctaaaatattgggaacaaagatctttgttcaaaatagtcggtcaagtaggggagccgattatggtggataatgttacaaaagagagggaaaggttaaactatcctagagtttcttattgtagttaggatagatcaacaatttctcgatatgttagaatttgagaatgaacaaggaaacaacacacatgtgggaatcaagtatgaatggaaaccgattgtttgtaataattgctacgggctggggcatttggctgatgattgtaagaagaatgccaaagtggagaagaaatgggtagtgaaggaagatcataggccaaaacaggtggtggatgaggatggctttgttaaagttacaagaggaactaaggggaaagagcagactagcataacagaggttataagggtggaaaacactttccaagccttagacactgaactggaacatcaagtaatggcagaaaaggaagatgcagggaatgagggcaatattgggggggagatccctctctcaccaatggataagctcctatgttggaatgtccggggagccaacaatcaacaaaaacagagactaattaagcaatttattagtcaccaaaaggtttattttattgggcttctcgagacaagagtgaaggctcctaaactaggtaccttgtacgctaatgtatttgagggtggtgtttctcatccaatattgcgtggcatactggagggaagattgtaatagcatggaatcctttaagattgattgtggatattattaggtgcacaagccaatttctgcatctaaaaatatcaacaatggatggtatgtttgacagccttgttactctgatatatgcctcaaataagaggttagaaaggaaaaggctttggagggatatttatgaactgaatacaagtcaaagatggtgtcttatgggagatttcaacgagattttagccgaggaagaaagaatagggcttcgggtttctagctggcctgatggggatttcttgcaatgtgttaattgctgtaacttggaagacataaagagcaatggaaactttttcacatggacaaacaaacaacatggagaagatcggattttctccaagattgatagagtgttatctaatcaaggttggttgaataagtataagaatgctgaagttgtctttcttaattaggggttgttagatcactcatcggctgtaatctccttatatccgactgttgctagtggtcttaagcctttcaaatactttcgaatgtggaagtcccattctaagtttgaaagtattttgttagacatctagtcaaggcaagtaaatggatcaaaaatgtttttggtggtgatgaaattgaaaagcttgaaaactgttctgaaagacatcaatagggacgatttttctgatctacagggggttgtccatgaggccaaagtcagattggaagagatcaaactaagttgcaaggttttccttccaatgaagatatacagaggcaagaaaaggaggctagggagacatatgttaaggtgcacaaagactacaattcttttttacaacaaaaggcaaaggtggcgtgggtccgagatggagatagtaatacatcattgtttcatgcaagtataaggcaaagactaaggcagaatagaactttatccattgaacaacaagatagggagagagttcataacccccagttggtgcaagatgctttcattgactattataagcagctacttggcactgaaatggagaataggagaggtgtgatattagggatattgagaagatgaggtgaagaaggctgtgtttgacatatccggattgaaagcaccaggtcctgatggttattctagtttcttttatcaagataacgaggataccattggtgagctagtgtcccaagttgtgatctcctttcttgaatccggcaagatcctaaaggagataaactcaactgtgatcacccttgtccccaaggtaaaatgtcctaacactgtaaaagacttttgaccaatagcctgttgtaatgttatctataagattgcaactaagatgttatgcttcaggctaaaagctatccttccctctcttattttttcttcgcaaggaggattttttaaaggaaggttcattggccacaccattatgatttgtcaagacttggttcgacactatgggaggaaggcaaacaaaccaagctgcttgattaaactagaccttcagaaggcatatgatataattgaatgggagtttatcgaagaaatgctagaaggattgcaattccctccaaagtttgtgaagctaatcatgcaatgcatatcaactcctagatgttcgttgatgtttaatggtacacttcatggattctttgaaactatgaggggtctaaggcaaggggatccgatatcgcctctactctttgtaatgggcatggaatacttatctaggctcatggggaagataggagaaaaagaggatttctcttttcatgacaggtgtggagaattgaagcttaatcatctggcttttgcagatgatgtgttactattttgcaaaggaaagacaaagagtgtgatgtacatgctacaagccttgaaacttttctccacaacatctggcctatacccgaatgctaataaaactgctctttattgtagtaatatggagggtgaagacattgatcagattcttagagcctcaggtttcacaagaggggtgttgccctttacctacttgggaatcccaatcaatgcaaagaaaatttctggggctgattgtgagatccttgctgagcaaatgacagcaacaattcgtagctggagtaccagaaatttgtcatttgcagctagaacagtgttgacaaattctatcttgatagccatccaagcttattggagccaaatctgcatattaccaaagaaattatacaggaggattgaagcaatatgcagatctttttgtggaaaggcttagcaaactatgaaggaggtggctgaatcgaatggagcaaggtttggactcccaaatcagtagggggtttagggataaaaaagattgaggaatggaataaagctgccaagtccaagtatgtttgggcaattgcaaatagacaagaaagtctatggatgaaatgggtgcatagtgtgtaccttaggaaagttgaatggttgagccacactacttcaattcatgcaagttggcattggaaaaagcttgtggctttgaaaaaccagcccaaagacctcactaacatccaacaattcacc

SEQ ID NO: 27660 - DNA, 2993 bp, Cannabis sativa
  modified_base (2243)..(2246): a, c, t, g, unknown or other
taatattaaacgacaacctgtttgcagaaacgacaacgcaaacaactttacattttacatttcaaagttttatttgcacccataattttaataaataaaatacatatttttaattatatatattattttttataattttttcattcatttcatattcttaaaaaaaatatatctattaaacaaaaataaattatattttaaacattataacaaaaaaattatgttaaattttattagaaaaaaaaaaataaacaaaaattatacaaataaatattaaaattaactcaaaataatataagaagaattttttttaaaaaaaaatactaaaattatttaagcttaattctttctaaatattatattgtactaaaatttcagtttaatttttcccatccataactgccttatttacacccaaagcattctcacaaagccaccgaaacacttcgttcttcccactcaactcacactcatgtccagcaagtgcagcatcacatgattttgagtttgtgatcgcagcattgagcccagcattgacgtccgtatgagctttggacttagccgaggccacggaatcattgatcttatcggcggtttcgaggtacaattggaggcatttggcggcgccttccttgagattgggatcatttgataatgtcttagcgtactcggcgatatcagaggcgttcgacgcggcttgcttgagagctataagccctaagccgggtaagtcggcgttgttggagttgggatcggattcaagcattgcattgcagaaaccttttttctctacattctggcacgccgtcgggataaggctctcgccggctgctctggtgggttgtggcggatttgagattagaattgtgaccaagaagaccataaagaatgtgttcacgtagttctccatttttatttatttattttttgtggggagggggttgttagtttttctttcttgtgttgttttgatattgatgaaaagtttgttgttgatttattttttcaatataaagggttaatatgggagtgtggggttttatttgaatggattggcacataatttggaagtttttgaggagatggtactatttttatacatacttataatagctttcattagtggccatattgttagtgtcaattataatgatttaacaagtgactaagagcatcgatctacgattaatggaatcaacatatctcttgttaaaaaaaaagtaatgtcttatagtgtgttaaattaatttaaatttagcatgtgaactaatttaatttatattattaaatataataactacttaattaattatatatatattgttaaattataactactcactttatgcctaacatatcacttcgctttataataaaaaaattaaaaaaaaattgctgcaataaaccaaaagagtgttaaaaatatttggtacatgctaaaaattacttgaattgtattaaaaatataagcaatacatggattgatgaattttcatgaattagcattttaaatgatgtgacaatatatttattataaaaaataatccgaaaaagtaaacataagtatatataataaaaatttatagcatgccatgtcatttatgatgaattgttatgataaattttcatgatatataacattttcttaaaaatatttggtacataattttatcataaatattgcaacttttaaagtttctttatacattgttattattttttttatttatatcttcagctattaagtgatgtttgattggaataaatgaaaaacataagaatgagaatatgaatataaatggaataaaaaaattattaaattttttatcatcatgtaatgaaatagactttctttccatttcaaaataaagtagtcattttactaaaatagtggaaaggtcattccaccaaaatagtgaaaaggtcattccattaaaatgatattctaatactttaatatgaaatgagtattgcggcaaaatccctcaaactatcaattttttagtgacctgtcattgccacgtgggcaaaattaggacttaacgaggctggacagacgacaccttaaaaatgtaaacggaagagtacttttggaagggttttcccaccaaaatatgagattagatggttttttgcaagtaaattaagagttggggggttttgccgcaaattactcatatgaaatcaaacaaaagaatagaatgaaaaatctttcctaatttccattccattctatttcattnnnnccaaccaaacgccacctaaatgctaaagttttcactttattatttttaaagcttttttttttcttttttttttttttctattttggctaatactattcaaaataaatatttatacaatcataatgagaaataaacatgtatagtatttgctaatttcaaaaatagaatttataaagtttttatttataagagtacagttggagacaaaacctactcgcaaaaggaaaaagtgaaatacacaagtggactatgcaggcgagtgagaacacggaagtaggagataaaaccatcaaagttgactgatgcgcacaggattacagcgtcagaccgcaacaatggctgccatgtattttttttttattatttttcatgagttattgccccttatttttggtccaacataaatatctcttatataatcatactttcaaatagaattgttgtatgccaagtctttttgttatgtttaaggcttaaataaccttacaagaatactcatatattttaaatagagaatcttcaaaatatttaaagaattaaattaaaaatacactatatcagaaactctaaactctttttctattttaaggcttatttaaaatttattatatatgttctacatttataactaaacatattttattaattggttaagattttaattttactttttatatagaaatatgtgtaaatattaatgttatgtttgaaatgaataaatcactacaaaaaatgtcacttttacca

SEQ ID NO: 27661 - DNA, 2161 bp, Cannabis sativa
gttccgggtttcgggcttactccattactatgtagacattatcatgatcttcatgtgcatcataaaattgtacaagatttctgtgtccatttagagcttttaatatcttgacttcccttctcacgtcctcaatggcaatggcagtagtcatctggcaacaaaaatacataagaagaaaataaagcttaattgacaccatgcgagtccaacgcaaaataaaattccttttttaccctattgacttcttgaatctctccaaccgcaattgcttactatataaaacttcatacaaatgaactttctatttttatggaagagaagggagtaacgcgagaaatgcccaaattagaaattcaaattgataccaataagatatgcccaaactactcaatacagattcactaaggcttcaattgcgtaatggatcacataaattgctgattgacgaagacccattctcaagtttcaaatatatcatacaaaaataaatccttcttgagatgcaaaaataatattgcctggtatcggatctacttcaaaaatgggaacttttaacaagcagttttaatcaagaaattcaaatactctcaattacacataaactcatacatgtatatatatagcaagctaaatttcgaacctttgatttcggaatcacttttacagcaacctgttggcctttgagttcacctttcttaaacttagcagcacaagtatacccaaaatgccctcttccgacctcttcacccatctcatacttactcccaaaatgcttagagaaaccaaagctcttatcaagtccagtaactccttcagcctcgctcccttcgggtattgcagcttcgttgggcttcacagacccatgccttctcctcaacacagccttaatatgtttcgccggtgaaggtggcgggaaaggtctcttgaagaaccgcttaggcgtggaagagatcgaacccgcattcgccggagatctagctggagacttcttagagaacaagtaatgagccggactaggactgtaaaacgaaaagaacggagatttcttcccgttctgaacatctttcgcctgctcagtactaacaacctcgtcgtcgccagtaacggagctcactccatctttgggcggcggaacagagttaccatgagtaggaatggggctattcccggtgaggttaggatcagatttaggagaaggaaatccactgtttggggaaggctttgaagtacagagacccatttgaattggaaaaatttccccaaacggaaaactgagtttggggatttaaatgcctgaaaaacttggtggtcagagcattttttttttttttggataatggaattgggattttgaaaattcttattactttttccttttttcttcggttttgggatttaaatttaaggattgaggtttttgttgaagagaaaaaacgtttgagaagaagaagaagattttggttaggggatccaaacacaaaatgataaaaagaaacgacgacgcgtttgtcttttcattttttttttttaaaaaaaaaattaaatttattatttgtttatttatcttgtcttaaaatattattttttattattttaatatgtattttcttacggattacgtaagattaaaaaatattgtaagtagctttcaaaaaaaaaaaatatattgtaagtaagtaaaaatgaaaagataggagagcgatcgtacaagtattaggtggggcccacttagacatgtggcgtttgacacgtggcagtgatgtagatgagttggtgttattaattaattgggctggagttccgtgccttaataaacgcgaattggccggtacggactacagagtaataaaactgaattttgtatttatataatccattattattaattaattatttttattagtattaaattagggttgttgttgaaaattgaaatatttgacaattaaagttgtgttttctgttttaaatcaaaaagttgtgttttctggaagaaaaaaaatgaccaccactaattagcttgaatagtattatttgtggggttgtgtttgtattagtatttataaatagagtattattattttacattagtagtttttagtattttttaaagaaatttttacaccaaaaatctgttttgcacattttattactgttttac

SEQ ID NO: 27662 - DNA, 1922 bp, Cannabis sativa
gacactctaaaagttatttttcctacactcttcaagtcaataaataattatcatcattacaatcgactctttaaactgaacccaacaatatataacacgatgccatttaaagaaagtcaaaatttcatcttagctgcacgtgatggcagtttacgtcagtcgatatcagtgctctaggaacggtgctggattttaacaatgtatatatcaaagcaatcctcttgacgagtagatcacagttgtacaaatcgttagcccaaacaataactggtctcaccaaaaaagctcccaaaaggacaaagatacaaaaatctcataaaaaactagtgtgttgacaaaaatgacttagtgggcgatgttcttctcgcggtgttgattctaaaggtaccaactattcttttaatggtgcccggagttggccgaaatgtcacttcaatgttttgacggcaaaacttcagagctttcatatggtagcgtccttattccgatttcaaccaaacttggggtgtgggatccttatcaaatggtcatagagcaatatcagcacgtgtggtcgaagggtgactagagggtggcggtcggagcttggttagtggtggtgatgataggtttaagtgagtgtgaaagaaggaaagaaagaaggagagagatgttgcgtgttgcacagagtgagaaggagaagaattttttttttttgttgaaaaaagatattgacctaagtgggatctcacaaagtaaatataatatatagtttttttatcagttattacaaacataccctaagagcaatgctcaaccaattaaagtacatacaatttttacacaatgtctagttaatctcaattgcacaattaaaagggagatacaatcccacttaaatttataaattactgtgtcatgctagaaaaaaaatagctgtctatgtctaataaatgtgtgtattgaatgtgtatttagaggtgtgaataaatcgatctaatccaatgacaaccgactatcaaatattggatattcaattgtgatcagatcagattatattttatttttgaatatctaattagatcggattggatgttggatggggtgtccaaaaatctaatacatacaacagtaaatcgaactaattagtattttcatttagtttagaagagtaattagattttatgttgttatacataaagtatatatgtatatattaaaattaacattaaaattttacttttttttattcaatgggtccaatccaatccaatacatacttgatctaatatattgaatggatccaatctgatccaaaaaagtattaggtttaaaaaattagataaattcaaattaaaccaatagatatacatgaaatacattcaatggataaaactgctctaatccaacatctaatattgaacttaattatattacatcgataataaaatttaacatccaatatatttaaatcagatctgaataaacttaaaaatattagatatagtccaataaacatctctgcgtgtgtctacttatatatatatatatatactattttgtttttatagttgattttttatcaggctccttatttttctccaaccaattagtaaacaagggtatctgagttaatttttatgatgtatatgtataaatacaaattgacttgtgatatatgatgtatatttatttaatgtttctaaataaactatataaatgtgtgttaacatttgatgacatgtaggcaaactctatgtggttgtacatagtacctgaaggcatgaaaaaattaatgaattatattaaacaaaagtatggaaatcctccggtcattattactgaaaatggtaataattttctcaacgatacttttctattattctttagctcttagctaagaaacactttaaacttacattgtttttgtttttttttttttt

SEQ ID NO: 27663 - DNA, 2758 bp, Cannabis sativa
  modified_base (2384)..(2384): a, c, t, g, unknown or other
ttccatgagaaattttagaatctgaaataaaagatgaaacaaaaatagaatgaacattgtttaatagattacaattcatgtaatagagatcaccattctttctacccatcccaatcaccttgttcttcataatgttttaaatcacacaatttccatgagaaaataaaaatgtgcaatcagttgttgttgtcaaacagttaactgataacagattgcatttaaaagtaggaacatacagtacattttcaagaatcaagtcaggggtcaatttaattgtccctatgtaatcaattttagtgtggatacctgtaggtaaaagaactgttttaagactaggatcattatgagtcttttgaaataaagaaagattaggacacacataatgtgtggctcctgtatcgatgatcaattagaattatgaacaaaagagttcttaccagaaaaatatgacactataagttgatcatccgaggaatctggtgaagagttatcttacataagaatctgagatctgaccatgttatacgaatcattcaatccaacaaggaattcaagtaatcgatcttcatcttgatattcctaaatagttttcatagcaccacaactacaaacaggttgtggtctatactccctgatctgatcccatagagatttgagtcgagtgaagtatgtagtaacagaattcgatccctgtgtaagactttgaatggttttcttagcctcaaagatccttggagcattattttcattgaacctttcatgcaattctttccagatctcagctgcattatcgtgataccttatgctacctgcgatttcaccagaaatagcatgaagtatctaagaaatcacagtgttgttgcatctgcaccagctatcataattctcagtatcttcatcaggttgtggaagtttaccattgacaaatttaactttgtttcgagcaacaagggcaatcatcatcgatcttctccaggtgctatagttcttacttcctgtgagaatttttggaaccaaaacaacacctggattgtcacaattagaaagaaaataaggattagaaagatcatttgcattcgtagatcttgaattctcacccagaatagaaagataattcgagtcatttgagttgttttcaagatctcgattgcttcgtgtttgaacaccttctcctctcgccatgaacacaaagtagaagcgaaagaaatggagagaaaaaaggaggaagaagagagctcacgagtaaagtagctctgataccatattagcagtgaaacgagatcaaaagaaacaaagaaaacaaagaaatgaagaagaaactaagctacattcattgaattgttatgacagtttacaagagatgagctaactacttatagtagctgaaaacagttacaaaaataacaaacttcatcaaccataactaagtaactctaacaatgcagctcactcaactaaactaattaacacaactaaccaatctctaatattaaaataacttgataaaaaagataaaagagacgaatcactcattatctatatccaaaagatagaaaaattctcagatacccaaatggaaaaaaattctaatatgttcttcatcgcctatgtatgaatgaaaagtctcttgaatacctgctaaaaaatactcttttttactttactagtttaatttatcattttaatattatatggtacaatgaaaatataaaattcagttagtagttttaatcaaatatatcactcttacatatatctacgataggataaaaatacatttttgccataaattcaatggctcaaatatatttaaggttttgaattcctcaatataaggatgcagttttacataatttgtcctaaattgcatatggcacctacattcagttcttagtcttttctttttcatgtagctttctgtacggctcgtggatcttcaaaatcatattcatttgatgctaattccaagataatctcttcacatgctgacttactctcctttgatagctcttgagttttcaatgatgttctcaatttatctatgacttcttttccttctagagctaagattctgcaagtaaaatataaatatatatgagtgcacttttaatgggtattatccataaataggtaatattaaaaaaaattgagttattatgattaacttttatatgattagaaaaatttctcatttttacattatatgggatgaaattgtttcatcagctgaaaaaaaaaatcataaaaaaaaaaatcggtaaaaaagtaataaaaaacttgagtttgagttaaaatatttttttatataaaatattgtgtaaaaaaaaggtattttttaatattttctttaattaagtagctaaattaagcataaaaatttaaanttctcttttattatttgctatcggaccaaaatctaatagtttaatatttatagttaaatttgtttagtactcatcaatgagtaatactccttaagaggtgttccatatattagcaaaattaataagaaatggccatgccatcaccaaatgctacaatatattattttaaattgaatccaaccatataaaaatattttattatttttataatggtagaaataattaaatatgagtagtgttatcctaacaccacatctatgtgttactttataattggttagcaaatatttatatcgaaaatacattaataatattagtagtatgttacgtcttgtgatacttgataccttaataatgacaggacatgtgtcttc

SEQ ID NO: 27664 - DNA, 2029 bp, Cannabis sativa
  modified_base (1968)..(1981): a, c, t, g, unknown or other
atatgaattttaaaatatatacaaatgttcatgccaataatatatgtatatatatagctatagattttagcatgatcaacacatctagatggtctttattatcaaatgagtgatggtatttattacattaattaatttctcacttggattaaaaaaaaaaattatgtactcaggtaacttgtttcatatctcatctaatctaaaaaaaattacatatattattagcaatgatataaatttattttattttttcgcaacaagcaaagacatatattagatcaacataattatacattaataacgttaactaacttttttcaacacttttaagcacatctcatcatttcgatatataattttcacattaatttattatgtgaaactgggtaaaattaggtgaaataatagcaatttatttccaattatcatgaaactgggtaaataaattaataatttaactcgaaaactgttattataatcaagtctacagtatcaaaaagccaaaacaaaactctataatatatgttaaaatataaaatgaattttgcataataaagttgactatatacagtttatgcgtaaacttttttttttaatctcaaaatattttagtgacgccatgtgttaggatcatatgtaataattatacaaaaaaaattaattaagagtcatgtgagggcataatgaccaaatctatacgtggctacaatttactgttattgtgtattattataatgttggtttggtcggtccatgttattttcataccagaatatttatattcactagtactacatattacttattgttttcaaaaatatatattataaaaaacatttctgagtaatattcataaaatattttgtctttactacagtataacattatatttgtcatgtatatatacagactatatattagttttgtgcccatgtaaattattgatggactctttttttaaatcgacaaaacaaataaaaaactttggaaataattattactttaaaataataccaagtatctaaactgaattctgttatctaaatttgaaatacctaaatgcaccggcacaaacaagaatgaaaattatatagttagttactttaataaatatatatctatatggttcattaattcaaactaaatcttaaccacttgaactaaccaaatgatatttccatctatcaagatttttttttatatctatttttttatataaaatgtggtggtgtttttaaattttttacattaattttcacaaatatctcaattacttaatagaatattttttattaattttataatattattatatatatttaaagataaaaattatgtaaatattttatataaaaaaattaattttattatatatatgcaatcataaaaattacatcgtataatcacatctatatataaaatatacatatttaaatcttaatttcactacaaatcttttattttaaaaatgattaatgatattgttcaaaaaaaaaattaattaatgatatatatataaccacactcctaattacaaattattagaatgtatctataaaatatatatatattactatcattatttttaaaaaatatatgtttggacataatatataaaatatattttgaaagtaattaattctctaatcaaacttaaattttatcaaaatattttctaatataatacgtaataatgaaattcattattttattgtacatataaaatacgtatatatatatataatcacatctaaatagcaccaatgtagttgcaatagctaaaaaaattctcaaagatcaaaatttcaaaccctattttaaaaattaaaagataaaatatattacctaattaaaaaaaaaattgaatatatatgtattgcacttaacaccacttaattaaacctaattaaaaagaaaaactaatttattatacgtgaaggtaacatcaacctagtatatatatatatnnnnnnnnnnnnnnatctttatatattaaaagtacctatctaacggcatttcttggtttaac

SEQ ID NO: 27665 - DNA, 1359 bp, Cannabis sativa
agtatctttcatatacacttcatgtacttatttgacacaaagattatccttttttgagtcaaagaccaaacatgtttaccatcaacactaacattccattcctcaatacacatgaaacctaaatcttcttgatcttttggcttacaagcatctttccaagccacaagacccgactatttgtaatcagcagtaccattccacaggaaatcatgatagattttattaatggatttcaagatttgtttggggagaatgagtaccttagcctaataggtatgaataacaattaggaccgagttaattagagttgctctcccagcataagataggtaccgagaactccaaactcaaatctaagccaccatcttttttatgaggatttcacattcagctgaagagatttatttgagcaaattggcacacccaggaacttaaatggcagcatactttgagtaaaaccagaagcattcaaaacctgttgaacttcactcgaattcatcccggtacaaaacatggtagttttacttaggttggccattatgtttgaagcatttgagatctgcttaaagcttcgtaacaaaagcattgtggattgaatatcaccgtgacaaaagagtagtaaatcatctacaaaacattaatgcgtatgcttatcccatcacctggtggaaacaaaaatcctcacactcagaggtttttataaggatgcgagatatgtactccattcccaggacaaataaaaaggaggacatggggtcaacttgtcttaaatcccttttcaactcaaaatagccatgtaccattgaagaatatggaaaattttagagtatgaatacataccattatggtcttaatgaaaggctctgggaaattcaaagcatgtagcatctcttcaagaaagtctcattccaccgtattgtaggctttcctcaaatctatttttattaggcaagtcgacattcctcccataatgtcttaccaaattttgacacaccattatattgtgagcaatgaatctcccatgtacaaaaccaccttaattttgggagattagattagggaaaattattcaaattctcaaacatatcatctttgtagccattttgcagagcaattacagcacacaataggtctaaaatctacaactggacaatttactttcaaaaccaatgtcaatgtggtgaagttaatttctttcaaaatttccccataatggaggaaggacaaaacagacaaagtaacctctttcctgaaaatttcccaagattgtttgaagaaatcactattgaacccatttggtctcgaagctttcaaatcagaaatagagaacaaatcctatttcacctcatcttcactata

SEQ ID NO: 27666 - DNA, 3215 bp, Cannabis sativa
  modified_base (2459)..(2465): a, c, t, g, unknown or other
tctagttacacttttagtgaaaatatctgaaaagttatcatgtttgcttatctttttcacttgcacctgcttggatggtacaatatcccttatgaaatgtaacttgatatcaatgtgatttgacctctcatgaaacattggatttttcatgagatgcaaagccctttgattgtcacagtaaactgtgatctcctcatatttgaaacctaactcatctgtcaatcccttaagccatatagcctctttgatggcttctgtagcagccatgtactcggcttttgttgatgacaaggctactactttctgtaggttagatttctaactgatgcaacccccaagagtagtgaacacaaacactggtaggctccttctagtgtctacgttagctgcaaaatctgagtccacataaccagtggttctctttactgaacacaatactagtgtccagagtacctttcaggtacctcattgttcatttcagtgcttcccaatgttcaaggacggcatcgaaaatgtacctgctgaccaccctcatagcatgagctaagtcatgtctagaacacacaatagagtacatgagactcccaacacaacttgcatggggaaccttactcgtcttggctctttctccatctatttttggtgacatagatgcagaaaacttgaagtgttgaggaagtggtgttgcaactggtttgcacttgaccatgccaaacttgttcaatactttatataggtaggtagcttgagaaagtattatcatgccaggcttaggtctttttatgtctatcccaagaattctttttgctttgcccatatctttcatctcaaactcatcactgagtttcctgttcagcttgtcaatctttgactttgctttgctatagatcaatatatcattaacatagagtagcaagtaggtttgattgttgaaatacacacatgagtgatactttcttttagtgtatccaatattctgtatataggtgtcaaacctcaagttccattgcttaggtgcctgcttgaagccatgaagagacttcttgagcaggcatacctcatctgggttcccattgtcaaagccccaggttgttgcatatagatttcctcttttgattctgcatgtaagaaagttaatctgttcaatctttagatccatgattgttgcctttgccatcatgtctctgattgaagcttgcatgaccgctaaagaggaaatctcattgtaatcgatttccttcgaagtgaaccccttggcaactaaccttgccttgaatctggtaagctcattccatgaaccttctttatgcttgaaaagctatttacatcctaccagcttgtataactatagtttcttcataataatctaggttatattcttcctaagagactgcatctcttcttgaatggcctacaaccatgttgcatcatctttacttctcatagcttcttgaaagctagtgggttcttaactgtcaacctcttatgcaattataagtgcatatgcaatgaattcatcataactaaaacaatcaaggcctttgtctgtcttctctctctatctcttgctaactgatagctgctaagttcttattgatcttcatttttttctccttctgttacctcagttccatttggaacaacattagttggtgctgtaggagcaacctgctcacattcttatataaaatagcttcactgtgtttagaagtggtcttggttttcatgaccattttatcttccttgaaaataacatctctactaattaagcacttcttgaatccagattttaagcaccatgctctatatcccttagcccttcagggtagccaagaaacatgcatctctatatcttgtctaacatgcataaatggagtacatccaaacactttcaagtgatctaagtttgggggtttacatgtccataactcttgtggggtcttgaagttatttggcacatatggtgatctgttgattaggtagtaggttattttaagagcttctccccaaaaggttttgtctacactagctcctagtaacatgcacctaaccatctcaatcagtggtctattcatcctctcagcaacaccattttgttgagagattttgatcacagtgttatgtctttggattcccattttgtcacacactcccttgaactcatttaagtagtactcaaagccattgtcagtttttaggaccttgagtttgtttccagtatggttttctagaaacctcttccatgtatcaaaggttactagagtctcatctttgcttttcaacaaataaacccaaactttcttgttgtaatcatcaattatactcataaaataatgtgctccacctttggttggaatcctagatggcccccaaagatcaaaatggacataagctaacctctctgtggtggtgtgttctgccttgttgaacttcaatctacaagccttccccaaaacacnnnnnnnacagaattcaagtctttctattagcttctctttgaatagtccttgcattttcatttcctcaagtaccctttgacttacatgccccaatttgaggtgtcatagtcttgcttaactatgtttagttgagttaataacaggtactgcactatttgttattgtctttccatccaggaaatacaatccattactcaaccttcctctcaacacaattccagtgccttgtgcaattttcactacactttcctcaactttgacaacatactccagtttatcaaacataccaatagagataatatttcttttgaaatctggaataaacctaacctgttgcaaggtcttcgtgattctttaacaagattgttcccacacctttgatctcacaagctttgttgttcccaagaagaactgtgcccccatgactttttgtaagagtcctaaacaattatttgtttagtgttatatgaaatgaacaccctggatttataatccaatctccacctaaatctaatatagacatcataggtgcatcagatgactcatagccatcaacaacattaactactccatggcttttggtcttgtgatgattctctctcttcagcttagcctttaaagccaaacaatcatctctaaagtggtcctccttctaatttcccttatattccctcttggagaattttcccttaacaatgagtaatccttccccatgttggatatattttaccaggctctagatttactaacaagtat

SEQ ID NO: 27667 - DNA, 7540 bp, Cannabis sativa
  modified_base (5206)..(5211): a, c, t, g, unknown or other
  modified_base (5298)..(5302): a, c, t, g, unknown or other
  modified_base (5566)..(5593): a, c, t, g, unknown or other
atctcaatagttcatggacatttttaacgaccttaaaagttcaaggacatgatttggtacatgtcaaagttcaatgaaaaaaatcttaattaacctaataataactaataatatgtaggtaattggtaccatcttagaagaattttcggtatttgtgaagaattatttttaagtatatatatattgtaattatttagatttcttttaaaatttttaaataattcatagtgcttaatatttaaatatttcattatacgcatgatattttttatacatataatcagcaacgaatctacatagaagtaaggtgggacagtcatttcttaaaatataaaaaaaaaatgtatatacattttagttagttacaatatatatttataatacaaaattatatattgtaatggttaagttaaattgtatattagatagaggttatgagtttaaatcccactaaaaacatttttttaaaatttgtttttgccccctgatttataaaagaataaaagattatgccccctcactttaaagtttcgattcatcactactcgtaataagtaactattcgaattttattttttacacgataaattatttaaattttttaaaaatttacatgtggtattaaattaatataacgtacatgatattaacaaataaagaatcatacaatcaaaaagtctctagtctatgaaagtaaatcattactatgactctaaggctaattgttgggaatattccttttggacttaatcatatagactctgttatgtcttgtcttatgacatgttgtgagaaagttgttctttggtggtgataatcttatttgtttgttctttggggagagttttattcgtttgttcttttcttagattgagtggttggtatgacgtcgagtagtaagcaaaatatttcactcgaggaacaatatgcacaaatacagattgatgatgaggaagaaggaattttgattgaagggggatcagatggagatgaaatggtgtttgatgatagatggtgccttgttgggaagttccttacgggtagatcaattgactttgatgcaatgacttcccatttggcaaccaggcaaaggagtgtatgttaaggaattggatactaatctgtttctattttagttctaccatgaacttgatgttcaaagcgctatagatgggagttcatggacttttaatagatttactctggtttttcataggctgaaacgtggtgaaaatcctaagacagttcatttgcataaaatgaatatgtgggtgcagattcatgatctcagaacgtgctttatgttggaaaaggtggtgcgtagtacagggagttacacgggtacattcgtcaaatctgatccaaagaattttaatgggatttggcgcgattatctgcgggtgcgagttacgatagatgtggagaaaccattgaagcgtagaataaagttgtgtaaagataatggtgaatggatatgggctacgtttaagtacgaatatcttcctacattttgttttattcgtggtatcataggccactcggaatatttttgccaaaaacggtttgatcaaaatgttgatcaaattattaaactttatgggaatggaatgcgggcacaaatgaggaagaagaactatctaatcggagcacaatggcttcaaacaggtaggactagggaggattcatcgtcggaggatggtgggagacttcgttagaacattgaggaagacacgacaactaatcgtgctaaaattatggaagtcgatcccatagtttctggcactaatggagggtctgaaattataggccaacaaatacatttgaatgatgttgaaaataatgtatctggtttatatatggagaataatgaacagagcaacttccaggagggagttgatgaacgtgataaagagttgattattattttggaaacaaaacgtaggcgtatggatgaggtggcaacatgtgttggtgaagaagttgtgaaagaaaaggaagatgggatggggccaaaaaacttgttaaaggtgggtcttggttcacaggcccaccaatcattatgagtcttttattttggaattgccatgggcttgggaacccatgggcttttcaatttattaaggaccttgtgggtcaaaaaaagcccaactatttgtttttgtgtgagactttatcaaaaaatgatgttgtggaaatgcttagggtctcaatcgggtttgaaggggcagttgctgttgaggttcagggtaagagtggacaggttgctttgttatggaggtttagtgatggtgttcatcttctatgatatggctctaattacattgatatcacagtggatgatcatgatcatgggaagtggaggctcactggtctctatagggaaccaaatagaagtttaaggaaaataacttgggatttaattcgttctttgaatgaggagcttgatttgcctttgtgcattataggtgatcttaataatgtcacgtctcaacaagataaacgtgtaggaaacccgtacccaagatggttagttaatggctttcgtgatgttttagaggagtgtggtcttcatgatttgaagttaaatggatacccgtatacatgggagcgaagtcggggcatgaatggctggattgaagctaggattgatagggctctagtctcacaacgatgcctcgatatgttcccattggcaaagctttttaatctagaggttacaacttcaaatcattgtccacttcacttggtgcttgtgatcactactactcctgtgagtagaaaagtctttaaatttgacaattcttggttaaatgagccattttattttaagattgttgaagacacttggtactcctacgctggcagcaacattattgagaaagttaagggttgtggtgaagtgttacttgattgagaaaaagattactcaggcaatttcaaaaaaggaattcgagattgcaaagctgagattcgtaaatggaatagaggaagagatacacagtcgattacctgctataaggctgctgaattgaatttaaataatgtccttttgcagcgagaaatttttggaagcataggagtaagcaattatggcttcgtgaaggtgatcaaaactcgaagtacttccatgataaagccacttcgagaagaagaaccaacctgatacagaaattgaagaatgcatagggtgtttaggtcgggtgggaggatgagcttccaactgtggtagctgattatttttagcagctttttcttccaactgctaatgatttcagagcagtggttgattgtatcccggctttgataacggatgcttaaaatgcattgttgattgaggaggttactagggaggaaattagaaaagcattatttcaaatgcatcctgataaaatgccaagacccgatggtatgactccagggttctaccaaaagtgttggctgattatttttagtagctttttcttccagctgctaatgatttcagagtagtggttgattgtatcccggctttgataacggatgctcaaaatacaatgttgattgaggaggttactagggaggaaattagaaaagcattattttaaatgcatcccgataaaatgccaagacctgatggtatgacttcggggttctaccaaaagtgttggcatatagttggtgatgatatcgttgctttggtatgctcctttttcgctactggtttttttcctagttctttaaatcaaactaatattgtgttgatttcaaagaaaaaattaccggagcttatgagtgatcttcgtcctatatctctatgcaatgttctttacaagataatttcaaaagtcttggcgaatagattgaagattgccttgccgaatgtcatatctaatatgcagagtgcttttttatctgggagattaatatcagataatattatgatctcttatgagattatgcattatttgaagaggaagagagcgggtaaggagggctttatggaacttaaactcgatctgagcaaagcatatgatcgagttgggtgggcatttcttgaggttatgcttattcggataggattcagcttgcattttctaaagctaattatgttttgtgtttccacagttacaatgtcacttatgaaggaatatgttagatacaactaatgctcagtattaatgctctttatatatatattcaactttttatttatttttatttaaatgttgaattaaaagcaattggtataatttgactgcatttgtcttccaagttcgaactagctagctcttgattattttaattttatttattgtaaagtggaaacacataattacaaacatgaaataagagtacaaaagaagtttctaactttgtttactctaattaattacttcattatatctccacagcttgttcattacaaaattaagcgcgtgaagatattgtcatcattaaacatttatctatcaacatatatttatttatatatttatttgattacaatatccacattaatttttttttctctttttattacactaatttagtcacaaacttctagtaattataccatcaaggagattacaagtgtgaattcgagtcactaacataattcttaaatttttactagaatcaagatcgaaaaaaagaagttttccaatcaataatgactcaaatctattatctaaccccactcatcagaatatagaataaccaaatttttaatgtgaacatagatagtttaatctctaactaattacaaaataccaaatcaatttggattcaagcatggcaattcaagtgatgttgaacatcatatgggtgctctttagcaattttttttttgtagtataacattataacatagatttatgttatcgcaggttgttaatgctcatctccttattagagatattcttccccaatttcatattgttttgtattcattaatgtgtcacttattttttgaatgtcatttctcgaatcaggtgatgaaagacaactttaagttgctgggttttattgctatgcttgctgacttttttgaatcgctgatcaatgaagttaaaatttagtattattaatagggtaaatactattttgaaccctatttttttttaataaaagttatcaattagatcttctgttttgataaatgataaaatagatcctatattttctaaaattgtaaaaataaaacctgagctcaatttttaataatttnnnnnnttaatataaccaactttaaaataatttctaacacgaacagatacagaaaatgtagctagttttgtagattagattattattaagttnnnnnttgacaaaaaatcaattcaggattttatttatacaattttaaaaaatacagagtatattttgttatttaacaaaacagaaggtccaattaataatttttgcaaaacacacggtgtaaaataatatttacctttattaatacaattttaatattaattttagtctaattaagattttttatccctaaaatttaacacgtatcaaatcatgtcccctgaacttttaaggtcgtttaaaatacccctaaactattaagattgttgannnnnnnnnnnnnnnnnnnnnnnnnnnnaaaaaaattctaacatggttgaaagttcagggacttgatttagtacatataaagtttgaggggcatgatttgatagatatcaaagtgtggagagcataatttagtacatatataatcactatatataatcactgaaacagtaaaattcaatgaaattaggtagaagtcattaaatctaaccatcttaatagtgcaggagaatttttaatggctaaaaaattttagagaacacgatttagtagatgtgaaagttcgggaaaaaaaaaatactaatgaggctaaatttaaacatatgtttttcatccccgtgagtcaacgataactaataatggggggaacatggttcctgagttcatgattatatccatggcttcattgaagatcattgtaaacttaaacttgattgcatataaatggaagcaacactcagaatcagaagtggtccacgtgtccacaaatcaaccaccatcatacacagagaaagcccactacaacacattgttcatcactaaatgcttccttttttttacacaaaagggtcttttttcttgattttgtagtttcatcattctcacatggcaacccctccatggattcatggcttcttttctctttgtatgtgtcagtctttgattgttcatggtcttgctttttctactagcaatgtgagtaaagaagtcaactttatcactttttttggttctcaagtattactgtatcaggtgtttgatcaaatgctttaatgggatttcaagtagtaatccattaattgctttaatgggttttctttaatgtttgaaaaaagaattgggtttgattgttctgacactgacaggttcatattgtgtccatgggggcaatacaacatggtggacctgagcttgtttctgaactccaccatgatattctttcagatttacttggaaggttaagtataattatacactgcaagaattaatttagtccttaaagctttttatgttgaattagtttaaattaacagcaaacaagctgcaaaggaatcaattctttacagctacaagcatggattttcagggtttgctgcaatcctaactcaatctcaagctaagcttattgcaggtgttacaatgttggtgaactacaactctgttttcatggcaaacacactgctaacaattatctctatttgacatttttttcttttaactgttaaatatatattcatatgcagattttcctggagttgttaatgtgattccaaatagaattttttctcttcacacactaggagttgggattttctgcaagtgaatcaatttgagatgttggtgttgagattttcatttgcaaacattcacatcatactaattggtgttgagatgttgattatgaatcttaacatcgaaaattctatgccacaagaaactttttacgcatcattttgaacttatgagttagttttctcatacagggtcaggcccaaggaaggatcttggcaaattctatcctattgtgtacggagaagacattgcatctattggtgtagctaaaaacagtgctgggtataaacacctaacttttcttttcatttatcttacatccagaaaatactaatgcaaattattctttgtctgcactatttacagaagctgtgatttcgggactctaaatggtactttagcaagaggaaaggtggttctttgtttccaatctcgatcacagagatcggattttgttgcagcaagaacagtgcttagtgttaaaggtgttggtgccatttttgctgagtctctcagcaaggttgtttcttcatcttggaatttactcattttcgagttgatatcacaaccgggacaaaactatactaacatacacagaaacaatgagttagtccttgctacaacaactttatttatttcatgcagaatctattccttgttagattgaaactcgcaaaccaaatcg

SEQ ID NO: 27668 - DNA, 6031 bp, Cannabis sativa
  modified_base (4573)..(4574): a, c, t, g, unknown or other
  modified_base (5283)..(5304): a, c, t, g, unknown or other
  modified_base (5471)..(5475): a, c, t, g, unknown or other
atatgcatgcaacaccatcatcatgtattagctagagagagagagagagagagagagagatatggcccattaaattggcccaatgacatttatcatgccctaacacccccaaaaaagcccaagcatgcggccatatagaaattaggaccagctcagactcatgagctacctagaaataaattcaaacaactccccttttgctaaatcatggttttttttttcttctttttcatctacatgaatatatattgtgaccatgcacattggttagaatatatagaaaggggttcaaaggattttaagttgtggtgtgcccttggaaagctgagcattgtgctgtccctgatcagacaaaatcattgcttaacatcactgttccacgcttctaagcctttaatatatcttctttttatttattgctacctctttcaaaccaaccccttttctatttaaatatcattcatttcacacacatatctattagctagagaggaataatattaaagagtatctaatgaacagagcatttatatgtacactttttagaaaattggtcattaattatataatatctatttaatttgtatatgtatattccatataatcgactgtgtactgtgtgtgtggctctctacattgcataaatatgtatatctaaataaataatgtaagatatatctataataaactattaccgttctttctcatgattccattattcgtttcttttcatgtgggactacctatattataggctagaaagaattctccactttagaattattccactttgaaataatagttttttcagctctagaaatttataagaacaaatagcatagatatcatataattaagaaccttcatgtttttttaacttaattacttttggttttttttagctattttaggatagagcatagaattagttagaatgcttatatatcgagaatcatatatatgttacttattttagatataaataaattatatataaaaaaaataaaatctagcgctgcattatataaatatatatatatatatattcgatcgaggtctatatatttttataattttcacattatctctatatatgaaagtgggatcggataatataggtagaaattaaaagtgtatatttcttcatgaattagaacttttggactttgaattgaaacgaaacccacttaaacttagcggctaataaagagaaaacaagtcaacaatttatgactatatgtaatcatgagaaactagcttcttcttattacatgattattattattttagatcaaataactgaaccattttcacaaaatatatacatggaaatgaggtagggtcattttatttaaaaaaaaaaaaaaaaaatctatttgacacaaataatattcttttgatgcatggtttcaaggaatcgagacaaagaaagaaaaagctgaggtttggttgttgtggtgttcaaaaaaatcagaagattgagtagcaatggttttagatagtcatgttgtcgagtctatgcctcctcaatatcacttcacctttttaaattaattggtcaaattcatactacttgtactagttttctcttcactctccatataattattaaattaattactaataataatacaaaaaaaatttaatagtatctttgaaacactaaaattgagtaacaccaaaatattcatattaatatatatataatttggttggtgattatataaataactaaccaaaactaaattaatttgtaaaacgaaaaatgcttatataggagtactattgctatagtgtaatggagatggaattgatatttcatagtataagatccttgaccgacgtacgtgggtcaagtcactgtacacgtggcattcatctatatatattctaaatataataaagtcaaagaaaccaattgtaacagttaggtgcactgaaataattaatgtggaaaaggagaagtttggcgccaatatgcatgatcatgtgtgtgcctatcgatcatcatcatcaacaatgaatatgcgtcacattgtgtactctactttattctatttctatgatacatacagatctacagaactatatatatagtgctttatatatatataaatatatatgtatctttttttcttcattgcctcaaggtggagacactatgattatatctaagtatcacaaccacttgaatatatctatatacatgagacgttaacatatataaatatatatataaagggtgccctattgccgaactctatagatatatagtaatattttataattatatggtccaaaattttgttagaatagagtatagtggaatggtaaagctgtgttaattataataccccgctggtccaaaggattggacgtgtggcagatcagatctcagaaccctttagaaaccagaaatgtcctatgggtaccttaatatatccagctccatcctcaaatttaatgagttataaaaaaaattatatttttgagcttttgtttagagaaaaaaaatatgattaaaaaaaatcagtaaaaaaaatatgtaattttagaagaataaaaattattttaagtcactaaattaaatgggctctagacataaacttaggcggttttgtatatatcattaatataatgtaatattaaattttatgtattttaattaattaaataaataatataaaaaactgcttatatcgacatattatatatttcttaattgataattgatcaaagttgattacacacatatccgtttcggattttatgagcttatttggttgtgtttttcagttttcagtttttaaaattgtgtttttaaatgtgagaatagaaaacaattttttgtcattttaaaaatttaatggtgtttggctcaagttttctaaaactatttttaatttttttcttactaaaaaaaatcaatatattttaacactataccataatatgaactcatttgggtctgggtctagtatccaagtatgtgagcaaaaatataaaatataatatcttagacaaaaaaactatttttcaaaattaaaaacaacattttgatgtttcagaattttttaaaaattgtttttaaaaattttaccaaacaatccctattagtttttaaaaactgtttactataaaactgaaaacagtttttgagttatgaagccaaacaacctctctattagagtgagagagtataccttcaaatttcggaatatatatttatttatgtttttgtttttttatttctaagaaaaaaggtataataaataatattaatattttcaggttattaatagagaatctatcggtggtcatatatatctcatttatcaaattagtactactagctgtaaattctgatgatcatgatacctcgtgaccaaatattcctctatatcataaataatatttattattgatgaataaaattagtatatattgaagtaataaaagcatgttaacatctaattagttctatattaaaatgtatttaaaataggtatattaattaattaattaatttggttttaaatactttggtagctatccatatatatagcatcgtttttgtttaagatgatcagcttttgttttctgccaagctgataaaaagcaggacactgaatcttatagtaatttctataataatatatatataaacaaaatcacatgatcatcaatattagcattaattaattaactggcatattaattctccataaagcttgcttaattatatcttcatccccgcaaaaagagaaaaacatgcatatttattgctgaagatacacgatgatgatgatctgtgttctgttatgttttaataaaacatactttttcataaattcttaattaacccaacaaattaaggtatatctttcccataaaatcaaattataatttttgtcatgaaatgttggacaaagccaatgacatatatatcacttttgtctccacaaccacacaagtagacacagttctacataattaattaaaactaacagatgagatataatgcagttgttgtgagatatatatgtctatatatatatatatatatatataaatgcagatttgcttaaatatacaatatatacatcaaaaagcgtcagtacttgggttgagactacttgcaaaccaaattttaagaacattaccattaacagctagtgttttgtacttttaaatattagtgattttcgtaatagcttttaaaataaaatatgaaaaattaatgttgaattaatgtactaataacatgatatatatatatataatggtgttggtatatatataaaagattttagatcactcacaataagttgaggtataatagttaaaaggtaaaataaaatagttaagagcttaaaattgaactccatcaaatgctttaaactcttaactattatacatatttccaaactctaagagcactcccaataacttttctattctattctttaaaatttcactttttctattttacctcacacatttacattacaccatacatcagcttctttatatttttctctatatcatttaaatattatatcttcacatatannttattaataaaaataaaaaaaacattacacaaatgaataaaaaaaagaataaaaaattaattaaagaaacaaaaaaatagaaagaaaaaatataaaatatatttacctcttcactattcattgagctatatgtagagaagagtttcttagagcactcacaataagcgaggtataatagctaaaaggtaaaataaaatagctaagagtttaaaattgagctccatcaaatgctttaaattcagctcgatcagtcggtcgggatgactcatatctcagtcgatcggtcggaatgactctcatatctcactcggtcagacaggatgactctcatatatatgtaaagaaaagacaccttataggaagtaatagacttatgtcaaagtaaggtcttgttaagttaacacgtaagggtaaaagaattatctaaagggtaaatggcggtaaaattcccaaaactttcattttggtttcacttaacctctaaaaccaaaatttggacggtaaaacccccaatactcgtgttctgttagcaatttaacacttccgtccattttaggtgttaagtgccatgttggactggacatagtgtacacgtgtcacaattttattggtccacgtaaaaaattatttaaaaaaataaattaaattaatttaaaatgaaaaaaataattataaataaaaaaataattttttttcctttctttctttnnnnnnnnnnnnnnnnnnnnnntttttcttttctttctttttctatatgttcatctcagctctcgatctctctctatcagtccaccacctccatccaaagtctctgtaaacaccaccaccaacacaactgaaaccaccatcatccgtaccgtaaacaccaccacccaccactaccgaaaccaccaccannnnnaaccatcgtaaacaccaccacccaccacgaccgaaagtaccaccacaacctatttttcaaatccatatcacacaaaagaattaaatactaaaactaaatgtaaaaaaattcaaatccaacaaacaaataaacacacacaaatatatacacaaaatttcagtcccaaaactcaaatctgaaaaccctaaatttattttccccacaacaattatcttttctcatatctgaaaataatgaacacaataatacccaataggatatctatgattacaaaaaaaattatagaaatccctagatctagagaaagagagagagataggggatcgggttttaccttgcttctgggtccgtggtcctcgacgacagcacttgggtccgtggtcctcgacgacggcgacggggacgacacctgggatcgagagagatggctgagagagagagggattgagcgtgggacgcctgctgcctggtggtggtcttgggctacctggtggtcttggacgcctgctgcctcactgcagccacaatgggttgaagatggtggtgggcttgcgta

SEQ ID NO: 27669 - DNA, 4275 bp, Cannabis sativa
aatccgtacaagtgcggatatccgcattttgcggattggattggatcgtgcggattggattggatcggatactttgtgaacacccctagttgtgaggcaaaggtaatagtgtatctatcatgttcagtctatatatgtcatatacatcatgttaaaaaattaaaatatctcggccgtgtttatctgcatccaaatcccactgaattaatacaataaatatcatggaacatccaagctagaacatattttgtataaccaccagtgttgtgaaagcctctcaagaaagcctagtatctttcacactaggcatgctgagattaatgtgcccacttgcttggacgtgatttgtgaagataactaatcatatcacttaagaacccttctaccttttacgtagaggacgctgagaaagggaaagaaaaaaaaaagttaacgacagattagcaaataacctttgcaaccacaaaatgtttttgagtttatgacatactctttgtccatgatcagctggtgctggttgttgaaatctgttagagttagacattctctctggattcggaatgagatctggactaccgtgcttatagaatgcctgcagcgctcgaccaacaaatgggcggactatattcacctccattgcagacaaattcttgatctgcaattacatgacaatggaaccttaggatacatatataacagaagcaatatagtgaaggaataattggaaatgaaaacattggaaaaggaattgcaaatttctctccctcgtaaacaagaagcattccaagagtaaatccacatacccagaatatcaatgcagaatgagataatcatattactgaaactatgtaggggtggatttgcatagctacttaatcaccatcattaattcacatataagctagactattcatatggaatctcattactatttacctaaataacttttattctcctacatcagcattaactttatgcaagaaagtctgaaaattgagaggtttacactataatataaactagtttcccagagactaaaaagaaaagaaaaagcacagatgccgcataatttttatcaagtcttgtcactttggcgatgagattgagaatggcatacatacaaaaatggtcagttcaagaatctttaaaaattatcaaacgatggatattgtgcaaaataactgaaaaaaaggctattttgtcaaacacccgaacaaaaaattataacacaaaacataacataatcagtttcaacaaactcatacccgcacagcagaagagcgggcatcctcaaaggattctaagctggtctcaactttatgaaatcttacatctctgatgtcctcaatgagagatcttacctgaaggttatgtttcgtagttaaagttaaattgataattcagaatcaaattattaaatgttagaaagagagaaagttgaaaaatgattactcaccatatatatgtcaggaatgtcatcgcgtgcactatcatcaacaacattaaaaccaacaccaatatatatgaatacatatatatatatatatataaatgtatttaaatttgatagaatcatctttcaatacttactgatcaaaaagaagccttgagatttccacataatggaaaggcaagacttggaacgcttcttgagactcccgctctgattccaaaatttgagtcaagctttctgcaaaaaaaaaaaacaaaacaaaatagtcaacacaggttttcgaagttcctataaatcacatgaagacatgactagtacacaaaactaacactgttctactacattatttagagacgaaaaacaacaaaaatgggtttcaagaagcagatagatctaagaaaaaaccatggtggagcatttttgcaataatttcttaacaaagaaactcaccaattgacatccatgaaggcggtcgaattgcacatttccctctcttcttcaaggcaattgcaagccaaagaggtacctgggtaaccatctgtggaaagaatggaccgtaatccccctgcaaaaatgcaaatttgcaaagcactcataatctaacaagttaaatgataaaattacccataatgaaaatggcaatggagagacatacagaaattaaattaagaggttccattctcatattcggtacaatgtcgatcatttcatcttcgcccatgaactcaatcttaggattcagccaacaaaaaatcaaaatcaaaatcaaaaaatacaaacactatttatttatatgaaaaactccaatcaaactgaacagagagggaaagaaggacacctcctctgcagaaaagagagaagggtgaggatccgattgaccagccatctttatcaagtgtttatgatttttaataaacctaacaacaggtaaaaattaagtataaatattagtagaacaagacaaaaacagataaaaaattctcaagtatgcatcgcgaatttaagcccaaacaaaaaacaagttccaaattaaagaactaatccacaaatatgcaacatgagtctatactgtgtaaaaattagaataattattcccctcagatttaattaagaaatacaccctagattaaggtcagaatcaagaagaaactgcaaaaagagccgaatcttcttacccacattagcaaatgatttccacatctacgttacaaaagccctaggcaaaccaacaatttgtttttttttttttttttttttttgcttaactcaaaccaacaatttcaaaatctagattcaaacctaaactcacacattcacacaacttcaaactattttccaataacaataataataataaccttgatatggggagaaagctatggtggatggcaagcagagttacagcaaaattggaagaagggtgagttagtgagtgaggagtactattgtggagaatccgcttagtagagagatagaatgactttggttttaatttcttccctccaaatttagttcccttccctccattattttagtgctcaaacttttacaaaattaaaatgacagtgatcgtcaaaagaacatcctcgaggaggaaatattggccgacgagctgtagtgggaatgataagagtggagagtggagactaaaatgtgaagacattatttgtacatgtataaacagagagagaaatagaaagaaaaacatgtgtatttttttcgtactttaattgaaaaaatttaaattatctcacttttctaatttacttattggactatcacaatatttaacaatataaaaaagtaatgtaaatgagtgttctaatacacatgtaaactaaatgacacatttttacattctatagacatgaaaatcaaaatcatgcatcatcttgaaagcaaacatataagttccactgataaggatctgtcaaataataaaaactagcgcacaaattactaatcttttcattcataaaccacttctaaaaacattaactttacatttccaaccaaaattttatttctaactagcaagataatagtattgtaatcgaggaggagtaagaactactgcgaaaataaccactgagttactcagattgtaattgaaaccaattgaatggtggcatatataaacggcacggcagagtcatttccaaccaaatctcatgctaagtaactaaatgagtttgatatgtaacttcttgaaaaaataattatagaaataagttaataagagcaataacttacaaagtatagaaaatataaaaaataggaacttgagaatatatgatacatatatatatatatcagtagacaacgcagaatcaaagttgtagtggaatacattttattatgaacacagaaattaaataaacaacaaataatacttgaaaacaaacctgactttatgaaaagatacggacggagtcgggagaggaggcagagcgagatggggatgaccgagaatggtcgtggctctcgacagagaagagagaaagacgagagagagaatgagagctcgcgagtggaaaggagttttagggttgggattctggtgcgggtgggtttgcgtggggagggccttcgagacttggtgtggctggagcagctccgtctggcgtggagttgggtcgaagagaaagagatgtttcgagagtttttgggcgaaagaaagagagatcgcgcgagctgggtctaagagaaaatgatttccattttttttttctaggaagaaaaaatgctttcaggatttctatatatcctaatttttctcggttaataactgacatttaagaggtgctgtctatttgttggat

SEQ ID NO: 27670 - DNA, 1641 bp, Cannabis sativa
atctatgaagtccccgccctaatttaaggaataggccgtttaattacttttcttttttctttttgaaaaaattacgataaaagttttaaagaatttaatatttatgtttgaggtagataaatctctaacttcaaaaattagcattaataattttcaagaccatattttctgtaagtttattagccatttttctaactgatttgttaaacacaaataaatatcacgtattaatttttttattgataaaaatcataaatttaaataaaaatttaaaatactctgctcccatcaaaacacttggtacttggcttagtagatcggttctgtgaaattgcatgcttaatcttggtatttttagagcacaatcacaacttttctactataataatcaaaatacctcactttttttttttttttatattttacttcacccttttacaatacaatttttcttttcctatatcattttaaatagtaaaaaggtaattaaatgaaaataatagaaagatgagagaaaaattatttgatgaaggaatagtatttagttatttttagcttattatttgatataaacaaattctgaaacgtttcctaaataagtaagcacatgagaatagattcaagcaaaatctaaggctgagaaacatctcaaaaggaaactattacttgaaactttttagtatctacagtattgttcatatgtactgtattactcctacatttatgggttgttggaataaacaatcaacccaacagaattgcaccttccaacccaaaaaaaaaaagaaaagaaaaacagaagtgcatttcttgctattccctcaatactcagtattagattagtgggttttcgaccttagacatatgatatctgctgaggttattaggattgagaagcacttaaaactaggcccttcagtgctggcattaggctctccagaagctcccgtttgctcaaaattctatcagaagtacagtcctcttcctgaaaaatataaatgttttatcgaatcatgatttaacctctgctacaaggcactagtggtttccgatatttaattacaccaataactatatgacacctgtaggtagtgctaggcaccataacaaaaaaaacccacaacttcttataacttgttttcgtccaataccgttcccaataatgtcatgagaatcaaaacccataagaacaacatctaatgaaaatattatatgatgattctaattaacaaagatctagtttcacctaatgcatcgatacaaccactatggcatacgagaattataccaggtaaaggactaagggtgtaaaggaattttttcaatataaaaaaggttgacaagaaagaaataatatataaatttacttacatcgccagttgaagcagatattaacgctaaaagggttacggttgctgcttggtactcggtcaggatcttgtaggctgaatcatctaatttatcctgcaaataccacactcttcttttatacttttgacaaaaatcatacgaaaatccacaaaaacatgcaaactgggaagatacggcggcctataagtcgcaataactctaatctacatgcatataaccttctcatcccaggcccgggactagaatgactgtaaagcttgaacgtcctta

SEQ ID NO: 27671 - DNA, 4709 bp, Cannabis sativa
  modified_base (26)..(34): a, c, t, g, unknown or other
  modified_base (4645)..(4657): a, c, t, g, unknown or other
aggatgttaataaaacatacttggtnnnnnnnnnagatcctggtaaaatattttcaatactatctcccaggtgaaggtaactgaagggtactcctcaaatgtctcaaattgggtagataggaacaaactaattttgagtggtctgaaatctcacgatcatcatatatttattcaacacattctaccagtgagtatccgttctattttgcctaagaaaattagatatgcaatcacgaggttgtgtttgttcttcaaatctttttgctggaaaatggttgatgtgactaagttagagaatctcaagttagagattgtggaagttttgtgttatttagaataatttttcccgccttccttttttgacatagtggttcacttaacagtgcatttggtgagggaggtgaatttttgtagacctgtgtactttagatggatgtacccatttgagcaatacatgaaaatcttgaagggttatgtcaaaaataaaagtaggcatgagggttgtattgttgaatcatacattgttgaagagacgattaaatttttctcagactacttgtcagaggttacaactgttggctcttgcccaactcgggtcgataaggtagagggagtaggggtgtttctctttgcagtgtaagccacgctgatcgtgaaaaagtgtaccgacttgtgttgtaaaatattgacaaggtccaactgtacattgagtgagtttaagttaaattttcatagttaaaataaaataataatattcaattgaaactaaaaaaaatccatcgaatacttgaagggaacattttaattggatcaagaccactaatccgactaaggcacgaaatcaaaaatatgtacaagatgaacattatcgaaattttagtacatgattaaaaaaagatactattaacattattgtttgttacacatcatatatttatttatctttgttcactaatctacttatatgttgataggtatatgtagaaatgtgtgaatcctcgagcaatgtatccaacacacttctttccatatcaaaaggccattcaggtgatgtacacaagtaccaatcatattatataaatagtactcaattttatacccaagccagtgataaatctagaaaaacacaaaatagtgatgttatgatagttgttaagactttctaaatatctagttcaaaagacaaaaatcctattgaatgtgacatgtcttttcacggtgtaattcaagaattttaggaattagattatagtagtttttagatccatatttttatttatgattgggttaagagtgataatagggttaaagacgataaatttacattcaagttagtggacttgaatcaaattggacacaagtctaataggtttataatggtgttccaagccaatcaagtgttttacatgaacgatctattagatgcacgctagtcaattgtcttgacactgcaatcaaaagattatgctaatcaagagtctaatgacgatgatctcatgcttagagaccaaattcattaaatcactccaccacctattgatgtcactgttagggacaatatcatatcatctcgtgatgatggtgaaggattatgggtgaaagaatttatcaatacatgagtcatcgaacacgtattggtatcaatacagaattttgtatattctaatgtatgctttcaaatttgtaggattattcatcatggaaccaggtggggaagatgagtggagtgcttggttagattatgatggtgatgatggtccatccgtgccaaaaggatatagtgttgatcttgaacaatcatccatggaagatgaatatagtgttgatcttgaacaaccaccgtagaaaaatactcgctagagaagcaaacagagcgatatatccaaaatggcaggagagggaaaaagttggaggttgagtaaaataataacggacaacactgggaaaagggagggacgacaaaagttacccgaattggagcatgggtagttaatgttcgacttcgagatatatcgtggcgtaaagttagtgaagacattaaaaaccaattatggaatggcataaaggtaatattaattttattattcgtgtttttaactattgattataatttgtacttaaaactatgattgttaatttttttaggctatgttcgatgtaccgaagatggacaagaaatcaaccatttcaaaaggtagagagagatggaaggattggaaaaatatcctaataaaaagtatttttacattcaaagatgtggctccctaacttctcgataagccactgaaactgtatgaaagcataattgatttgtaataatggagagagtttgtggctacgagattaagttctaaatttggggcgaggagaaaaaaggcacaacggagcacggaaaaatatatttacaaccattgcaccagacgaggtggtgtaaggatggttcaaaataaatggaaaaagaggcaagccgccaaattaccaattttgatagatgtgaaacttcacattaacacgaaaggtgaggtggagggcccagctgcaaaaatcgttaaatggattgtaactttaaagtataattttatttatattgttatgtttcacaatttaattctatctctatttgctatatttgtaggacgactttcgtaagcaagtggaagacggagttttgcatgtggaagggaagagggacgtgttgagcatggtgctgggatatatgagcatggtggtcaggattgagccatgggttatgtcatcacccaaaccaaatatttcaacactccacgccctaaaaagaaaaacaagaatgggtcaaaccaggaatcatcagatttggaaagatgcatttgtgagacagaggagagcaacagacaactacaagagtaaatggatgagctcctttgtctagttcgttcccagcatagcagcgttgcgagtacatcccatgtgtatggttctggtgttgggggagcatcgaatgaacaagcccatgttgaccttaactccgatcccgtagcacaacaatcaagtactgtaaatgtctctactctaccagatcccatagcacaaccatcaagtgctgccaatgtctctactccatcaccaccaccacattcccaaaaggtttctgctccaccagcaacattgccacctactggtggtagatcagaagaggtaatcttaatattattttacgaattgatctaatgtaaaattataaatatggtcaattttacaaactaaattattgcttgtctgatttggatatgtagacttttctatgttggatgcactgtcggttggagcctagtgggatggtattaaaggttgctttggggcacattgtgaaggagaaatgtttgaaatatggaaagttctcgattcacaataatgaatacctatacacagattatcgttgggtattcattgaagaagtcaatgtagagaatgcactgcttccgtgtcctattacccaagatgcattcacaaaagtaggtcaagctataaaaagttacctagcatggcccaaagactatgttacaactgttaaaaatacttggtatgttttaatttttttacttaacttattgtgtttgttgattaatgaaatttctaactttattgtttttttttccatatacatagccacccaccaagcaacttcagaagcaacctgtgaggagaagcagacaagcctctgaaggtttactcagtccttaaacacaacctcgaaaacaccctaagaggttgagtaagccaacaagtcatgatcgttatgtccaaccatgacaaactatctcaatcactaacttttgaaactcggtgaaaaagtggtcgttgtagagaataatccaattctgagttacagaagattattttgggggtcgaagataactcgattttccttctaaaaaagacattcataaattctacaccatgcaatacttaggagtccaacctatagcagtttggtgcaagtatgatttctaactcttaataaacttaataattttcttttgacagtgacggttattaattatgtctttatatcatgcacatgaaagagcgattcctgggtatcaatggattaaacagaatatatgaatttttgaattctagtgccattgccattgaagccaaagttgatagtatctattgtcaagcactagtcacgcgtatgaccaaaatgaccaatccggataaatgggttattgtcccttataataatccgtaagtagaattagaatgaatgatttcataatttataactcttcataatatatattattatgtactaacaattttacacatatttttgtgtgtagacaaatgttcattggatgcttatactaatccaactaagtacgcagacggtggcgtacttagattccaacaatggtgacgtaccagatgatttgaaatttattatttttacgtaagttctatatccaacatcacaatatgtaagcgtgtttatatttaaatttatatgctaactttactttttgtgtgaatcgtttaccatttacaatcaaatgacaagacggcataatagacctatccagtggataactcctatatgtccagaacaaacagacgacaaataatgtggatactgttggtaatattttaccaggatctagannnnnnnnnnnnnatgttgaattaacatcctaaatataaattctctaaaacaatgaaataaatac

SEQ ID NO: 27672 - DNA, 2019 bp, Cannabis sativa
gtgcgagacatgtatcgtgcctaacctttgaacttgtttgcctgcaggcgcgtttaggctgacttgctagctcggtgtgccagcaagtgctgcatgttctgcctacttgggagtgtccaaatagtcggcccgtgacacttggcattgtaccccccaagtgagatgggaagtttagacgtctccgaattcccaatcacttgtttaaaacatatcttgcggtttaagaataaaaaaaggtaagttttaagtgcaaacttcttctattttcatttcattgtacctgtaggcttatattaagaagaaaattgttcaaaaatttacaagaaactaaagaggcacatcaaggcttggtcacctcagcctattggtagtaccgacgtaagtggtctgcattctaggcattagggaccctcaatccatccatcctcttaatttaaaaagttccttggtccacttgctgaagtatctcatacgggccttcccaatttggcccgagtacccccactcccagttcttgtgaagctgggaatactcttctcagacgaggtctccaacatcaaatgtacgattcttgactttggagttaaagtgtcgtgcgatcttgccatggtacattttgagttggacctgtgactgttcctggagctcatcgattaggtctaacgtttcctaaagcagggagtggtttcgggaagggttgtaagtatctcatcgatgagaggggattgtggcctctactaggattactatttcacaccgtaagtcatcgcatatggtgtgtgtcccattgaagttctctctatggtcctataggcccagagaactcacataagctcttccagccagtgagctttgcatgcctagagtttcttcttcagtgttttttttctaagtgtgtttacgacttctaattgtccattggcctgcggtcgggctacaactaagaaacttttcacgattctatgttgagcacaaaatttcgtgaagtgttcgttgttaaattgtttcttgttatcggaaacaatcttgtatagaagcccaaaacgaaacacagtgttcttgataacaaagtctagggccttttttgaggtgacaatgttcattggctctgcctcaacccacttagtaaattaatcaaccgtgactatctcgtatttgactccttttttcctgtggggagggatcctactaaattaataccccaaactacaaaaagccatgagttactcatgagtgtgattttagttggcactacacgtggaaccttaacgtacctttggcattgttcacatttttggacatagtctacgcaatccttcttcattgtgggaaaaaatacctttagcgaaggatttttttttgacaagctaggactagatgtgtgatctccacagaagccaccataaacctcgtggattacaatgctgattttggttcctgcaatgtatctcatatatggcattggcagtcctcaacagtagagtgtcccatccataataacataacgggcagcctaatactagaatttcctggaggtggctttatttgtgggaagctctcctgaactcaaaaagttgtaaatgggtgccatccaagaatgagaattttcgacaatggaaattacccctggaccacaatgcttggcttttctaggtgacaaatcaagactactccgtgttgaatgatctcaagatcagttgcaagtttggcacgtatatttgcgaataaatgttggtccctcaagacctagcagacgttatagcctttaaacccctgtagaagctcccaaacatcatgatgtaagcaaccattttttcaccttttgtctggtactcaccaaatatttaattcaccaccagctaagaatctctatgcactacaatgtgctgggctcctacttccttagccagctttaagcctgccaacatagctttatgttcagcttcattgttggaggcacagaaattgaaccgcagagcattgtggagttggagcccttatggagtgatcaaaatgatc

SEQ ID NO: 27673 - DNA, 3487 bp, Cannabis sativa
ttcttcccatttccttacgtctcaatagtaggggtttaagagtctagtgactttttcttgccaccctttgagcccttggctcaggtgacggcttcttctagtttgataaagtcatccactctatctaagaagtcattcatggggcatgctgccttaagacgaaggtcagaccacagaggactcatctccttgagtgtggctgtaagtgccattacccttgcgttctcgcaaagacttttggtcttagcggttgcctctaagaaatcttggatgtagtccttgagcagctcatctttctacttcttgacatccaccaaatcattggtttgatctgacattgttgggaaggagagaattggttgccaaaagcatctactagatctttccatgagtcgattgatccaagggagagcttaaggtaccaccgttgagccaagcctatcaatgtggcaaggaagaatttgaacctaatgtcatctcacacaccctgtagtttggtttacactttgaagtagtggatgtgaaataatagatcttcatttccagtgtattgatgccaggaagggttcttgaacttcagagggataggaaggacttttattcgtttggagagcaatgagccccgctctctatcaagtttgaattcggacaacttaggagtcgtgatccttttcactaaaggtgccaagctgtcaaattctgcttggttgaccccatgagtgggggtttgcatcccaattagagcttctgttactcaggtagtgtcttctctaaaagttcctactttcgtcgtcctattctaggtcaagaggtcacgtaggtctcttagtcttcaaagtcgatcatgtactccgatcaaagagtcttattattgtctcctcacaggattgtgaaggcaacactggttaagtctctaaaatggactttggatcgtctcaggatgacccgttgtgggagtgttcattcagagtgttatagtggctacttctctcaaagtactcttcagctagctcataagtttgaagagaattgaatacatttaactcctctccatgtactcgagagaagtattcatactattgtccatcggggccacgagaaaagtggcataattcacccctctcatctcgaaagtattgagtatgaagtagttcattggtccttacccttcggatctcatatcctccagttttgaagtagtgtctcctactacctcctttaatttgagtagcaggtccctttcccattatagggtatcaggcctaatgtcatgtgagtgtcgagaaggacttggtggaggagtcctgttggttctctaagtattttgaggttgttcaacatcaggtggaggtcccattggctggcgcccacgagcttgagtcctttcaagctctttcccaaaggtgcttcccttccaagtggtttccacgcctagtgtttgcttagttcttgctcgattactaggtgtggtagttgcattctaagcgttaagtgtttcccttgaggaatagttcccacataaccagttggttgatggggagtctctctcaccaactcaaaaagacccctgtggggagtagttccgtgattagagcgataagcttctcttatccactgagataggttagctcttcgttgttcttactcaatgcgttggatctcaacgttactttaattttttcacgaactagtgctgaaacgttttgttttgattattgagagtctctcgcaattattgttgcaagtcagccacagtttggctgagttaggtgacccgaggatcaatctcttcaaggtcattaatctccacgtgaggctccccgagtgggatttagtcgttggtgccagtctcaggagcatttggtggccttggaggaagagttgaggagttggttctgaggcctgctcctggcacttggggagcatgagtagtcccaattccaacttactctactggcgtgcccccaattgattggccagctattgggattcctctctcaatacttgtagaatgtgttgcaaccatcttgttagtaactttattgagttgtggatctttatgaaagcaccaaaatattgactcaaaaatctatactagactcctaagccacaccagctcactagattagaatgaaatagttgttaagtaaaaataaagagagacacataaaatttatagtaattcacttcgtgtatcgtgacagtaatggagctatgtcttcttcgagtttttatttctcaatagatggtattacagaaaatggctaaatgttacaagctccagtttctagagagaaaaactagaaagagaagctctgaccttgtggatagttttttgaaagtgaaaaatgagctaagaagactctccttttataggtgaaggagacccacaaaaataggaaaaaaatataaatatattttttgaccgtacatgatgatctaacggtgaaaattagcttcagatggtgatggtcatttttcatagcccgacgggacccactgcgggtaacccgaagcttatttttgtaactctcttgggagtgaaatttggtgatgatggcttcagaattttgattaaagggggggacataacttaatagatcattgaattagcttcgaaacgcaagttgaatcgtgtcaatatattggatcaatttaaggcagttatgacccaacacccaggttgacatctgatgtcacttagaaggctgggtaagtgtaaaaacgtttaagggctttatgatgcttaagtgatattttgacatgacttagtctatttttgtgttttggtgaagctagtcactaattctcggagatgtagctattctgcggaaatgagagactcgaaactattcattttcgagtgagcttcccatgttagaaatgagaaatgcgaagttgcaaatttgacctttctgacttcatggatcttaattattgtgaaaaactagacatgcgatctaaatagaatcagaatcagataagcgaaacctagcttactaggccatttgtcgacttgggccctgggtactcattctggagctcctggatctcgttttgatacttcaaaggttctcaaacttgtggaagaggtctcttaccccatttttgaccattccagattcattggtcaaattagattcggaatttgagcaatcaaaagtagtgccccaggttaattgtcaacatgggcactagtccctatttctaggggctcaagtttgtggttttctccttgagttttctttaatcttcattattttttatgatacaaaaaatgcctggaacatttttttgagaacttgattggaaacaacctaggttgacaatatgtcaacttgggcactaagcctaatgctaggtgtcaaactgggtgttgagtccttggtatggcccttcaaaagttccgtttggtccccaaaaatagttggatcttaatcttttctgaaaaatggagaagatgctcgaaagagttctcgaaaaacat

SEQ ID NO: 27674 - DNA, 5615 bp, Cannabis sativa
  modified_base (1174)..(1174): a, c, t, g, unknown or other
  modified_base (5045)..(5052): a, c, t, g, unknown or other
  modified_base (5189)..(5206): a, c, t, g, unknown or other
gccatattgaagtatcaccataagacggtaaatcgatttatactatataaaagtaaaaagaaataagagaatacttagttgctgtactttggactcattgattctttctctactgtttatgtttgaagtgcaatgcggtctcattctctaccgattctaagctaatggcttctgcatcagaagacacaactgtggccctctgggagctctatccaccacaaatctgaaagaaaaacatctcttgttgattatatattgctctttgtaaatattagttttgaatttgatgtaacgcaatgcaactctactcgtctaaatctagcttgtttaagttgaaacttgagagcttatccttttctcacttaaagaacatttcagttaccttcagagcttctaaatcttgcttgtttaagtgaaatcttatttcattgtttatcatgcaaaactttcattttgtggaatttattttacacatctttatggcaagctaagtaaactgtaatgtaatctatatcaggtcaggcaatataaaattatttaaatattatttgaacgaaccagtaaatttcacgttttatggctggagatcttgtacttatggtttggtgaatgcaaataattggattatcaaatttcacatgattgcactgagttttttttaattcattttcatgaagttcataatttttataatataaatgttgtttataacaatttttatttctacgttacaggagtaataatttcttattgttttataatatataattgttgtttgatatggagctactgactagcacatacatgaagaagactttatgtagattttgcccctttttattctttctttatttttcggtttcttatcattttggatcccttggatgttatacttatttttttttgtatggataattacataaggtattattttttttaaataaattatatttttacatttaataatttttttttttacatttttactaacaaaaaaattacataaaagtaatgaatataacatttaaataacatacaaattacaaaaaattaataacaaattaacataaatgcaacataaaaatactgtattttctgtaaataaaatttaaaaattcgtaaaaatatttaaaattctgtaaaaccgtaattttataatttttttgttattttngtgtatttgtgaaattatccctatgtttttatttctatttgtgacttggatgcttttcatgaggatgtggatcattatagggtaaatactattttagaccttgtgttttacaaaagttatcaattagactttctgttttgttaaatgacaaatgtaacatgtattttctaaaatggtacaaataagacactgaattgatttttttgtcaaaataatatttaattataatccgatttaaaagtgttatgacaaaattgtttacattttctgtatctgctcgtattaggaattgttttcaagatgattatattaaaaaaaaaagttgtcaaaaattaagctcagggtctcatttttactattttggaaaatacaggatccattttgttatttaacaaaacacaagatccaatcggtaacttatgcaaaacagagggtccaaaatggtatttacccaccaaagaaaatacttactatttatttgtttttatgtgaatggcaggatgaaacaaagggtgttgcacaaaaattatttaaacaaaaccaaaatgtaaactaaatttatgtaataattattagtatagtaactgtaacacgcctctacacagaaaaataatagtctaataattaatatttaaagttctggaaatacagaccaaacaaacttaatcaaaatacctttattttgtttaaaaaaacaagaaaagaaaaaagaaatctactattgagtggttaaaagcccacgggctttatattctcatatataaatacaaaaattggttctaaactgaataatcaatcacaacgtaaaaaaggcaagaaaatgaaaatgaaagaaacaacagagatcgatactgaaatgggattcatcaagctcttcaactccaaaccctttcaaaaagggtttgcaattgtgagtttgatttctgtgttgctgattgcggtaatagaagacattcaacacatttattacgggaagaagaacgattcctctgctgattttgacagaattgtttggggattcttctggccccaaatcttggtaatttcattgttacatttttgcttcttattcttggcttgtagcaggagcttcactagcgccagagcaataagaatcatggtcgttgatttttctctaatgctgttattcgcatatcactcctacgtgtcgtattgccatacctccaagaaccagaagaagacgatgatcaatgccaatggagatgaaataatagaaatgatatcatcatcatgttcttcaagattacactcgattacttctcttacttctatgtttgcaacactaaagctagcttttgcttatacagatgagtttcacgacttctttagtgaacaagtcgtttattgaatccatagttttgagtgtcttcatcattttatataaattctttaataataatgaagttttgtttttgtttttttggacttgttacgtatatttatatatttatgtatagttttgatttgctttttttttggataataatttcttaatgtaaaaggaaaaagttgtgccatgattcatatttaggagttatctataaaaggaattaaatgaaattcaactgtacaaatcctaaaaaatatttatcaagatccatatttatagttcgaattcaaatcttgacaataattaataggactgttcaaatcttgaaagttaaaataagggttagaacacttaaatcttgacattaaacataattcaatagataagatacccttctttcaaaaaaaaaaaaaaatagataagatacccacattaagagcgtgtttgaaatttattgtataattattaagtattactgaaattatatttaaaatacattttagatataacgtattaattacttatgaattttgaatatcttgattaacaaaatagttagtaattagatataaaatatatattttttaagtaataaacatttaaaataaaaagttttagtaatacgtaaatacacacaattcttatagggaaaatgaaaattagagtgtaattaaaactacttaattactttcaattacacaattatagtgtaattatataattaaacaaatatttcatattgtaatattacttttaattatacccaaatccaatttctacatgactttcaaaacacactctaactaaacttaaacacataactagggagagttagaacacttaaatcttcatgattttggaaatatcacaaacttaaaacaaattcaaagtactaaatccagtcaccaaactacaaaggaactttgaatggcatattcaaagtataacagttccaactagtgcaaataagcagcacagtcaaaaacagaaaggatgggctcatctttgttataacaaataccatttaagaaacaaaaacattgatttaaaagagtttttttaaccttcaagaataccatatgcaactatggaaatcttaacaagaacccaaaagatgaaatttttcgctttaggatactctatgttacaatgttttcctataattcaaaacaaaattcgatgtgattcaaaagaaagcatgttgtaaatggtgactaaatcataaaagaaaaaaaaaagtatgtcaaagactcaacaaataggctgctaaggcaaaatcgacaaggaacaagttgttatttgatgaaaatagaatggaagacttactcaaataaataattcattgagcaacaaaggataattcaactcccaaaatggaacattgaataaataaataaataagcaaaacaaaatcagtttaatgcattttaagtagaaaaattgacaaattgtagaaagaatagaatacactacagcagagaacaatagcaatagttaacttaaacatatctttattagattttaaataatgagatataataatcaaagagttcctaccaaagtttcagtattggggctgaatgatattctacaaggcagtcaccaaccaatgacatttttccttcttgtttataaaaataaaactttactttcttacattgttatttacgtagataaaaacatatgcatagaacttcaaagtgagcactgcaaactccaaattgaatcaactgcaaaataattatttttaaatcaaactcccatttctatttttcaatgtcaaacatttgaagtatatacagagcatgttgtctatccctagttatatatatatatatatttaaaaatacaattgaataaataaatgtataagagtgatacaacaacaacaataaagataatacatattcttatagaagaatatcagcatggctatcaaaggcattattattattatgactagtgttattgttagtattattagtattgatattgggaggagaatgatgatgttggtggtgaatatcgacagaggccatgacattggcagcatcatcaggctgagactcagctcttttgtgcttgtacatgggagaatgtggaggtgaatctccagggcttcctcccaacacccttgtgggagatctcactttttcatccttctttttcactgcctttttgtgccactgctttagtgcctttgatgtttgttcatcgaatattgacctcttcattgttgatcccatctacacacatttcattgcttagtttgtttgttatatgaaaattttacaacacaccactctaaaaagaatgtactgatacactttttcatttcggtattcgagaaatttctttagtaattctttttttatagtcgtgtacgttgtaattatgtaagacattttgtaaaattttaaaacatatgaaaagatttaatttgtcaaaaatagagtttaaatagtctatacgagtgtgaaatagactgtttgaatattgttttttatattgtaaattatnnnnnnnnttttaaaattttgcagaatgtcttaaattactataacatacacgactatgaaaaaaattagactaaaaaattttcttcttgaatttcaacactaatgaccttatctatttatatttaggggaattactccatatacnnnnnnnnnnnnnnnnnntttcaaatttacgatttgggtttctaaagtggtttctacatgggttgctatacgatttttagttatgatttttggttgcagatttcataaaaatacaaaaaaaaaaaaaaaaaaatgttttgaaatataaaaatgaaaaagcgtcttatatttattacctgagtcacaagtgcatacaatggtagcgtcacataggcagacacgaattgaactaccacactgtaacaagttttatcatgtacttttgtaagcaaacacaaaataaaacaataaacatatggtgtttaagttgatgaaaaacagacaatacatacccaagggcaactcttaaaattatgagattaaaatcatcatgaaagcaagatctcaatccaaactcatactgcaaaattcatgagttaataattaa

SEQ ID NO: 27675 - DNA, 6845 bp, Cannabis sativa
tcataatgggatggaacgagagatttggggtttaattgaagtctgtgaattggtgataccatttggtgattcagccccataattggtttgttttttctttttctttttttggcaattttatttgggtgcttgtatagtttttcagatgaatttctttgtttgttaattcaattcactcacttctttatcattattataaacccaaaaggtcgccttgaggatatgaagtccacagagttgttctttcttcttgcttatgctgttgctttctatgccttcatcattcatagatctgttcaactttctcgcggtaatgcccaatgtcttttttcttacttattctatacatatatattcatgtgttctaatgcttcatattggcagtgcagatcaccacaccaaactctttggtttgcgtcctggatggctcatatctcaacgcctcaatgtacacacacaccctctttctctttctctttttctttctctgccttggtgtttttctccttgcatgggcttagatatgtgattacatttttatgttttgtaacttaggatgtctcggatgctcaatggaggaactttcgtgcaaatttacctattctcacaatcgttttcaccatttttgctcttctggctaatgtttcgaggaccctttttcattttaaagcaaaagggatgtctcttatatggattgtaatatctttagcatacctcttgtatcttcatggtgcttggtatgtgtgtttcttttcatatcaaattctttttatatgtagtcaaacatctgctgaactgaaactgatattttatctcatctttcttttttgcaagcattgtatttatcatcttaatcgcttccctgaattatttgttggtgaaggtgcgttcctttcaagtttgatgatattagatgtagcattttagctttgtttttttttgttttttttttttttttatttgcaaggtttattggttttatataaaattttgttatgcatattaatccagtacatgcatgatgcatacattatatgcgctgtctgttataatagtatttgttgttacttgttgctgtttttttcttcttctagcgtttgtgtgatttgaacactgatttgttttctttatcattccactagtcattttagttatctggatgatgttttgtttcatactgcagatatttgcacgaaccaagtacttctctttcatattttgggttttcaaccttttttttctcatatgcaaccgtgtttatgaaggatattccttctccatatttgggtgagtatcgtgaataggtttcttatattatcctttgctttaggtagtagatgaatgatccaacaacttttctttagctgcttacatttgtgcttgtttattggcgtagtcaacattgggcatttttggacaactttcgaggaaccttccgatggcacatatgcttcaactttggtatttcgttttccttgttctttttttttttttttttcagattttagttttcattatttttgttgaacctttaactttgtgtgtttgtggttctaaatatcatgttttatctgctataataaaactttacattggaaaacctcaaagcagctcaaatagttcagtcctaggagatgaagtttcagtaacacaaaatctaacgtgttgctaagtgagctttgaggagtgtggggagttttgtatcagttaagagctttgagagggaatgatggtgtagccttctatatttgtagaagtttcaaaaaggctattacatctgcttaagatattaatggcagagagtttttatgaggttgcctacagtgattggtattgggtgtgcagcaactaagtgagataatcctgcattatgccttggttggtttaagcatgctaaatagtaggttgtggtaggcctttgaggaataacagtgacaggatctttaatgctgaaagcagcatctgagtatcccctatgaactgtgatgtccagcttgctctcaccagatatacctttttatataaatttgataattattttgaagaaatttattttctttaaatttaaagcgtatttatatttgggcttagattttttttaagccctttcgctttctttaaatgtatcctcacattgaatgtagagattcaagcaaatgtcatatttttgcacttgtgtctggcagttgttttacgcatgataagcttcggttatgattaccattgggcacatcaagattctcggtctaactataaggtactttttcacgctaaacttttatcagtgttcttaattgaaaaaagtctattttctccctctccggagtttttctataactgaaagctttctgccaagattagttggttcttactttcacatgagtgaatgcatgtttacttggcattattgtatgctttatatgtttgactgtcaaatatttaagagacatccaccctctcagttcatttattttcggttgattgcagaaacacattcaacattgtcatatctgtaaatcagggaaaatttgctaccaagttttacaggttagtttggtgtttgaaaatcaacactcctttccaatgttatttatttgtttttaagcataattcttgatagtcatatgaattgttgttacatgtacaaccttaatcaaaatgaatttttcctaatgtccaggagagaagtgttccggatgacaagttttcctttaacatatacctgtcttatttgctatatgcacctctctatctcactgggccaattataaatttcaatgcatttgcttcacaggttagtagtctttttttgtgctgtttatacttgatcctgtttctttgtttcaaggttgtgaaaatattcatatgatggcagtgttggtaattccttttttaggtagaaataggttctttgtctcctctctgttgaaagcaaacttttgatgttttaggatacaaaattcgatattttgatttctacaggacctttctttcacctaaacatttaaactaatattgttgtggacatcctaaatgaaaattcaatactttagtatgtgtgattgagtgcttccactgcaagtaaacatatgcactcttaactgtttatttattaattttttaaacaaaaccttacacttgcatttttttttttttgctattacagtaggttgcgctgctaaaaaagaaaccttaaacttgtattaacaatatagaaataatacaaggaaaagtgagtgaaagacacccacctaaacagcatatgcactcaactagatttatatacaaggatcatcaacaagattaaatattcctaatgcttaatttggtttcgttttttaatcttaccttgatttctcttttgctatattctttcagctagatgtgcctcaaaatcatttttcagtcagaaatgtggcttggtatggtgttcgttgggtcttcagtctactcctgatggaagtaatgacccatctattttattacaatgcgttcgcaatcaggtgaatctcgtatatgttgaatggtgtactgtattttaaattttgcattgtacaaagttttttaatctagtaaacatgttgcccttctttacttaacagcggtgcatggagacatctatctcctcttgatgtgtttattgtcggatatggggtaagaggtgatcactgagaaagtattatagccaaatttaaagtatttcaattgttttatataaataatatatatatatttttttttatttttttttttttattttggggtgtgcaggtattaaacttcatgtggctaaagttcttcctgatttggcgctactttcgattttggtctctggtatgtcaatttaaagtgcaatttacatcccttccttagttgtggccttctaacttgagctacttatttgaaaatttctgatgctctataatttgttcatggcaagtcttagcttttaatattgatttttgaaaacaccaaaagacaatgatgacgagtttcccatgttgcagatatgtgggattgaggcccctgagaacatgccaaggtgcatcaataattgccataatttggaaagcttttggaaaaactggcatgcttccttcaacaaatggcttgtgaggtaaagctttcaactcttgtgtcttttacctggacaactgcttcttttcatgacttattcttttcaataaataaaaataataccaggtacatctatattcctcttgggggatcacagaggaaactactcatcgtttgggtcattttcacattcgtcgcaatatggcatgatctagagtggtacttatatccttcatattgttttttcttattgataattacttgcaaacatagaagcagacaacctgtccaactcacaccttactgaactgctattgttgcctgttattaggaagctcctctcatgggcatggttgacatgtttgttctttattccagaattgttatttaaatcagcagcaaatgcatttcaggtaacccgtactttctttttcatttatatgtatatcattttggatgcaaaaacatctaaggtcaaacctttccaagtgccaacagctacctaaaagccctgttttttataaatctatttgtgaaggcttgaaggaagggactgaaacgaattgtcaattttttccaatgtactaattttatggacattgactaatgataacaatttttgaatttttaatttattaaagattctggtggtgttggttggaagttgtttatgctaaatgcatgacattttggaagttgggctgttcatttgtctatgtaaaccagaattcaactgtataaaatttatggttcaacctagatatagtttaacttctctattgtattgaagaatcatacaaacactctttttttttctattggaagagatagatcatgtatttaaatagtaattggtgctgattaatctatttcataatgttatccatttctcttctttgatactttctttcttcatgttgttttatctttatgcatacaaatacatacacacatctatatataaatagttattattcttgcttatcaaatctttcaggcaacaaatgcttttagggtttttgttctccgtgaacttcgtgcagttgctggtgccgttacaatcacttgtctcatggttagtgcagtatattcttaaggctaaaacacttgccagattcaagtcttgttattcactaattcactatgcatttccttgatatttatcagtaaggtagttttgcatgaagtagttttctttgttttcttctcttacgagtacatagaatttccgctttcattttatgattttggggatatttctgcaaaaaaaaaaaaaaaaaaaaatcttgtgctatgcaaaaaaagctcccccagagaagttttgttcctaatcattaatagaatttaaatgttgttaacatactcttgtttgcttttttacttccaagtaagttgaacttttctgcatggtccttgaatagtaatgataattataacaataataaaactgcaaatttatatgtaaatgctgtgagatgcatgctttgagttgatttgcttaaaagttacttcgatatgaaatattgacagaaatggaactttgtagtttgtacagcacttacatgcttatgcttttgccttgctgtcatttatatggtatctcttgctgagtactttaccaggtgtaagcttttaatcaattttattcacagaagcattcatatatcattttcatccgttttttaatctttgataaaggtcttcttctgcaatattgaattgctgccgaaatttgaattgtttagtgaatagttatggcctggactggaatgattttatttgttttgaggtataagaaaatcttatgacaaaacaaatcttatgttgaactagtactcaatgctgtggttatgcaggttgcaaaccttgttggttttgttattggagcatcgggcattaactggttgacttcacgatttctcgagaaagatggtatgtcataaccatacattttttttttctggtgtggcgagttcatgtataaaatgtaatgactgagctgaaccaatattcttttgtgcagggttacctgttctggctggaatgttcgtatcattttacgttggaaccaaggtgattagtttttcattttttccccctaatcgccattacgagtctttgtcatggagctttctcatgctttatggctattattatttgtatcaatgtgctgaagtttggtattttgcagcttatgttccatgtccaagatttcaagcaaagtaggcactgaattagttggtctatgaaaggttcatttcattacatatctctttttacttgaatgatgatttgctccaaatccgggataggtgtcttctaaagaataatttattccttcaaaagaaaagacctgactttactgggcaagattttcctgagaaatgcttttgtcctacttggcatcaaaatcatgcatacagtcgtcctgtagagggagatccaaatacaacactttactagagctctgcttcttcatctttatttagtctcatatcttaatatttcattataatgttgccagtaggattttgcaattgttagatctttcagtgggtattgatttactactcacaccagtaataggtaagtaagttttttgaaatattaaaataaaaatgaaaataggattcagttattacttatcagctgccattattcctagtgagtcatttttatctttcttgcctaatgctgaacattatgcatggcttactgtaattgactattttgaaaggattatattgcataggactattactaaattc

SEQ ID NO: 27676 - DNA, 9661 bp, Cannabis sativa
gtaaaataatttccaacatcttttaccaggaaccttttgtgcctcaacagctttaagtctggacaacacttttagttacgaagtggccttcaacgacccataaaaataggagtcaacttcaattatttacctattcttgaggactaattaacatgttattttcttattattttactgtgtaaacaataggtgatatctcttcattttgagtgatatcaacctactatttcttgtaaactctcctatataaagagcacaaaactaaacgtaaattctctacgtcttaagttctaagttctaagtgctaagttctcactcctaggctcttaagtccatgctccccaaaccctagctctctcttctacactccacttgtagtgtaccctatccatggggtacatccggcaaccattgacaatcaaagagaatcccatgaaaagaatgctaatggcataattcgtagtaattaacgtgccatcgaccttcaacgaaatgataggtcgaccatccctgtatgacctaaaggcggtaacatccatctaccacctatgcctaatgttcccaacaaggcatggggtaggatgtttgaagggagaccaatagtctgcccatcactgttacaacttggctttgtctaaatccaagaaagagaagatgaccgccaagagctctgacgaagagcccgacaaagggcaatgaagtccagcccaaagcaaggaggcagacatagatcgtcactttggggatactgtagatagctttgcacctgtggaagaactagaagaagtggagattaatcccactcttccagccataaaattgaagattggtaaaggtttagcgccaaaaataaaataaatcttgataaaatttataagagaaaaccttaacctctttgcatggtcacatggagacattgtcagaatagatccttctgtgatgacccatgcactaaacattgatctaaaattctaactagtgaaataaaaaaggaggttgtttgataaagagtgcgcccaagctttgaaagacgacgtcgaaaggctgagcaccaatgacttcatcactgaagcattctatccactttgggtatccaacctcgtgttggtacttaaaccaaacaacaagtggagggtatgcatagatttcaccaccttgaataaagaatttcaaaggactgcttcctgcttccaagaatcgaccagttggtagatgctacagctggccatgagatcctaagcttcatgaatgcctattcaagttacaaccaaatcaagatgcatccaccagatcaataacacacaaactttatgacagatttaggcctgtactggtacaaggttatgctctttaggctaaaaaacgtaggggccacctataagagacatgtgaacaaaatgctaaaagatcgcattggatgcaatacggaggtgtaggtggacgcaagtccaaaaaggctgtggagcatgttgaggatctagatgaatgctttaagatcctacgcgagtataacatgaaactcaaccccctcaaatgttcattcaaactaggctcgagaaaattcctgggcttcatagtcaatgacaggggaattgaatcaaatctaaacaagatcaaatcctttttggatatgaagtcgcccacaacaatcaaagaagtacaaagcctgatgggtcgtattgctgcactaagcaaatttgtgtccaaatccacggatagatatttgcctttctttaacatactcagaggaaacaaaaaatttgagtggacatgggagagtgaaaaagcattccaagagctgaaaaaacaattagctcaacctcgtgtcctatcaaaacctctggacaataaagaattgggtgtgtacctggcaatcacagaacatgttgtgatgcaatcttgataagagaagaagacagtatacaacatccagtatactacatctacaaaagactggtcgacactgaaagtcgatacccactcatggagaagctaacatgcagcttactcttagcatcaaaaaagttaaggtcgtacttcaaagctcatttgataagggtttacaataaccagccattgcaacaggttttaacgtgaagcatctgggcgactactcatgtgggccattgaactcgaccaattatagatcacatatcaaccaagagtggccataaaaggccaagctctagctgacttcatggctgaatgtataaacatatctcttgaaatatcttaagattttggagaaaagcatgagccagagaagaagcgaaagagcagcaacaaaaacctgaagaattaacatggaaattacatgttgattgaagttgcactgatcaactatctggtgcagtcattggcctcattaaacttgggagaaatagctgcatggggcaatcaagtttggcttcaaagcctataacaacgaggcgtaatatgaagccctaattgctggtctcaagctggtgcatgaagtacaggctgaccacttggacatatacaacgactctcagttagtcataaatcaagtcctaagggaatacacaactcacagtgaaagaatgattgcctatttgagcaacatccaagacttgctaagtcagctcaaaggctatacaataaggcagatccctagagaagagaaggcaacagccgatgcacttgcccatttagcaagcaataccatttccgacaaggcaaatttggtgcctatatagttcataaaagaacgaagcattactatcccagaagaggttgacatgttggatgacagtccaatcttgatgacacctattgcagcttaccttcaaactgaagccttgccaaaaaaaataaggaaaaaatgataagaagaaaaattgctaggtatctaatcctacatggagtaatgtccaaacaaggcttctcaatgccactcctatggtgtgtccctaagactgaaactgagtggttattaatagaagttcatgaaggcttctacagaaatcatgccaaggggtaaagcctatccaaaaagatattttgatgagggttcttttagctaacaatgatcgaggattcgttgtgtctaaagattctcaaagatcccaagagctctacctaacgatctcacattgatgtagtctccttgccccttttccatctggggaatagacctcattggtcactcccaaagggtaaaataggtgtgtagtatgttatagtcgcagttgactactttaccaagaggacaaaagtagaacccccgacttcaataacttccaaaaacgtccccgactttgttgtcaagaacatcatatttttgtttggactgccacagaagattgtgttagacaacgagaagcaatttgacagtggcatgttcactgacttctacaatagaatcgacatcatcaaaagcttccctattgttgctcatcctaaaatgaatgggtaggtagaagttttgaataagacactaaaagaaactttgaaaaagcatctagaagaagcaaaagacaatttccaaaaattgctcccaaaggtactctggtcgcacaggaccaccgagaagacaaccactaggcagactccatttatttaagcttgtggctatgaagcgatgttgcttgcagagctggtgccaccgtcttataggaggatgacttatgaccaagaagaaaacagtactttactagcggaattccttaacaaaatagaagaaagaagagaccaagtcaatctaaagttgtaggcctaccagcaaaaggttgcaaggcccttcaacaaataggtcaatgaaaataaattcttcataggagacttagtactccaaagtgtattcataaatactaaagatcctgtggtaggagtgttcggacctaactaggaaggcctttaccaagttacaaaaataacaagtaagggtgcctagaagcttggcaagtataatgagaacaaggagttagttctccgaccaaggtattggaatggagagcacctccaaaagtactaccagtggtagtggtagttctattaactcatttataagagttagttttgaaagagctaagtcttcatcactcttcagtgatggactctatttggcatgtcgggtagggatagccactggacttcttgaagcagactttttattttgtaagcctgtagaatcaataaatgtacctttcacaacaataaaaaatattaaagaccaattgatgaataaaaacggtgtttcagttcaaaaatattgtgtctaaaccacttgctaacaagataacttcttaaagttattatttagttttagttccacatgagtacaactggtagccctcaaagaaaattcatagggaaggtctataaaacttggtgagttgcaagtgaccaagagaccgcaagtctgcttactcacttggggggaacccacacaatacaagcatcgaactagcacagtaaacttatgcagagaaatttaaagcttagtatatgcaaaaagttgaaagctaagtcaatgcaggcatacttcgctaaaaataaaaaagtaaatctggatatgtacatgtctaagcataagaagaaagcaaggattaaagaccgcctggtcggtcatatgtccatagtaaagggctttagtgctaaacataagtagtgttcgaaaatagagggcctatttgctaaaacaaaaacatgaaagccttagggctgaatataagtaatgttcaaatgtaaaaggccaacaggccatatgtaaacatgaaaataatatgaaataaaagcataaataagatactaatgaaaaatgtctactcgtgtgaaaatgcaaggggagtcgagctatgagctgcaacattcagatcaccaagaagttggccagccattagatcagcagtctggccagcgatgagattagcaatctggccaaccacttcctccatgggctggctagccatagctttgccaagttggcgagatggcagtccctcaggtaggacaacagtttggcctgccccctagctgacctggtctactcgcatcctgctttcgtagatctccttcccttgagcgagtgatctcccacggaaaggagaccctatgtagaagaggttgacattggggttatgcaaataaacatataagagcttggaggacaagcccaaatactcatctttgatggcttgttatccatcaagggcaagttgctttgccaggcactcgttctcaagctctatctctaacctagaggctttagcaacaagattggtcacttcttggttcctaataccaagtaagcattcaggccattgttcaaatcttgggtattttttaggaaaatctaaaactagacatgtgcgtccctctccgtctgaagcttggtctgcatggcctttagcttctctcggtgagatccaaaagagccattggctttaccatgagtaaaggctgaacttcagcatggcctgaaatcaaaataaaagccaagttaaaattagaagaagaattggctagccagcccctgggtggttccctttcggtcggccaacttctcatttatacaacccttaccgaccagcctcctagtggtgcacatcttgccagccagcccctctcaatgcaaaagttttagtaaaatcaaatatgaaatttacaaatgtttagtcttaaaggctgctagacgttaaacacactagctcctcgtcctcaagctcctgaagctccccattaaggataggcagagtcctaccaatatagcttcgggcagcctaagcaatcctttgttcagtggatgaacaggtcccccgactagacttctaaggccccttgctcgaatactttcttgagggttaacctaaataaaatccatttcaatattattttatttactctctataaaagattagaaatcatttaagtttacatgtagtttacatgatcctttttaatatataacttcaattaaatcctgaatgtatagttatttacagttacagtgatgttatcacagtagaatgtcctttcctggccattaaaaaagtatactagtatcagatgtatttgctatacatcggactggaccaattttgtcagtggaaaagatatcataaatcgactataatatctttctaagtcaatgtcacttagttgatcatagatcaaaagatcttaatccttaaatgattacgttcttacttaaatatattacttatattcttttacttgttcgttatagttgaccatttggatcggcgcaatacttacaaattaagaacatggtagtgcacttaagtaggagcgctaatcatatgtatatgaaatctatagcttctataattttgaagtgaaatgatgatttccttagagcttgtagctaacagacataaatggaagagttcttatttcagtaattatattagtttattaaaatatcatttataagaagcttagtgttttaataataaaatacattgaaggaaaaaacggtaaatttatccttactcgatgtaaatcatctatagaggatctttgattattttgattaaaataacagataatttatagcgtatctattcttggtgaatatagcgttctatgtaatcaggagtgcgatttcgaatctatagtggagtcaatacgaattaattagatatagaatttacttgttgggtgcttggttacaaatgcccatggtcaccacactaattgggatactgttgttttgtagtatcaattaattgatttatttaatcgaataggattctaaattaatgactataccttatttgtgaattttaccaaggaagggcataattgagagaaaagagaatttaaggtttatttattaattaagagaccttggaaggtctaattaataaatatatttaaatagtaattttatttgatagttaattataatttttaaagagataagattagtatttaaataactagaatagcaaaatagcaatacttaagaaagataaatttgcttcatcaagaagcaaaatattggaaaaaatctaactcatgggccatatagggatttcgacaatggaggattattttaagccattggatcttttaaatcgactcatttagttctaaccctaaatttaatgaatccctataaatagaacatgatggcctttgattgaaataagtcattttagagtctctcttgtctgacaaactgaatcaaaagaaaacttattaatttgtatctatattttcaaaattctcttgagttttcttcacaaaaatttatgctccttggtgttgagtaatttccgacacattttaaagtaatactcaacatagtgaggaagattgtgtagttcagattgtcagctgaaggagaattcaagttcagatcttgatcatgctctgcaacagtaagaatcaaggattagagatctgaacagaaggattcacattattccactactgtcaatgtaaagttttctataatttttatttgttcaattcattgttttagacaatttatatttaggatgttagagtataaaattataatccaacatacttgttagtaaatctagatcctagtaaaagattcccaacaactggccttagagccatggttatgatttattttcatgaaatatggatttaaaataatttttgatttatttagatgtgttcatgatggtttatgtgagtttgacgattgattgtattattacaaatttttttatgcaaaataattttatttttgatctgtaattattttatttagaaagttggtcaaaaaataagaaaattagctttttacaaaactaaatttggtctaaaattgacaaagatatgatttttttttttgaaaatttagaatttggctactacttatgctagggctgaaaccctagcacgcgtacgtggatgggacatgaggccacatctcgttggctgatgcttggacaaacacgccatttagacaaggcgtgtttaagaaatgccctccatgatccctgccagcagccccaagcctcagtctagcttcccctttgtgcgtgcggatagtatgcattgtatattgtccaattttgccatttttttttcaagttttaaaaataattttaaaaggaaataaaattcgaattttggtagatttttatgttgattcttattttcaaaattttaaacctaattattaaattaaaattaattttattattaattaagaataattttagatattaggagactttaaatttgaaaattattttttttctaaaattttctattatggttattttcaaaatttgattattaattattttatttttattttaattataaggtcaaatatttacatattgtatttatttaattaatgtatatttgaagtgatcttatttgacattaaaataataagaaaatttaaaaaaaaaaaaaaaatctagattttttttttaaaaaaaaattaaaccatatgagctttcaaaatttggttattttaatatattttattaatttaaattataaaattagactaatgttaattatttgttattttattagatatttattttattaatatatattttttaaatgagtaggtgaactacattttgtaattcattacaatgtataagtgtaatagttattacattaattattgattatagactcaatacaataacactcttttataaaagtaatataatattttaaaaaaagtttaataaaaaaaagtcaaaaatctatattacattttcattagaatattttgtaagtataaaaataaagggaataaggatattttcatcttgcattccattattacattttcacaccaaatcaaataaaataattttgataacaacctttatctcaacgacaagcaaaacattataatatgtttttattattatttttattttattacatcattattactattccattacactaagagctggtcctaagaatatatgtgcctaagaagaattatatttttgagccctcatataaaaaaaaaaaattatctcatatactattttttaactttttttattattttttttttcaaatttacggtttgagcttttgaggtagttctacggtggtttctatgtgggttgctataccgattttagttgcgatgtaagttgctctaatagttgctataggaatttctatttggaatttcgtaaaaatacaaaaaaaaaaaatgatttaaagtgtaaaaataaaaaagtctctaaaatattattaaaaataagggtcatgaaatttgaacccaaaacattaggtaatatattatacaacctaaccaactaagctataaatatttattttttataatacatttaattttacaaaaataaatgcctaataaaaaaacttatttattattttggagccccgaaatgtgtgactaagcacgggcctagcccgcctacgcctaaggccggccctgattagagtgaaccaaacaccacgttataaatagggattattgcaaaaatacacaaaaacaacaacaaaattacaaaaatatagtttcacggaattttaaatatttttacgatttttttttacagaaattacaatctttttatatgttgtgctcttattaatttgttgttgtttttttgttatctatatgttattttttgttgttgttttgatgttatttattagatgttattttcatgttact

SEQ ID NO: 27677 - DNA, 3201 bp, Cannabis sativa
aatgaagaacacacaaaattgtgatttggtatcctttgaaaaactttgtatagcatcaacatatcatacaatttcaatatactacattttttatttccttttgttagttgtagaataattgtaattacttagtttcctatttctttcttagtttccaattaagtctctctagggttgtatataaatgcttgctattctattgaataatatacaatttcatccaccattttttacatgatatcagagtaatactcaatctgggtatttctatgatccttgtaaataatacctcgtccaggtgctcctttcaagtaacacaaaagctgctctaatgttgcctaatgataaattcttagagatgatataaactgactaacactaactgaaaatcaatgtctagatgaattacagttagataattcaacttttcaactaagctgcgataattctcaagatcttcaaatggtttcccatcacttgattgatggctcaatatctcttttttgttctcgacttgttgtctcaatttgtttgctcatttatcggatttgttggttagtttgttgtttgagttagtttggtgggacaaacattatatttgtaatggcttctggaaaatcaattcttgtttttgcagttgaatatgccatatttttacagtatcaggagcctcataagcattcatcttcttttatcactactattgttgattcaggtaacctaaattcgtgtcttctttcctcgtcttccaaatgactagattctggtgctgcaaactatatgatatatagttaatattagcttattttctaatcttcgacctcacgcttccatttctactgttaccttagctgatgggtcaccatctcgtgttcttgggtttggtacaattactcctattccaatgcttcctttgtcgtccgtcttacatgtacctaatttttcttttaatttcatctatgtcaatcaacttacttgtgatcttaactgttgtatctctttttttcctgataattacttatttcaggatcttatgatgaaacaaattattgataaaggacatgagtcgcatgaatatggaggcctctacatttttgatacaccaatacctaaatcagttgcttgttctagtgtacaatctccattcaaggcaccttgtaggttgggtcacctatcattcctctgcttataaagatttgtccacaatatagtaagttgtcttcgttagattgtgaatcatgccagtttgctaaacatcaccgccttagttcaagtccttgaatcaataaatgtgctagtgttccttttgaattagtctattttgatgtttggagtcctatcatttttaaacttggtttagctattttgttacttttgtggatgattattctcaagtcactttgttgtttttgatgaaaaatcgttcttaatttttctctattttttgtaccttttgtgttgaaattcaaaataaatttaatgtgtctattcgtactttgtgaagtgataatgccaaagagtacaaatctagtttatttcaatcttatatggttccaatatagatagaatatcaactttaggttgttgtatctttgttgggggcagtttgatctcttacaagagtaagaagcaaaatgttgtgtctaaatctagtgcagaatcagaatatagcacagtctatgtgtgagatagtgtggatttatcaacttttgactgaagtcgagcttaagacttccagcaaaattgtagtgtgataatcaagttgcccttcatattgcctcaaatcccatgttctatgagcgaactaagcacattgaaatattgtcattttgctcatgagaaagttcaacaaagcctgatttccacaaaatatgtgaagactgaagaacaattaggagatattttcacaaaaggctttgaatggggtgcaggttgattatctttgtaacaaactttatgctctgacttgagggagagtgtaagaatttacatcagtagtagaaattaagaataattgtaattacttagtttcctatttctttcctagtttcctattaagtctctctaagtttgtatataaatgtttactattctattgaataatatataatttcattcactattttctacaccgacaaattaaacatcctaaaagtatcacaaagacagccccatgattcaaaagctgctaataagacttagagtcaactttttgaaaagagcaatccctcatgattcaaaagctgctaataagacttagagtcaatgaacaattgaccaattaggctaagcctttgtaggcaaagaattagggacaaagtaaatttcaaaagatcataggacaatagaaaaaaatcaaacttcttttatttctttgttatatcatttaaaagtaagcacaagtacattctgtacttttgtgcgtgtaagctaagtctgctcatagcagagttggacttggctatatctattttgccaagcttttagcatgtaaatgctctaataatcctatgaggatagaaatgtgttgaaagagagaagcaaaattctatactaagcatcatatcatgtgacttctggtttacatacctcgtctcttttaaaagcttttgcgtttggacaacatgagtgattcaaacaactctgcaagggaaagaacgcactgcctgtaacaaaattggaggtattacattctgctcataacagactgcatttatgaaaagttaaatactatgatcaaatatccatgatttttacacaagaataaagatttaagccgagtgataactcactatgcataaaatattcaagtgccgcaaaagaagaaaatggacaaaaagaactaaagattactactagacatataatgaaataaagcaacagcaatgtaccctcgcaagaaactgaatagtcatcaccaagagcttcgaagataagtcgtgtcatttcttcagtttccttctgccagtaagtggtatcaggggaagggcattagtaaacttccaatctaacaaaaactggttaaactttcaggatgaataatgacattgtatcttaccttttcagaagatggaagatcattgatgtacagaaaataatcctcaactggagatgctacaaccaaatcactgagatgtacaagtataagacaattctccataacttaaaaagagtaatatgcatttatcaaaattcaccacc

SEQ ID NO: 27678 - DNA, 1533 bp, Cannabis sativa
aaaaaaaaaaaaagtaaaatgtaaaacaaaaaaaaaaagtgttgtatgtaattattattctgtttggttacggtagcaagtgttatagtgatgggtcggttggtacacgttggtagcccaagtgggttgggccaacaagtggggcccaagaaagccacaaatgggccaagtggtcccatcccattcactttgaaacaaccaaactcagattatatgactgatttggttcttattttggttgaggtttttatggtgatgattttgacacctttctagggaccattaataattataccaaaatcatatacaatttctcttcttcaattctcctccatcaacttttgaccaattatgtttgttatttagtatattcactaatcataaaatatgcacaaaattaatatattcaatgataaaatagtaaggttttttttttatgatattaaatttttattgcctagttcttttgaagtatctctagataataaattttataaatgaaaaaaaattcattgttattacatacctttgttattttaatctgttccggtttctcttaaaaaataattaatatttttttgagtgaatcatatctaataatgagattcgcagttggaaaaagtaatcatttattatatgatgtattttggtacaaattttgtgtacattatatatttttaaattattataaagtaattttataatgcattcctaaagaatttctttcatacgagtgtatgtattatatttatttaaaatactttgtaaagttttgataaactctaataatttataatacaaaaagtaatgtttaaatattaaactatttaaatatttttttcaacatgttaaattattttaaattttaaaaaatttgtacgatcgatgtcttatatagttacaatacacattatcgaaaaaaaaaaaataagattaaaactatctagatatcgaaaacacgaaaaatatacatggaaacatatatttttaagaggtgtaccataaaatttggactaatatattagaccttacaaccaaacaaacgtgtagagaaacataatgtgttatttgatcatttcatatcaaataattaaaggtcccaaaaagagattgcgttttggcattttattatttctgtttaaaaatttaagagtgtctacctaatttgaagtgattaattgcctaaagaaaaggaacgatcaaataattgtggaaaataaagttatttttctatgatatcaagtttctatcaacagagctttcgatttatttaatgcatgccctagtctaattaataatttgattaattgttaactgtcatccacagccagcttattttgactaaattaatccattacaaaaaacaaaaaaaaaaaaaaatcttatatttattcaaaataaaatttaaaattaaaaaagtaaaataattataactaattataaattattattatttttatgttgtgactaaaaaaattgtaactaaaaatactagtcataaaagttatgatttgttgtaataaaatgtaggct

SEQ ID NO: 27679 - DNA, 7283 bp, Cannabis sativa
gaaggctactcctcccattgccaattgcttttgagatgaacctcattcatcttatttccaaattctaacaatatatgtaccatcactaaagaataaatagagaaacatctagtattgtctttggggaactagttaagtttaggtgcatgaaaatagttggatagaggatgagtttgtatcaattggtctcttgtgcttctcatagttataactgttgcgatgttggacaatttttggtcttttttttttttttgaataaatatgattcaataataaaagggtctaaatcaactaaaatcaaacaaacaactgaatcgggataactcggccaccaaacatgctcagaaccagagaaaagaattaacttagcaagtctatgagctgcctcattggtctccctatgactaaataaaaactgaacattacacatccaaacaatgtcagaaactacaatgccaccaaatgaagttatgataaaatttaatgtcgatgcagcgattgatgccctaaacatagaagtgggaatggaggtttactcgtaaatgtgatgggatttgtttgaactcttcagactcctttctcttctacaacgaggccctatgctgcaggagcactagggtgcttcaaggtattcttctttgcttgtgtctgtggttgtggaaactgattgtttgcggatgtgttaatttatgtagaacttcccatactatctcattcactcattgtaacaaagttgcccacacaccattgcacattttcttagccaacctttgacaatgaaacaagcaaaagtctagtggcatgagtaattgctcatattttgtacctttttgactattgcctatcaatgaagatcagttattttttagcaaaaggagtactatttttgtaaatcgttaaaaaatttcaaataatttacagtgtcgaaaacaaatttaaattcttttaaacacatttagtaaattaaaatatcagcaacttaattttttttaaaaaaatatatatttcatgttttggaaatgaattaaataacaaattatattaaagcatattgagaaaaagaaaaattgagaaaagagtaaagaatagttgaatttccacaaattacattattaaggcatttctaccaggaatatacctccaaaaagtccataacgtttttggcagttcccatttatctctaaagacattttcataaactaaattgaagattatttattaatttatttaattaaaagaaagatagtgactagtgagatggaaagcaagagtaaagacaaagaaaaaatcatgcagcatagcataccttgaagatgttatttgaaatttatcttttactatcatcaatttcaaaaacaaaaatacattaagtgcatctatattctatacacaaacttcataatgaccatttatgtagtaacactcatttaagatatgacatgcccttttaaccatttatatgatcatatgctaaatatcttcaattaggacagcaatgaacttcatataagaataaatggacctacacatctagattgttcatatcaataaaggacccaaaaaaaaataataataaaataaatttcttgatactgtgtaagggtcagagtcagcatcaactaagctcaagtcaaatttattcacaaagtccagctaggtaaaacactattctatggtctatgattgaaactgtaccttcatttattaaggcatgcagcttttttctactgccacaatttggctcccacccaacaaaaagaaaaacaaagaaacacactataaattgttgcaccatgcccccatcagatcaaaccccatctccttcaattcataactcctaaaacaaaacttgaaaaaacattaaaaaaattacaaccccccaagtgggaaccactcttgttaggatctatttacagccatatatgtttctcatgtcatatgtggtacaaaattcacatacgtggcaaactctcagctgtccaagtacaactgctgcaatttttggaccattgttcatcatctcactcattcatttttccctttttattttgtacatctctctctctctgactaggctagaaattcagtgtcttgttgttggtagtggtgggggagagcaccttatcaagctgagctggtcttcatcaataaagtctcaacatgtagctaaaggcctaaaactcttcttttacttattttatatatttaatctttcctagacaaaattgttgccaaacaagaccataaacttgattgaatgataccaactaggactgtccttttttatcaggaatttaatcatgatgtaaagttctgccatggcataatgaatctgagttgcctaaatgaggtgggatgtttgagatgccttgccttgagagctcatatagtacactatcagttgaaggaggtttgagccccaaaggaagaggtagccatggcttgcttattgcttccttcacaaccttgtcaattacctcttctgcctgaaataacagaagaatacatgctaagaggaaaataaaaattatgggactatcacatctttgggattatcttatgatcaagtcaaactttcatttctacattatcaggaaagtggggcaatgactaaacatttccacgcgcatgatgtgtaagtcaagtcactaatgtcaaacatggatctttcaaagagtagttttcagaattagatgttaatttattggatgtaacataaaacagttttagtgcggcttagttgtggccatgctgcaaaattctcatgtgtaattcttaccattgttgccaattcatgtctagattttacattcttgtggaatgaaaatagtgtattgagtgctttaatatccaatagcaaccgaaaaaaaaaagacttttcttttcatgaacaatgaggataaagctctaatgttaccggttgaacgtcgaaagtgttctgtggcatgctgcatacattattgactgcacccgtgttgtggaaacctgatacattctgcgaatttaaaaagatggcgaaagaaatgttagtagaatgatgcatgaatgccattaagaaatgacacagcaaatatattaacaatatttgattggtataccacttgaggagcatatgaggcatatggactgtgaggaggtggtggcattaccgggcaaccccatgcatcagcatgcatctgaatttcacattatacaaattcacactttagattccctattactatttttcataagcttttaacactatggtcaaataagcatgttcgaaaggagaccatatgcacaacggttctaataaggtagaaaattaaaattcttaccccagggaaagatttccactgccaactttccgcagattgccatggagtatgataagcaggagatccccacatatggacactggcaggatggtttcccggttgcccccacatagaatagactggtgctactggcacggcatggttagaatgatatgaaggataggccatgataggttgatgcggataataattcttttgcaccggatctcttggtcttggccatcttcggtcttcttccttgggtaaaatgtgcctcttatgcattcgatatttctaaatgaagaataaagcatattgttaagtctacatgaagaatagatccccaagtctcatgggttgcatagataatggtgttttgtttgttcagtgtcaaaaaacaattttggcatagcttccatgagtttctcactagcagacaacaaccaaataccaaaggctaatttttaatgtacataatcttatgagtacaattctctaacttagatattaatcattgggaataaagggaaacaaacaccaacctggaggtggctagctacattgtgcctcgtcaagccttcaactttcataagttcgagtattcgagaaggaatggcttgatccacccctagctgctccactgcatgaacaaatttcttgtggagctcagatgtccagtctacctgaaaccgaaaattagattcacaaaatgaaataaaactatgatgagttttttaccctctttttcgatactaaatccaatacaacctacaacttcttacaattttatcttaccttcatcttcttcctatttgattttgacatagaagaattagtcaaagcagaagctttgcttggttggttagcaccaccaatcacattgttgggactatcatcattatgtagttgagggaacataacattgttggaattatcatcattatgaagatgaggagatataacattgttgggacaatcaacattatgtaagtgaggagatatagcattgttgggactatcatcattatgtaagtgaggagacatgtgactctcactctcattcttggaaccatcaacagaatcctcctcctccttgacaatagacttagcctgcatctcaggctcgccaattaagagagtatcttcttcagcaactgagtcgccatatgtagtttcgacagatttagattcaccatcctgctccccgttctctttctcagttgagcaattagtttgatcttggcagtctccatcatcaagtaaccgtgctccttgctttagctgtggggttgaaggagccggatacttatcacttcctgctgattgctcgtgattattttccttattcccagacaaattttctacttcaattgagattgtagtatttggttcttccttttcaagcttaagatgcagcattgatgctatcgattctttgacgggcttgagcggctcagggggagtaccacctcctgcattaaatgcctgctcatatcattaacagaatcagaaatatgaagtttgcaggatttaacaacacttccaaaaaagaaatatataaatgaaaaagggcacataatgttagcaatccacagaccttatgaacaacgtgctgccagatattcctaagcttgtcctcagagagcggttttggcaagaattcaactgcaccaagctgaaaatgaattatcagatatgaatgaactgttacaacaatggaaagtacagtatatatattcttttttcatgtgatatcatgacaaacttaagcaatttaaaccagaaaattatacgctataagatcgaattctggctaagattaattcaaaattaactaaacatcaatataaacatcaatagttttatgtacaacattagtagggagccaaatcagataacttactgctatgcacttcatcatggtgctcaagcaatgaacagtcgaagtcactgtaaaagaaaacaactttttcgttagaaactaaattgcttcatgagatgatttctttccccttacatgacttccatattcattcaaccaacaaattgaaattatgaagaactatagcaaatatataaaaaaaaacactattatatctgcaaaaaaatgattacattgtctatcttgtgaacttacttatgataggcaactccttcgcagtttcaagaaacttgaatgtctcattttcgttgctcgtattcacctgtaaccataatagatgaaacttagagcattatataactcatccatgttccatcaatgcttgtcatgcttttgttttaattgaatttcatcatcacctctactatagcaagatgaaaactttcgggtgtactcgaaaacgcagagatggcctcactctcattgcaaaatattgaaactgcaaaagttaataatggaaaagctatgaacagatgtaaccagttacaaacaaccaactttgataaaagacacaagaaaagaatatcaaacagtttaaattttcactgtttacattaaataaacttggatctagaaataattacatttaagatctaaagtacaaaaactaaataaataaacttatgtttttttgtattttaccccatcaaagaaaatgttcaaagcctggttactaattatcagaatcaacagcttaaagatataaaaggaaatgagatcaaaatgggttattaaaagcaacaaaagtaagcaatcactaccaccctttaaggtaaaaaaagaaacttttaatcaatacttgacaaaatggaccaaatggggaaatgaaagaaaaaaggggggtgggtttaaaagtagcttgtgatttaaagagctcatttaataatacagaaaataaactttatgaaaggtttaaggattagtaataagtaatgaagaaaaatgagtgaaactaaaaaaatttctggtttaggaaactaaacagctacagaaacataacaaacaaagaagttaagagctaagaatcactaaccaacataatccattgcctcaagatttgatcttatattggtagcagaagtggtgtcttgatcaaggacaagcaccctaagaccctttgggaaatctttccattcttccaagtcattagcagtgcaaaccatagctggtttggcatcgtttctcaggccctcttggagtagtttagcagatttttcctcttataaaacatccacttacttacttctgcatggtgactcaaaaaaaataataatatcacaaatcagacccatctttgcttgatctataataatcttgatctctctactattccaactaagaaaatatctataaataataaatcacagcaaaataaaatgaataaaaatactaaatggaaactgcacatgtatagtccataaaagatagaaatacagtctgatctgacaagtttgttgaatacccaagttccataaaaacagtaatttcaacatgtaaacaagtacagttatgaataataacttaataagaaccccagatgatcaaaaccaaaacttttgcacattagtaaaagtaatacgttagatataggaaaaaccagcttaaccatggttaaataaacacaaaaaccttagaagaaaggaaaatatatgaaaaacccaacaaggaaaagcagaaaaagagcttaaaaaaagattaaaaagcaacaagacttgcatgcagagaagataattagaaacaaccatattagacactaaacccaccaaataaaaacaagagaaagaaagaaaactcatcccagagactaagactacaccaccatatatcattaattacacaaacataatgcaccaaagaacaaaagtcatgatttttaccactctttaataagtgacttgaataaaaaacctctctttccaactttgttggctctaataagtagagaaataaggaagagagaagaagaagaagatcccctcagaccctcttattactccaacttctcatttggttatatgcaaaattaagagagagagagagag

SEQ ID NO: 27680 - DNA, 2601 bp, Cannabis sativa
  modified_base (717)..(720): a, c, t, g, unknown or other
actatgtcaacaaaaccttaaatctagacctaaacaagcattatgtatatcgagtacaagtcgtgatcatagtagtgcattgttgttattcttgaatttagtattatagtgagagcacatatctttctatagctaattatataaaagaccatctgaaccaaaatcggaaatcgacaaatttcttatctatagcttcaaaataacaaatgtaatttcaaaagcaacaagatgtacttaaattcttgatttttaaattagtactttatacatatacatactaagtggcattctgtaaagaaagatattaatacatatatagtatctgtaaaagccgacaatttatgcagcaaataataaaaacaatgtacgtacaataaaaaaattagctaaaaccagtgatacatatagtattaaaatcaaattaacagatgatgacacaaattcagtaaacagtactagttcaaaagaaataatataatgtatacatctattttaaaggatccttgaaaaatatagtttcctacacatatcaaatttgtaatcacgacataattagtaaatagtattaattttcgacagtacctattcatcacacacagcatctttagttgtcgtatatttctaacttttaaatgttaagtgatcatcgtgcctaatagtaattttattacatatatatttaaaaataagtgtaccactaatatatatatatatatnnnnattttttttttttttgatgaataccactaaatattttatttccgaattttgaataattaattattataggtggtctctaattgctggaagattgcctggacgtacggacaatgagataaagaactattggaactctcatctaaggagaaagctcataaacatgggcattgatcccaacaatcaccgcttaaaaacaactactaatactacttctcctcttctttccttcccactaaattgtgctaataataataatatgcgtactgccacaactacttcatctgccgccctccctaacattagccctaaaaatgaacgagttccggcaaaaccccacggcgaagatcattacgacatatcggacaccggaagttgcttattggaagataataatcaggactacttctctacatgttctgtttatcatcatcagcgattattgcctgatttaaacctagaccttacattgaacatgggttatactactactactattaataataataatatcaataatgatgatgaattacctaatactaatacaaatactaataataataataatggcaatcaagtgaggaaagattgcttcgaagtgctggactcatcatcagctccaacactccctctcttcatataatttaaagttaatatataatatgatcgaggcacacatgctatcatgtaataatgccaaatgtatatatagtactatactgtagctactatatatactatatttactataaccatttgaatgattgataaagcgaaaccatgtccatatacataaattaattatttatagcaaagatattttgcatgcatgatgatcttttatttttataaagcaactgcaacaagcctatccaaacagcgatcgtgtggtacaattaatatgtatagtacatttcagcatagcttatccatatgaactataatctaaattatattatgtattatttctttatgaaaaaaaaaatataatttaataagataaatctgttattactaaagaattcaaaaatggtggacaagtatccacccaaatataatctcctaaattagtaacagaagttgtcagtgtataggcaacaccattcgtcgaacgtgaaattaatggccctgcgagaactaccaccaacaacaactaataaggaatagatatttaataaaatagattgaaaactaaaatttatgtgaagcttatttatccaactaattttcactgtagaatcactattaataatagagatactgaaaccatattgattcgcaagagtcaggcccagacgaatagcaaacaactccgtcacattaatagagaaatcacccaacacaccagataaccacaccacccaaactacacctggagaaatcacccaacacaccagataaccacaccgcccctccccggtacaatcgaagcatcagtcgctagggaatcaagaggtggtggtatccatcgagtaggttgttttgcaactgggtttgtaaggcccaatccttgaaggccacgtctgtgaagactcggtttgaccgagtcaaaccgagtgtatatatatatataataaatcattaaataataatatatatatatatatgtatttaaaaaaaaatcaaaataaaaagaaaagtgtctctctttatctatctatctttctcttttttctctctcttcaaattacaaaaagaaaacccacaaactccataaccaccacactccggcgacccatctccggccatcgcccgacctcatgcgccggaccacttgaacctcctagtgccggggacctcaccccccaagcggcaccgcttctctcgccgctgttagcttaggatcgcaagtcaaagtttggggtttcaaactttgaacggatt

SEQ ID NO: 27681 - DNA, 5388 bp, Cannabis sativa
  modified_base (1144)..(1161): a, c, t, g, unknown or other
  modified_base (1855)..(1861): a, c, t, g, unknown or other
  modified_base (2666)..(2667): a, c, t, g, unknown or other
atatatatttaataattaattatacttactgttgactctagccaaccactaattaaaccaaaaaaaatatggaaatacatgcacattatgtataagtaaattatattatttataagtattacctaagtacacccagctcatagcacccccaaccttccaaccgtttctttacactatcttttaaaatacactatcttttaaaatagagatattgacagctaaactacttgaattttaaattttttaacacttaaccacaaaaattgagtttttggaggcaaaattacctaaactctcattctgttttgctctgtacccgattcatctaaaaatcacagctaatgtcacagtggactgtccacgtgtacacacttgtacacgtaacaaatttttagtggtctacgtaatattaattttaaaaaatagttataaatatttaaaaaaatcataaaaaaaataattttaaagatattttcttttggggatattgacggctaaaccactcgaactttaaattttttaacacttaaccacaaaaattaatattttgggggcaaaactacctaaacccctatttcgtttttaacacttttcctttttcttttcttcttcttcttaactaaaaaaaccctagcacccagtcgcctacacccaactttctccgactcccctctcacacactctctctcacggttcacaatgccggccttctctgaccaccccatgtcagacgggccacaaaactaaactctacgacctaacaaatactaaccccgatctgccctcttctctctctcctttgatctttctccgacccccttctgttttttttcgttcagtccgacccacctctggcgagaacctaggtgcttcggctccgacgaggtctttggtggtgagacgagacagagaaagagagggcctgagagggagggctgagagatcagggtttcagaaagtttaagaaagaaagaagaaagagagaaaaaaaaaaagtaagacaaaatatttttaatattatttttcgatttttgtggttaagtgtttaaaaatttaaagttcgggtggtttagccgtcaatatcccaaaaagaaaatatttttaaaattattgttgatgattttttaaatatttataattattnnnnnnnnnnnnnnnnnngtggaccactaaaaatttgccatgtgtacatgtggacattccactgtggcacttaactgtgatttttgggaggaggggtacagggcaaaaaaaaaatgagagtttaagtagttttgccttcaaaaaattaatttttgtggttaagtgttaaagaatttaaaattcagttggtttagccgtcaatatccctttaaaatattttactaataatcaatccaatttaattacaactaatcaatctaatcacaatcgatcgccaaaatattagatatcaaattaattgtgtttagatcagattttatgtttcttttaaatatccaatctgatcaatccaattcaattacaattgatcggtggatataatcacaatagaccgccaaaatattagatatcaaattagatttgatattagttttataaatatccaattagagcagatcgaatgtttgatgaagtgtccaaaaaagccaatgcatctaatatcaaattccaactaattagtatttttattcagttttaaatgaataattaaattttatattattatactcgtatatataaaaattaagattaaaattttacttttttttttggctaattaggatttttgcctcttaaattttgacatgtaccgaatcatacttcttgaactttttttatcgttaaaagtttccctgaactattaagattgttnnnnnnnaggacttttgtccaatttcattaaatttttctaattcagtaaatatttatgtattaaatcatactttgatattcatcaaattatgccactcaaactttaacatgtactaaatcatgccccctgaaaactttcatccatattagacttaccttactaaaattggacagaataccttaaatctaacaatctcaataatttagtacatgtcaaagtttgagaggcaaaaatcttaatcaaccttctttttttggattagatcatggatctaaaatattagaaggattcgatctaatccaaaaaatagtagatctaaaatattagataaatttgaacaaaatcaatagatataaatatatatataaatttatatatgaaatatgtacaataaataaaactaatccaatcctcaatcgaattgatgattaaaattaattggatcaaatcggatgatataatctaatatctaatatataattggatcatatcttaataaacttaaaaatattaaatgttgtcttataaacatacctaattttacctcatacatttatattacactatatatcagctactatttttatatttttctctatattatttaaataatatatttataataataataataaataaaaaaggggaattatctcatatactgtttttttaacctttttttttttagtttacggtttgggtttttcaagtggttgcagctctagttgcaatatgagtttctatacgattttttgttgcgatttaggttgcagcgcgagtaacaatagggatttctatgtagaattctgtnnaaatgcaaaaaaaaaaaaactattttaatgtgtaaaaatgaaaaaaacctctaaaaaattattagatatatatatatatatatatatatatttgcctaaaataatagtaataagtctttgtaaattatatcattaggttaccacatgccagtaagaaaatatcgatatttttaaacaccaattagattaaaaaaaatattaaattaattttacacaatctatctcaagatcatggaggaacatacataattaatcacccagttttttttttttttaaaaaaaaacaacaattattataaatataatataaataataacaaaattattttcgttagcttcaaaagcataaaggacaactgctctcgtcttttaatattttgctaagtatgtactcccatttatattaggaaaaaagtttttttaccctgcaaattattgtatttgtagatttttattctctaaattattttctttagtaaaaatatcctccaaattataatgcttgtagacttttgtgcttttcatctaaaaaatcaacggtttgatgatgtgacaataaaatatatatatatatattttatgatttttttattaattaattttgtttatatttttgaaaaaattagtaagattatttgttttaaatttaaaaattaatataaacttagttttaaatttcttaaaaataaaaagaataccctaaaactaaataaacacaaacacaaacaatcatatctaacattcattcaagatcattcaagaattttttttttttttgaaaaattaattttttttaaaaaaagtgaaacactataataatcaacataaattgaaatacaaatgtataatcaagtaattttttttaaacaaacaaataatattaattatacttgaaataaaaactcaaaactcaaatcaatctcaataaaaagtatatatagtttgtttgatgcaaatttcgacaaaaagttagagaaaaaatggatgagtgtgactagctgaagaagaagaaaaaaattagttgatttggttttataaaattgatttttttattttaaattaattttttgctaaaatgggtaatacaaacaatttaattagttaattttaatttattttttattttttaaataatttttacttatttttttaaatttaaaaataattaatttacaaaaatatcataaaatatatttttcttaagcaaattaattttttggacggaatgaacaaaaatttacaagtgctatagttcaagagtatttttgccaaacaaaataatttaaaggagcaagagtttacaagtgcaataattcgagggttttttgtcttttatattatagaattgctaaaagactttaccggtgctagtaccctactctccttggtggtatactcatattggtgtaattaagtatcgagccctatataacttaaagaaaataatttttagagaatatcgttaaccaatcatggagtatcatcttttaaaaatactaggtactactggtacccaataacaatgtattttatattataatcatcaattgcttatatttcatcgccaataataatcaataaaattgttaaaagatatcactggtacttaacactttattcgagtgtgattggaaccattataatttttttaaaaaaataacatttaaaaaatatcactaattactaattaattatggaaaatgtgcaataataatcctcttatatatgttataaattgactatatatatgtcgaccaagtggcggccaatgccagctggtcaaatctaggcctaacttgatttttccagcaaactcttgtaattgggtctttgatctaaccatatatatgtaattgggtctatgatataatcatagtggataattataaatttcaattatattattgttcttcgcgtggacatataatattgtattaaaaatattacatatgtacatatataaataaaatttgaaaaatattgcatatatatacggccactgaatcgatatgtcgtaaagctagtaatcaacccacttttactaattgaaattaatgcttaattaattatatatgaattaattaattatatttatgtaatttcataaataaattattgtaataacatcaactacacataattaattattctttgtcaaacatgctactccactagttcactattagatttgttgattggaaaacgactacatatattatatacaaatatgaatttttcagttattaattaagatacaaccaataaaagttgacctcaatctcacatgtgtaatatagtttaaggatttttttatttttacactttaaaataatttttttttttaattttacaaaatctcatgtagaaactcacatagcaactaacggaacaactaaaatcgcaaataaaatccacatagcaacttacataataactactagaccaactatcagaacaacccaaattgtaaattgaaaaaaaaaattaaaaaattagtatatggagtattttccctataacttaaatattacatcaaaactaatattatttttgtaaatataatcttttttataaatatacattgtaactaactaaaatgcacatacatttttttctcgatttttttaaaaacaattatactgtctcacttctatcttgatctgcctctactcactataataaatgtaaaaaaatgtgaaattaaataagacattaataatt

SEQ ID NO: 27682 - DNA, 3019 bp, Cannabis sativa
ttttttttttttgatttattagttttttggttcaaaaaaaaaaaaaaaatcgcatcggtcaatccgaccaatctacactctagcctcttaccccttaatacaacataattactttatttttgtcttcacctctaataaaaattttctatgagtatatatgtcaatatgactcaatacatggtgttaattaggtacccaattaagataacttacactaaattgaaagccattgatatatttcttttatttctctttttatgctttcaattatgttactattaatgggtgtgatcgtatgcctgtaaaagatagttacttagttatcattagttgaggagttcataaacttgtgacagtacatatatactagccaaatttggtatgaattatttatttgttattcaagaatattgtgaaccatttccttcctttttgtacacgcaatattgttgtaattgtgctacttcttcattataatcccatttttttttaaagaattataatccatgttatgtcaaaaaaaaaaaaaaatcccatatggtatttggaaataaaataaatttatatatagtgcctcacacgtgttccacattctatattattacttctatttatttatttatttgataattacttcatatttaattagttataaatatataaataatcagatttatgcatttacattagttaacttataatactctaggaatctagtatttttgtttaaagcaatgacaataagcaaataatgtttataaatgttaagaactatatatctcaaaagaaaaaaaataaataaaaagtgatgtaaccaaattatttatttatccaaaaagtatgcacaattaatttatttgcaattatattatgtcgtcagatttatatggatcagagacactcttaatctcattaacatatttggtacattctctaataatgattttagatcacgaaaaaagaattacacaactactaaggagtcagaatcgataataagtacaaccatttttgaagaaaaaaaaaacgtatatccaacatcactaaaattgcttcacattctgcttcaaaatttgaaacatcttccacgtactcctaagttaagagacaacgcttgtttaactccattcaaatattccaaatgaaaataagatgtttcaaaccgtaacaaaaaaatatatatatatatttaaaaactaataaaaattataaaaaattatttataatgagactaaaattaaatatattgttctctaacaaagtaataatcatattatttaaaaagtcgccaaaactctaagaaaataaatactctaattaatatgaaagtccaaaataaccataaaaaataataaattatgagtcaaaatacacatgcatatatcttttatgtcatatgtatacaaagaatgtaaatgaagtatataacactagaattggatgtgaattacatgtgattcatttcttatgggatcggtttatatatatggtatacatcatctttgatgtatacttagctaattatttaacatttgttttcctattacgtacgagctttatataaatgttatatattttttaacaatataaatatgttatatatatgtacatagttatattatatatagtactggcaacattattatacatatacaaactgttgtaccgttaatttagtgtgtttctacgttacgtgtgaaattgattactattctcatgtaattcacatgttaattaatggaacatgtttgatatattgttttaaatatatagacgagttagaacttagaaggaaatatatagtttacttattccattaactccatatcgttggtacttagcatcaattgtttaatttgaaaaggaaaaaataacaaaaacaattacaaaaatactgtatacgattttttagattctatttacatgaaatatatatgatatttttatgtatttttatatttactcttataattttattattaattttttattatttgtatattattttttatcttattttttgttatttttacgtaattttcttgttattttattatatttttataaaatactattaaaaaaaatttgaacataaaaatataaattttttacaaaaattagtattttatttaattatctatttttttactctgttttggagaaaataattattgaaaatagattatttttagaataaaatcattattttttttttctttccaaattatgcatacgaagggaggacgtgtatattacaatttatgagaagaaagacttcttaaaaatagattgtgatcttaaaaccaaataacaagttataagggtatggcattttctatatatatatatatttattttcttatgagactttacttctaatgcaaagttcccaaaaataattgattttgattttatatctaaattaatatatatatatatttataagtttatattattctaatagacaagtttagtgaactacatatacacggggacttcaatggcgtttcacggggttctatggtagcccgaatccgggagggcgaaaagatagttggaagcttttggagcgccttcttccaatgttcaagggagtctgtggtgggaactttaatgaaatgtttagcaattctgaaaagcatggtggtaactccaaaccggactatctcatgtacaacttctgtaaggtcctttctaagtgtgccttgaaggaaatctctaccaaggggggcttgtttacttggtgcaatgggagggctgccaacttagttttcgagaagctggacagagttttttgtaacccggattggcttgaaaaatttcacaagtgttctgtttctcttttagattggagaacttctgaccatagacctctagtattcaaggctcaagtttctaatgttggtcataaggagaacatgccgtggggttctcgcttttattttgagaaggcttgggcggataatgatgagtgtttggaaatcattcaagaggtttggagtaataagtgttcaaggca

SEQ ID NO: 27683 - DNA, 2975 bp, Cannabis sativa
  modified_base (29)..(31): a, c, t, g, unknown or other
acttcattttccaagtaattacatatttnnnaaaatatgtccatttaaatattatttattttctgggatattacacaaatcgaaggggaagaaagctggtccgttgtcttcggacaaggtaatcaagactaggtccatggatgctttgattgggattcaagatctagagattcctgaggaagttgagaatattgatgcaatggaacaataccaagaggcaatggaagagtactcggatattgcgccgtcacctgctagtgagattcatctggatttttcagactggctttcgggggcaaatcgtgcttctcaggatgtgagtttggggaagaatccttctcctccaattctcagatccaatatcgcacgaaacttggagtcttgctttgaaaaaactgagttgaaaactgctgagtcacagtcgagggctgctgatgctggtgcgagaagggatacgaaggtgaagatcgattttgatgatattgctgaggaagttcaatactggcagccgtctattgtatgttacgtaattggagctaaccctccaatcaacattcttgacggatttgtatgcagaatatggaaagatgcagtagtgaaagttggactgctagttaaaggaatttttattatcagatttcagaacttggaaatgagggatagaattctggagcagggctatgtgttttttgatcgaaagccaatggtgatgaaaccatggaactcggtggatgatttcaccaaggaagaagtcacctctgtgccaacttggatccagctgcaaggtttagatatcaaatactggggagagtcctctttgtttaagatcgtgggacagctgggggatccgcttcaagtggaccaaattaccaaaaatagggatcgactccagtatccaaggattctaatccaggtgagtctttctcaagagtttcctaaagtaatttcgtttattgatgagcataatcatgaaattgaattggaagtaaagtatgagtggattcctctagtatgctataactgttcgggaataggacatgatactcaatcttgtagaaagaaagagagtagggaagagcaggtgaaacatgtatggatccctaaaaaatctaaagaaacggtggaaattcaaaaggataaagagggatttcagcaggttctaaaaggaaagagagtgatgatggaacaagtgcatttagatactgcgatacagaatagatttggcacactggaatttgtaacaggggagatcataggagatgaggataacataggagagggggagttccctctacttctaatggatagattattatgttggaatgtgagggggattaatagccaacaaaaacataatgaaatcaagcaatttatttttatgaagaaggttgggttggttagtctcctagaaactaaggtacagaataagaatatgggaaagttgtattgcagtctttttcaagggtggtgtttttctaataataatccttggttggataaagggagaatcattgttgcttggcaacccactgtgtttgcggttaatattaaattttgttctagtcaattgattcattgctatgtgcaatcaatgcagcagaatggggattttttggtaactttcaactatggtttcaatgatgagcaaaaaaaggaagaattatggggtgatttggagagattagctgctagtatacatgagccctggataatattaggagactttaatgagataatgtttgcaaatgagagaattggtaggaaagcccaaaataatccttcaccaaggcttcgagattgtatggaggcttgtgacatgtttgatctgaagtattctgggtctttttttacctgaaataacaagcaaaagccagaagatagaatatttttgaagatagacagagccatggttaattcgaaatggagttgtgctatgccagactcggaagcagtgttccttcctgaattatcttttgatcacagccccattctagtgtccatttatcgtgattggagctcgggaaagaagcctttcaggtattataatatgtggaagttagcccctgattttgatataaaagtgagacaatgttggcagggagatgttaatggtacaaagatgttcaaggtggtatccaagctcaaaaggttgaaaccaattctgaaaaagataaatcaagagggcttttctgagataaaaaaggcagatttgatggcaaagaatgaactgattgcagcccaagatgcactgaccaaaaatccgctctccttgcaattgatggaagttgaacaagaagctaatagacgatataatgaaactcataaggcctattctatgtttctttcacagaaggctaagataaattgggcttcacttggagatgagaattcggctttcttccatgcttctctgaaatcaagaaggatgcaaaacaagatcttctcgattgaagatgagcatggaacctggttcgactctcctgatggtgttcaacatgcttttttgagttattatgagaaattgctggggacaagtatgcagaatagacgtagtgtgttgcagaccgtggttaatcttggccccaaaattacgaatgtacatgaatctatcttactggcagattacacgagtcaagaggtgaaagatgctttgttttcaattcctggtatcaaggctccaggaccaaacggatttggaagtgctttttatcaggataattgggacatagtgggaactgattttacagaagctatattgtcctttctcactactgggaagatattgaaagagattaaccataccaatatcactttaatccccaaaattgcttgtccaaagaatgtcgcagatttcagaccaatctcttgctgtaatgtactctataagacagctaccaaggtgctctgcaatagattgaggaaggtgttgccagacgttattgctgaaaactaagggggatttgtccatggaagat

SEQ ID NO: 27684 - DNA, 1724 bp, Cannabis sativa
aactttcggttattgaaaagctaaacaaaaagctaaacaatgcatagaatatgtattgtggaaaccttagttatttaaactaagcacatgtattaaccgataaaagtcatatcaaagaaaagcttctgtaatagccacctgagtgtctagctcaagtgatcgggtatgtgttgtgtgtaaggtatttgaattcaaataccaactgggctaatttaacaaatgattaacttaactactacaaacggttacttatattaaaataaaaactcctataataatatttattatcacctatgtcaagattatgaagtggcactctaaatttatgaataaaagttaaaagtataaccaatggtcatgctagcagagaaaaaaaacgtctccaacatacacaaggagacaaaataaggaattaatgttacgagaacaagatttaacagatgaaggaagcaaaggacatacctttaccaatgattagaccagtttgtttccaagtaagcatactaaagggctcaagcttagtgaagttcagtataagtacaactggaaggaagattatgaggttgaatagtcctaaaaatcccagaaactgtgccatactaggatgaccatttttatcatcatcatcgtcgggtaacttcttacgaatgagggtgatatacacagcatatagcccagctgaggcaagagcaaatatgtctccaaggagagggtttgaagcaatatcacttgaaccagtttgtgagtcaccaagactgacaattatagttcctcccatacaaagaagaacactaataagcttcacccatgtaaacgtttcacccaaaaacgcaagcgagactaaaaatgtaaaaagacttgatgcactgcttaaaatggtgttagactgcataaaagaaataatgcacatattacaacaaggattacacaaaaagaaaaacataagcattgaacacaacattcagaaatacttacagtaaccgttgtatacttcaatgaaaaattaaaggtgagttgagcgagaaaccaaaaggggcatatcaaaagactaactctagccattctagtccttgtccaacgcccttttgcatcgatttgcttagccgaaacttcattaatatcatgttcattattcagaggaccatcaagctcttctaatacatgttctcttgcataaccaatatcttctacatgttgacttgtttctccaacttctaaaagcaaagaagcttcagtctttggaccttcattactctcaccaagaagaatggtattctctgactctcccaattgtttggaaagactactttttttactaatccaaaaccaaagacctccataattatcctccaaatatcttcctatttcaactaagggaatgtaaatcacaaacaatgaattgcatatataagtaatgaggaaaggagatacacctgcatctacaacagattgtaccacaaaactagcagctatccatatagctgcaacagtaactatgtatatcaaacccaaaacccatctccatgctttactgttcatatcttttcacctaaattgttttggctcaaattctacaaaaccctttacgtatagtgaagaatgtcacaatacccatgtcataattcagcccaaatctacaaagaaaaagacaaaaaattcattcagatcataaaaggaaaaaaaaaaaacacaaattgaaataacaataattaatgatcaaggtc

SEQ ID NO: 27685 - DNA, 1664 bp, Cannabis sativa
ttttactatttcagtgattgttaatgtactaaaccatgctcccaagactttgatatataccaaatcatgcccctcgaactttgacatgaactaaatcatgcccctaattaagctttcatccatattagatttttttataaaaattggacaaaaatccttaaatccaataatttcaatagttcaagaggcatttttaacgaccttaaaagttcatagagtatgatttggtatatgtcaaagttcatgcgacaaaaatcttaattagcctaaaaattaattatactctaatttgcatagtatgtaactatcattttacattatgcattgaaaatgttgtgatagtatgaaattgaagtgtatgtagaggtagtatttttaatataaataaatagaaaaaatgttgagagtattcttaaattaatgctccacggaatcaaaataaataataaaaacaaacattaataaaaatgaaaagtttttttgttttaaatttttacaaaaaataagatttttagttaattggagaagtgattaatttgaaataattattggcttaatataattaacattaagaggataccttgaagtgatgattcttagttaaaataattaagaggtcctcttatttatttcaacttgcatgtatatatatataaataatatgatttaacatttgatagagaatcaataaattatattcttttggatatgatattgtggtcacaatacacataagtgtagccatatacataattgtcaaaatgtaccacatttggccaatccagtttcatcatcatatacatatatatttatataaatatatataacattttagtgttttgattaattaattaattaattttgatgaaattgctttcaaataaataaaattattgagccatgaggtagaccattgatttaaaaacttcataaggaggcaccgaccaagcaccagtcaccctcatcatcatcctcactaattattatatataaaccatttcaaatttctcttgtacaactctcaaaattcacttttggagattttttatctgtttcgacgtttaggagaattttttagtctattttgttttatgattgccagacttgatcttagactaaggtgagttagacccgtacttaagactacccaaatccaagactcaaaatttatatacaatatacttttttatattgaaaaaaaattgatatttttgtaaaattttgtaaaaagatacttaataatactcatattttactttagagatagtacacacaaaacaaattattggacccattattactcagggttgaccctgatgatcgcatgcgttataactatttaagactatttgtaaatttttttaaaaattttgaatagtttacactaccaaaaataaaatttaaacagttacttaccacacatataagaaaaatagtagcgtatgcaataaaatatgtaaattacttgaatttttttgaaaatttacatgtgattttaaatagttataacgtacataataaaaaaaaaaatagactagaatgctctcataattgccgaaatagataaaaaatctaccaaaatacctctttaaagaatgtattgtagatttaccctaaaccattttatcaaaataattaaaaaaacaactttaattaatatatat

SEQ ID NO: 27686 - DNA, 3808 bp, Cannabis sativa
  modified_base (83)..(84): a, c, t, g, unknown or other
cacagcctcagaatcatcacacttgaccttccccaggcaatgttggattgcacagcttacccggtgtttccccttacggatcnngggactactgactgtcacaacacttcagcggatttaacttcatccgatatttgcagagggtggtgaacattttgtccaaatccttcattaaatcacttgctttcttggtgtttaccaacatgtcattgacatatacctccatgttgtgaccaatttggttggcaaacatcctgttgacaagtagttggtatgttgccccaacaattttcagcccgaaaggcatgacccggtagcaataaaggcctcgatccataatgaatgaggtgtgctccttattttcaggaatcatgggtatttggttatatcttgactatgcatctataaaggaaaacaattcataccccgctattgcatccacaaactgatctatacgcaatagcaggaagctatcctttgggaaagagttattcaaatgattgaaggcaatgcacactctccatttcccattgggtttgggaaccaacacagggttcaatacccactccaggtagaatgcttctcagatgaagttgatcgtgtcaattcggtcaacttccaccctcaaggctgcatactttatggaatttagagccctctacttttgtcttactggccttgcatttcgatcaacattgagatggtagcacattacagttaggtctattccttccatgtcctcatcccccaagcagacatgactaaattcttttttagaaagttctttaactccctcttaagggcttcaaggatccattttccaacttttaggaccttgagtgagttcttcaaaattactatttcttccaattcttctactaattccactcgcacttcctcacaaacttgagggtctagtttcgatgaagcttcatcgccttggttgggtcccccatggaccgtcatcatcgttggttctcgaggtttagaggcaattttgagtgacatgttgtagcattctttagcttccttctattatcccttcaaggtggcgatgcccctgggagtcaaaaatttcattgccaaatggtatacataagtgactgcttttaactggttgagcgatggtctccttagcacggcattgtaggccactagagagtccactacaaagaaggtggtcatcaccatggaatgtagaggtctccaccctaaaattaatgctaattctatcgacccctgtggttgaatcgagtctccagtgaacccatatattagggatgtgcagggttttagatcctcaagaccaagccccatctactttagggctatgatgtattggatatctactaaaatccctttatcaaccaacttcggtgcaccctggtgttagccaactgaaccgtaagcaccaacgaatcattgtgtgggaaatgcatgcactcctcttgcatcttcctgtggaaaggtgactgggttattttctcccttacaattcttcagagttctttgctctaaattctaggagtgaggttcttgctttacctcttgagtgtacttgtctctccctctacgagtatagcttccaaagcaagggcctcctacaatcatcctaatgtattctaccacttcggggacttttccaaacactttttgtcagtgtcctctatctacttgagtccagctgatgtttacacctcctctcctgacagcggatggtgataggccttgctctgacgtgaccaactgaattttgtcgaggtgagtcttcacatattaacgaaaaagagagcctctggtaattttgtaatgattgtgtgtaaaaaatgacttggcctaagcttgtcattcccacagaaggtgccaaattgttgacagtgagaacttgtcaactaaattgttggccaggaaatcaaacgatatttcaagtttagatataagatgaaaagaacgatgaaatatggattcaaattgctatcccaaaatagagagaaaatgataaagtttctattgttgtcaagatcaagttacaagaatgattttccaaccccctctcacatcttagaaagggtatatataggctctaatggtctgaggtacatggttgtcccggggggataatgtgtcgctttcattctgcacgtcacaggtgcaggaggtggcctagcaccttgtacctttgtctggtgttaagtggtccccggttgtagaaagtttatctttcgttgcaaaagtgtgatccttgattgtaggtgtgtgattgtagtgtacctttggtcgggtcctcagaccttgctaatgcgctccctccactactcgtaccccttattctcaaagcttacaagtggcgtggttgtatgcttgtctcttgcatgccttatccttttattccctgttcaacgacgtcctcgtcagcatgcatacgaatgaattatatcttacattcatgacatacgcacgttacgctactcactcgttgcaacacagctcatgcatgtgtatacaacgacttgcatgcgagacgcccacatgggctcacatgcgagcccttgaggctcacaacacacacacacactcgcacacacgcatgcactcaacaccatggcttgcatgcgagcccccaaggctcacagcacatgcacgcttagacgactcaccatcaaggctcgcatgcgaggccccaagactaaccacacatacacacttgcacacacacctcactcaccaccacggctcgcaccattgcagccgcacacactcacgtacatgctcgcatgcgagccctctgtctcacacccttataaccgcacatactcatgcaagcacacacctgcatgcatacacccgaatgcacacactcatacatgtatgcacgacttctccttcttacgcacttcctttcattgttgaatcaccacgagatcagtcattgaaccacatgggtgcatcccaggcactgcgagtatcgatgatagttttatgaaatacatgtcgagtaggtaagctccgtgaatgcacttccattaatcgctccaaaattagttaactaacctaaaaaaattagcagcgctaatttttggggttaaaaaattacaaccactttttctatttatcttaaagataatttctttatcgaaatatcttatccaaaatacaccttgcattctttagttatatttgaaatgtctaggcgtgtcttgcgagatgttatccactcacgccatattgattattttgagatgaattgccttttgctcatatcccttagtcattaaacatactcacgagtatgtgggtcaatgagttacaagctcttaaacaactcgtcatctaccctttccaatgacttgcccctacatattctatccttattttgtttattattcactctgtgctccccaagatggaattttttttctattagtttttcatctcattggttttgccaaatagtaattgttatttaggactcgtccttaattgattaaaaagatacttcaatgtgtctacaatcagtattctccaaggtaagttattcaattttcgagttggtttgtcttccagactttttacacgtgtcgtgactataatgctactcgaaatatgggaataataactaaactaaggtggatctgtagtgttagttcaacaatttcagtttgccatgctgatgtgtcaataatagttttacttatcaggttagttagtttgtatttctaattgtccccatcgtataatagaccttgtataattcaattcatttttatgattgagattaggaaataagtgggagagagagagagagaga

SEQ ID NO: 27687 - DNA, 4975 bp, Cannabis sativa
atgtaaacttcataaaatttgtaaatttgactagtactcaccaaaaaaaaaaaatacaatatgtttggccctcaacgaccctttgtctggttccgcgagtgggagtagtgaccccaaatagtgcgacaaaattgagtcgtaattgaaggttatatcgcacgtgtgaatggcagaggaggagcctaatagtcaaatgaaaggcacacacacatgataggtgggtgagtgtggcgatgaatatggaatggacagttagtgtaggtcaaaacgtagagtagagggtccccctttctggttccattaattcctagctagtgtatagagacaacgacaaatgatgttcaaaccttcaatttgtggaaagtgaaacaaattaaggaccgattgggaagtgttcaaaagaaaccataagtccatatatgcatgcatcttaaattggtcaaatctgccccatgtgacatttcttgtttactttctttaccactgtaattaattaatttagttttattccttaataaacatgacaagaaagccaatcacccaaattcttttctacttaagataagccctccaatcttttccccaaggcctactttagggtcataggtaaattatattatggcgcatggttgttaattcaaatgaacatatataaggagaaatagcatttggactcctcatatttgatcaacatatattacttgtacgacgtgatcttcggggcaaaatatattatcaattatagaggaaagaccccaaagtttaataatatattatatacaagagaagagataacgttttgaaattctgtatggagagcgacagaataattaattaactgtcaaaagccgaaacaagtgcgaaaaaacaaaatgtcaaaagcttaaaactagagaaaaccaagcaatatgtcaaaagctgaagagaaatattctttgtgaactagtactatcagtgtgtacataaatatagatgacgcaaatagatttatttaccacccttaatttttttttaatttttggacaatgacaatgtttttcatttaaaaattaataatcatgttaacagcgcttaatgtttaccacttcatgtctttttcaaagaaagcgaatacaattgactgaatcaatattgaatttttttttttttttttttgaaaagggaatcaatattgaattggtttaaaacatttcatctctctaatctatctcatatatagcatataaattttggtttatagatctacctagtaatgtaaaccttctccggcctagagtagagacttcacacaaatgaaatttaaaaatttttttagctagaaatttattggtatgtatatatatatgttaaattagctatgttacatttttacttactcctctccatctaaaagatatatcatgttaaaaaagaaaaaaattatatgctaataaataaatgatatatgtgctaaatttaaaatataattactatgatataattctaatcaaaataatttaaaaacacatactttcctgtcttttctttgtcaatttttttaaagacatactttaaaactatataaaattaataacaattaatagaaggtttttcattaataattagttcaaaaaaaggtttttttttttctttctttctaagcagaaatgaaaaactgaagcttctgtgtgtgttcgacgattattttgagtaatcaattatttcacattagatgaaaaagactcaattactcaaatataatagaaagaaacgtaaaatataattaaattgaaaaaggaaaagagatgctattgatatagtcaaattagaatttaattgttgtagtcatcgattttttgtttgcagatcaacaaacattatatatgaaaaatacataatattatctatatcacaccaacgaaactataatatttttatatttacatctctatatcacatagtgaaactcatggaaaatgtattggttggtagaacagattgtcacacgcgcacataaacattttacaaaaataaaaaataaaaatcgttacataaatatttaattttttaaaaacttagatttggtaagtgtgaaaagtgaattaattagtaataaaatttaattaagtatttttttttttgacatgaaattgcaacttcattaatttaacatttcgaatacaaaatagtctgaagattagagaaaatagaagtcccaagaatgctacgaccagataaaaatcgaacgtgcctagcaacaaagtgggcagctcgattggttgatcgtctaacaaaacgtaaatgaacatcagaaagagaggatactaattttctacaatcattaacaactaagcttaacacagaagtcattcactgagtagaatgaattgcttggacggcgagctcgatcataacgcctttctagtgattcgttttcatccaactgagagcttctttaatgcatattgattcaattatttcagctagctagaaaatagcctccatgcatgatacacgacttgaatgtggagtgtagaagcatgatgatcacgggccacaattccaaacccataggaattttcttcctcgaataaagtaacatcaacatatatcttgataatttctaattctggtttaacccaaagctcattttgatcacctatattatcaaagaatatagatgaaagacaagtaatatcttgagcttttcttcagtgatcaagagaagtagttgctgataccataacctctttcaaagagggggtttgattttttcaaacttttttattacgagttttccacaatgcccagcaaaccattcctattttgcacacatcttcagtagctacagacgagtaaatgtgttcgagccaagagggaaaggtacctggaggatttggacaaggaacaacgagttggtgccaacaagcagcagccaaagaataataaataagagcatgtgcagtgtttttcaggttggaaaaggcccgtagggcagagaatagaaatgttcatatgtttagtgacaaggtttaaacaagtaggaagacaattttttaaggctcgccacaacatgttcttaactttaggtggtatcttcagctgccatcaatctttccaaaagccaaaattgtttattgcaggtcgtattgccttttctttctgtagcaacaagtaggcactactagtactgaagctgtcatttgcttcaccaatctagtaccaacagtcgccttcatccgtaatgctcagtgggaggccgagaatgagactggcatctctggaattgaacatgtcacagaccaggtcttgatcccagctgcctaaatcagtggagaaacgagaggaaacttgctagtttaacaggtcaggattatgagttgtgacataaggttggttcttgtcaggaagccacgggtggtgtagtatgctggtatttgtacctgatcgtatggtgtgacaggctcctaacttgattatcttttgagcactccaaatgctttgccagacaaagttgggattggaggcaagatccacattgagaataccagagtggggaaaatatcttgctttttatacccggctggcaagtgtgtttggattacataataatctccaacctcgcttagcaagcatagcaagattgaagtcagttaaatgtcaaaatcccatacctcctagatgtttatgagtggccattcattcccaagacatccaaatgatcccattacctttacttgcactagttttccaccaaaaccgagccataagtttttcaatctctttacaagtaccaataagaattaaaaagacgctcatggaataagtaaggagcgattgaatcactgtcttgaggagaatttccttacctgctctggagaggaacttatcgtgccaactatttagacgattaatgactttattcttgaggaaaccaagaatagcatttttattacggtcaatgatgttgggaaggcctaaataatggctgccttcagaagcttccatcatgccaatagtgttgcaaatgtggtcacagagaagggggtccgtattaggactaaaaaaaatattggacttggaaacattcactttcttgcttgaggcattctcaaaggagtgaaggagattgagaagattagcagctgccccttgagtagcttgacaaaacaagtaattgtcattagcgaaaagcacatgagtaatagagggagcacgattggcaacacaaatgccacgtaagatgccattagattcgaattgttctagtaaagaggagaaccccttggcacaaataatgaagagataagtggagagtgggtcaccttgacgaattcttcaagtaggaatgattggcccaatgacacgaccactatgaacaatggaatatctaactgaagaaacacactgcaatataagattgatccatctgtctggaaaccccattcttcacataacagctcaaagatagtcccattcaacctggtcataggctttactcatgtcttgtttaattgccatatagcccttttttctttttgtcttccctttcaaatagtgcataacttcaaaggcgaccatgacattataagagatcaatcatccaggaataaatacactttgcatgtcggagataaacttgtcaataatgtttctcattcttttagcaagaacttttccatccactttataaagaacattacctagtgcaatagacgaagatcaaccatagaagagaaattttttttcttctggatcaagacaagattagtatcattggccccaatggggaaaataccagtataaaaaaattcttcaacaaattgaatgatatccttaccaacaatattccaatgagtttgataaaaacttggacccatgccgtcggggcctggcgctttgttaggatatatttggaataaaacctgcttaacctccccatcttgaataggctgtaaaagaacattattttgagcagtatcaacagagcaattaa

SEQ ID NO: 27688 - DNA, 3018 bp, Cannabis sativa
tagatgaaattatcagtaggctatcactgaaaattatgataaggtgtagtctagtaagcatacagtggaggacaatcattaaaaatttcatcacacaattgcgagcataagtactttcctattaaggtgaaatctgatcagaaaatttgttttcacaatgggatattatctaacatctccttaactcttcttattggtgccattattctcgatattaaacatgagattgttttgatggaagtggacagtggtagaagaaagttgtaccagctttttaatcctactaccgaacagagaatcactttgccatccatacccattattaaatatcgtatttggcatctgtatgttgaatcgaagaccgtaaaagtcttgttccgatgtgagagcaagaagtatcccaattggctagcctacttatacaccttaggtcagccgcaatggagggcttacaatgtgagttcctattctaatacatactcgactttgacttctatagatgcacaaacggtacatttcatcacatcatcttataccagaacgagtgaatcgagagaatttctaagcgggaagctactatagtttcattttaaatcagagagattttgtaaatgttctctcattcttacagaggagatgatggcctccaaaatgtggtgggataaatgtctttgttttgtacagttgcatttgagtgagaaaatcctcaaggtgaggaaagttgtcatgcatgatcaaggccatttgacgttagaagacgtgaatctttctttggagttgttggatgagatgggctatttgaaagaatccacttcttttccggactgtactaactccaaactgaagttcgtgcttgacagtgtagttcgcacattcaatttgaacactaagttcattaaagaatcgggaaagcaagagtcaagtacataattgtacaaactcaatcttaacaacacacaaattaaaaaaatatatgtatatatatattcatttccgttgttggttaaacaactaaataattaagagttgtgttaaggcgttttcatttgatattgtcgttttcatatgatattgtcgtttagtagagaaatgggagttgttatgttgttaccccattttttcaaaataaataccaccgcctcaatacagtctctcttctttcacactctctctggagaaggtctactaccattaccagactctctctcttgctttctcgacttctttttttgtagatttttctttgtcgccgaaatcactgtcattcctccttcaaattgcgtcaccaggtaatgtatttatatatgtgtaatattgattttatatatgttgcttattttgtttatcattatgttgattctatatcaatctttgggttggacattttaagattagtatgatctctctaggatatgtttgtatgaatagtaatatttctagtctagattcacttttctgtttaacggtggaagcaaagggtttgaaattttctctagagaatcgtgattttcttgataaagcttagatgaaattatcagtaggttatcgctgaaaattatgataaggtgtagtctagtaagcaaacagtggaagcgaatcattaacaatttcatcacatattgcgagcataagtactttcctattatggtgaaacgtaatcagaaaattagtttccaggatgggatattatctaacctctccttaactcctttcattggtgtcattattttcgacattaaacatgagattgttttgatggaagtggacagtagtagaagaaagttgtactagctttttaatcctgctaccgaacagaatatcactttgccacccatacccgttgctgtatatcgtatttggcatctgtatgttgaatcgaagacggtttaggtcttattgcgttgtgagagcaagaaatatcctaattagcaagcgtagttatacacctcaggtcagccgcactggagggcttacaatgtgagttcctattctaatacctactcgactttgacttctatagattcacaaatggtgcattttctcacatcatcttttaccgaaacgagtgaatcgagaaatttctacgaggggagctacgacagtttcattttaaattagagagatttggtaaatgttccttctttcttacagaggagatgatggcttccaaaccaatgtggtggaataaatgtctctgttttgtacggtttcatttgagtgagaaaatcctcaaagtgaggaaagttgtcatgcatgatcaaggccatttgacgttagaagacgtgaatctttctttggagttgttggatgagatggactacttgaaagaatctacttcttttctggactgtactaactacaaattgaagttcgtgcttgacagtgtagttcgcacattcgatttgaacaccaagttcattgaagaattgggaaagcatgagtcaagtacatatatgtacaaactcaatcttaaactacacgcaaattaaaaaaaaaaactatgtatatatatatatatattcatttttgttgttggttaaacaagtaaataattaagacttgtgttctatcgttttcataagatattgtcgttttgtacaaaaatgggagttgttatgttgttacctcattttttcaaaataaatagtacctcctcaatacagtctctcctctttcacactctgacgaaagaatgggtggcttcttgagaagttttcctagaaagtgtgcgactgaggacaaagcatgttgaaaacacttatgttggtttgtagggtcagtcatcaatctaggaagcagccagagtggcgtactcatgtataagagccattattctgtgggtgtaaggacgtaatggaggcttgaagcggggacgttacaaatggtatcatagccttgacctagccggaagtgtggtcgacgaggatgtcggaccccgtaaagggggtgattgtgacagtcagtaatcccgtgatccgtaagggaaaattccgagtaagccgtgcaatcccacatcgc

SEQ ID NO: 27689 - DNA, 3636 bp, Cannabis sativa
tatatggggtaattccccttatttttattattttatattaaaaaattaatgataattttttttttaatacttgcaataaaaatagtaaattttgcatcaatttttgcaatggcacattattggagcacaatgctaaaaattgatacaaatatatgacaaagtaatttgtttgccaaatatacaatttttacatctctcgtcagagatgttcttacaaagttatgtataattaacaaaaaaattaaaattataatcgtagctataaagatatgtacatattaattataaaaatgataagagacacattaagatggcaagcaccacaaaaggcaccatacaattattagtatattttaataccatctctcaaaattttaagtttaaataaataatttagaaaactgctaactaattattggataccacatcaatcggtatgtattgagcaccttaacgtgtcacatagcaataatagttaaaaaaattatttacaaaaaaaaaatttgcatcaagttttgtaattgtgtattgaaacataatgctaaaaattgatgcaaatatatcacaaagtattttttttttggccaaatatattaaacttttttacatatctcattagagatgttcttgcaaacttatatataattaaaaaaaaaattaaaattctaatcaaagtaataaagatgcgtacttattaataatagaaatattaagagacaaattaaggtatctagtaccataaaaggtagcatatcgttattgatgcatttcaatataagttctcactaattttaatttgataaataatttaagaaactgctaacaaattattatatatcacatgagtatggtattgagcaccttaacctgccacatatcaataaaaataccaaaaattatttactaaaaaatagaatacaaagatcattcataaaaaataattaaaaaaacacaatcaaaactaataaagatatgtacatattaataacaaaatgttaaggggcacattaaggtgtcaaacaccacaaaaggtaaaatatcgttattggtgcatttcaatattagttcttataaattttaatttaataaaaggtttaaaaaattgttaataaaatagtgtatcatatcggcattgtattgaataccttaaggtactatataacaataatagtacgcaaaattaattataaaaaatatatagtacaaaggtcattcataaaaaataataaaaaaaaaattgctagccaattattgtgtaccacattataattatgttattgacccccttaagatgccaataacatggacaaaaaataacttgtaaaaaaatataaaagataaaaaaattatatagtacaaagatcattcataaaagataataaaaaaaaattgttagtcaattattagataccacattattatgttattgaccaccttaagatgccaatataagtacaaaaaataatttgtaaaaaaataataaacaattataatagataaaaaaaataaagaaaaagtagaaaacgacaaaaataacgcattttccattcttattatatagtaaattaaatctttctcaataagagaaagtggtttaattttttttaaagaaaatattatcttttaaatttatacacattatacataaatatttttttacgattgcaattcaaatttaaacttgttaacgcagatttttgttcacgatataagcctattttcgtgataggattagcacaaaaataatagaaaataaaaataagaagaataatgcaaagatcacaccaagttttatacgtgattttgcagttaaaattatgcatagttcacgaatctatcttattagatttctctgatacaaaactagggtttttctctcaaggatttttcattcttctttctatacattctgcccctatttatagtatcatacggtgacagttaattacaatcagattcaaatcccacaacaatattttcccaaaattttgggctttaattacgtcccataaataaatgcggttattatttgataatcacacagctgcgacttatccgcttttaataggtcaatgctgacgtggattaatcacgctgcaaggtgtatcttgctggggcatctcgctgggacagcaacaataaccctgacaccgagctagagttttttcccatgtctttccgaggttgacaatgtaaatctctacgtttcttcgattaaagacataacgctccatctgacaatcagagttcttggtgacaaggtgaacttcaatagccaacatcatttgaaagtcaacttctatctcagagagctgactcgactgagcagtggatctcatttaaagatgtctgcagttgattagtgaaggtaccaggagtatgccttcttataacgagatggatgtttcgctattcgttattcacgtccttcaagttgttatacttagttagtatgatatatctatattatgtgctaagtgctctgacaggcagtacatctcgtcactgcttctctacgtatctcgaggtatatgcctcgctatgcattaccgatgcccttctcacgaccgtgtcttctgacgcaaaatggtttctcgttaatacgcgaatcgatagttcgtacatccttccctcgctgaagactgtgcaatctgcaagttataaatatactctattgattctacatttaatgagttattccgtttaatattcttttaatataattgccataatatttgttgatttgtatttcccaaggttgacacgtgtcatcctatgaagtaccagctaaattttcggtgtaacaattgtcccttaaaaagtctttttttaataaaaggtgctttttaaatgattactgaggttatttttgtcataattcattttgaaattatggatgcctttgattttggcagttttatggttccaatgcacatcaatagcattaatgaacagtattttccatttctcttctattttcatccattagatcttctttattatgatttgatggttgttaaatttagagaataaaacggtaagaatccaattttctaccatttttcgtcttcttcaaaaacttaagatgtctaaaacttttcacttgagcttcctgaatccgtgcatgccatccttatctttgacattcttcctgcaaatttactcgtacttgctcttcaactcctgttgttcgaagagctcatcccaccggccatcacgtctccatttgcagaattctccaacacctagttgtttgaattcactcagtaaatacttcatcctttttccttttttatttgggttattattgtcttgcattttgtcacttcattggtttaacgattaggtttcataatttttgggtgatttttatagttaggaataattttaggtttatcatattccttaagcctctggtttaataaatttcatccagaaattgggattgtttttcttttgtagaaacatcccaatctgtttcagaagtttattatccagaatttttagaatcagaatatcctaaacatatagcctctccatataaacgcaaagatttcaaacctcaatcgaaattagaagtaaatgatgccagaattagtgaccatctaattaagtcgaaccaagaagagactgcca

SEQ ID NO: 27690 - DNA, 2298 bp, Cannabis sativa
attgagagaaatgttttgttccaagaatgccgtgcttacctttgtgctgccacgagatttgcttccgctatcaatgctaggcttttctttgatgggcttcctttctgtgacaacttcaaagactgtaggtagatcattgatcatactgaacagacgcttcctattgacaacagggagttcattataaagaaaatctacagaaactcaagcaagtgtagcatgaaaattcaaattactgaatcctccattaaaacaaaacattcatgagctgtaacaagttaaaaaagcagcttagtctttgcacactgatagaaaaccaaatctaaacatagtaagatttagctgatgcattcagtatcatggaggaaatagcaattgaacccggtaatgaatccccaccatcctcaggatctacatattcatagtcgaaagaacaaagataacaaaatgttttacacataggaagcaaaaatacctcaggacatctgttgatgcatttgttgcagtatcacacaaatactgtttcaaccaaaagaaatgcagtaaagactttgagaaaccccaacaaccccctaccctcccttcttcccaaccacccgaaaagcaaaaccccgaaaagaacaataaagagaatggtttcagtaattcttctgctcattaatcagtaaatgagaatgataatagctttcctgattggtagacagggtattgaccttactaccagaactctagaacagacattaatcgatattttttctaggtacacagcctttaatttaaatgttgcaaatcataacaaggaaaaagtcatcacaaaattgaaaaacccttcaaaactgtgtcaaatatcaagtgaagaaaaagttacaaatatttatctcctgattatgatattgtggtagctaagccaaaacagcaaggaaacaacaaggctaaaacaccataactgcttagtccaacttgagctacaattctagatagaaagaaaaggataatacgatcaggagaaacataatgacaatgaaaacagaaatcagctcaagcttgggtataactagatcaggaggaacataattatgatgataacagagaacaactcaagctcaagtataacaagatcaggaggaacataatgaagatgacagcaaaaatcaactcaaagatgaagtatacagtctctaactggaatagttaacaagatccaaaacaaatattcccttcaaaatagaaattactccagatcagaacaggcaaagagtggaatcaaccaaatcacaatggcaattaaaagaatttgtcataacacttttatgttttgcttaaatattcagacactattgtactttcaacacatccacatatgttttactagttgagtttagttctggtaatgaactaataaaaatcctacctttattatttacttggaaatattttaaaattttatataaatcttatcaaaaatgataaaaatatatttaaatttttggcattaaactctattctacaacatttttaggaaaatatttttttcaataacttttttatttaaaaaaaataaaattttatgaaaaaaaaaattagagggagtttatttggaaaagtgaaacaatgatatgaaaatttacaaaatgtaatttcaagtataaaaagatgggaatgttattctcttattaaaattagttttgaccacaaataaactcaatactgattggtaacacaaaggcacatttagtacccttaaaaccacaaaggttttaagtgaatatttaagcaagcatgtgaaggtaaaatcatatactccagaatcaacaataaaatagcacagttgaagagaagcttcacagaaggccattaacaaaaccaagtatgaaataagggaaaaaaaaaacataaaaccttattatagatataaacatcagccatgtgaaaataaaaaaaacaaaaaaaaaaggtacagagctgacatgaaaatgaagtagcctcaacagatctagtgcccaaaatagaaatgacagagacaagagaattttacctctcattacggttaagacgagctccaaagtaaaaagccacagaaagcagccaagagtcactatgaacagctactagtgaaagccagtccttgcggttcatgccgtctctagcaaagttgataccaagagctggctcaggaagctctggtggaacttcttctgcaggcagagccacatcccagctttcatttggatgtccatatagacacaaattctccttctctgaatcccccaaatgatactttttcagtcattatcacat

SEQ ID NO: 27691 - DNA, 27554 bp, Cannabis sativa
cgacctacaaactccactctagctttattactttttgtttcacacaaaaaaacaaaattgggttgcttctgagtaacagtctctttaaggaattgaaaagcccgttggttcccaagcccacggcaattccaacttaacacattcataagtcttggcgggcctgtgacacagaacccgccccaactaagttttttgggcctgctgaaatagcaagacttccagtagcatttccattcggtccacttgaaatatcttcagcaattcttttcctttttgattcaagaattagtagatcaccatcaatgccatcattaacttcttccctcatattagtatcccgtatactataatcatttggagatcccaaagaatcagccaatgatttactaatattgatgtccctatcagttccacgaaatcctccatccaatcccactgatcgtggaaacgaatgatgcatcccttgatttacgccaccattaacgttcccagacgttgtgtctcgagcagtcgtgctgcttcccatgccgtcgccggagctttctcctctcaccattagaccttgccgaagccacttagtgccgatcgtatgttgtcttctccttggtacagcctttaagtctaggttgtatggcttctttaacagatggggtggagtatcaaacaacttagggcagaatttttcagagtgtccaagaattccacagataaaacaaaacgttgggagatcctcatacttgaaattggcataacatatctcccctcctttcttttctaatttcatccttcttttcaatggtaagtcaatacgaacagaaacgcgtaccctgaggtaatctcgccaaattcccatgaagttattcttatccgcttccacaaacgtgccaatgtagtttccgatgtctttcaccacctttgctgacatgaatcccgttgataaaccatgaagttgaatccagaaatccagcttattcaaaaccactgcccttgggtcttcaccttgttgcaatctcgaaaaaatcaagggaaccctgtcaaacgtccagggactaccttccacaactctttccacatctatctgatgataaaactggaataaataaacattatctcccaattctttcacaaacatacctctaccaggtctccacagagatgccatcttgtgttgcatagccatgaagtccagttctctttcagtaaggaaacgtcctacgatacaccatcgatcgtcaaagtctgataattccttattgttcgtgtcgtataataggcctccatcatcatcctcttcgcttgttatcgtgataaaatccctctcactttccaactccatacgaccatcgtccgccatgaaacagatcagataaaaacaaaacaaaccactagagccaaaagagcactttacactatatcgaataacaacaaaacggagaaacacaggtcaaaggaccagactgttgtgaattttctgataggctaaaagttctaattttttctcttaattggggaagatgaatgtgtaaaaaaaaaaaaaacaaaagagagagataaaggagggatgataagcttaattgaatggtagaaaaaagaaaaagccacaaaccataaaggacattaagtttgggtttggtgaggatgaggaaacttgtctttgtctattatggtttgtggctttttcattaaattacaaaaaagccctttttctagaaatcaaataaaagaaaaatggtaggaaaaaatcaaatcaaattatctttgtgaaaataattaattaatattattattaataaaacgcaacagaggttttatttagagtaaggttcatagaagaaagagagaccttttacccatatcaggctcagagcctttctctcattcttttcctttctacgctttctctccttcctcagactttttctttacattcttactcaaattactaccattttcatctcaaatcacgatcttaactaggtatttccatctctctgtcttttcctctcggtgctctggttttgtagttcttctgcatggaatgctaaaaagggattttgaataagaatgtacgaatttagctgtggaatcttgtacaaaatcccaacttttaatctgggttaagcttgtatttgggtctttcatctgttttttcttccctttgtcactcaacacaccccacattttcattttattctacacaaatcttcttgtcttaagccttacgaagtccaattctggttcaatggaaagatatgtacatgtctgtgtaatatatatatatatatatataaatatttatacctatatgttttatacttcacccttctctctcatgtctattctctatgctcttttcacagatagctttctctttcttcttagtagttgggttttatctagtttctgctatgatgcttgttcaaaagtgtatgaaattgttttgtaaaatttgtgtcaatatcttctccaaaattttaatattatcaagtctgttaacttaactaggctgaaacccataatatcagtgaatagattttaatttgtggttattttcttctttaacatctgaataataagcttctgacctgtttataggtagaaatttacttcataattatgaatatgtattttctttaatcactggttaatcttaaattagatgttgttcttgttataatctatccaaatgaattcatttgtggctacccatatctttttttgctgaatatattgtatttttctccaaaaatgagtttcagtttgtagattttcattagattaaattgataacattgtcctttgtaatgttatatgctcttacatgggttttgtgtctttcttgggaaagcaatggatatgtattttaatcttttatattatttttaatgctcatatatgatacacaatgtaaacttggactggatacatatttctaatgaagtgagttcgttactgggttttagggatcattttattatagatatatgtatgtatactcgtatagaagatgtctcttgaggccttagctcctcatatatcattaagatagtcgaatccaaagtcagttgtcttactcaagttgctcaatccatctcatatatcattgctatttgtgatctgcaatgccactatgattgagtgttttcgttttctatattttaatattgaacattgttatccaactatcctactattattttacaagaactaacagagtttggggttgaagttaagttgttgcttttgtttgattgtgaggagatgttgaatcatcatgtttgtaatgcattagatgtttgaaacgtaagaatatttacatcaaatttggataggactatactcatttttcatcttattgttctgtatttgtattttctgaatcttatgcattttgtagaccagctggtatattttcttgagtaaggatgatatagttaagtttgtggaaacttagattccataaacaaatctgaaacaaagcttgttaataaagtcaattttcttactcatgtattgtgctttttttttcttcttttttaatttcaaaacacccactatctatcatctactctggcttttgaagacaattcttaaactactctggcttttgaagacaattcttaaactactctggcttttgaagacaattcttaaactatcttttcttttggcattggaggtgtgaggtgtcaatattgctatggatttgttgactaaagataattaagaggggattgttcaataatttagagctatttttcgtacttatattatgatattgcttccttctttttgtcatagtacaaatactttctagcactctgttagtctttttcttatgatccagttgcaccatttgaaaacacctctatagagtattttccttctcacttcaaaatttacttcttcttcttcttcttcatttgaacttagaatacaaagaaatgacacattttgtttataattatgtgtgttgtgctgtgtcatttacagataatgaaattctctatcagcagcctcaacattaaggctttcatcatcgccttttccctcttcatttcttattcctctgcactaaaggtcttccctttttctctaatttatctacttttcttaaaattatttttgtgattttctttctctttttaattttcttagttactacacagattggagaaacctgttccaaagacagcgagtgtgattccggcttgcgttgtgaaacttgcccagctaatggaaatactcgatctagatgtacccggattcagcctatcatcccaacttcaaaggtttatttttctatttttttttttttgattacccttcctctttatttatgtgttattcatttattttttaaaaaatggaaataggtaaaaaatttgccgtttaataagtactcatggctgacaacccacaactcattcgccagagctggagataaatcggccactggctcattcctggtcacacctatgaatcaggaagacactgttgcttctcaactcaatgtaagttctcttcttcttcttttatgggttaaaattttatttgggaactcaatagtcacatccacagatatttggggtgaaattaacaaaagcacatgtttttgaatgaaaagaaaaacatgtggtacaaaataatgtaggatttatggggaaaaaaagacaagaaagtgaaaataattgttatagaagaggacataaactgaaaaatgtaatagtgaaatgaaattgtgggacctttctttcttttattttcactttaaattttgatgatgagggtagggtctgtatttgattattttagtacatgtttacctgtcccttagctttaaaatcaagcatataatataagccactctgttaatttcttcttttgattaacaatatattataagtgttccaactaatccatgtactgtataaaaatcttgtcctggaacatatgctttctttcctttttagtataaaattttggaattaaactcaatttttttttgaaaggtatgattttgataagaatcacttattctctttatactttttttcgttgttgatagaatggagttcgggggctcatgctagatatgtatgactttcaaaatgacatttggttatgtcattccactggaggcaaatgttataacttcacagcatttgtaagtgtcacaaacaaataattaaatataattgagttttcgtttattatagttttggctgtgaactgctttttcttttgttttcttttctttttagcaacctgccatcaatgtgctcagagaaatcaaatcatttttggacaaaagcccatctgagattgtcaccatctttattgaggactatgtcacttcttctaagggattgtcaaatgtgttcaatgccgctggcttaaataaatatatgttcccagtttctcgaatgccaaagaatggaggagattggccaaccgttgatgacatggttcagaagaaccaaagattggttgtctttacctcaaaatcaagtaaagaagctgctgaaggaattgcttatgagtggaactatgtggtagaaaatcaatgtgagtttttttcaatagtgtgtgtaatgaggttctttttgtttttgaaacgtagttcttttgcactgacttggtggagttgatcggttccaatgcatttgactagatggaaatggtgggatgatttcgggttcatgcccaaaccgtgctgaatcatctcctatgaacacaaaatccagagctctagttttggtgaattacttccccaacaatccgaacgcctcagcagtttgttcagataattcagcttcattagcagccatgttgaaaacttgttctgaagcagctggttctcggtggcctaacttcatcgctgttgattactaccaggtatgtattcaactagaagcatttttacagtcgtgtcttaattcacttgtgcaaaatctgaggaataataaactaggcatggaaaaggaaaacagaacattttgtcttatgatttaaacaaggaatttgataaccatggtataaccctttagttaatgtaaattgaatcaaaacataagaacacaacaatatacatgatttcatcaatccaatctatgtccacggattgctcattaatcgttacatttcttgattgcagaaaagcgatggtggaggtgccccagaagctgttgaccaagctaatggtcatctcacatgtgggtgtgataacatttctttttgcaaggtgtgctactctttaccactctatcagtgattgacccattctaatttcccattaaaacaactcaaaaatcaccaatgaaagaaatgaattgttttcttaaaggtagataatagggtacaataaatgcttattccagttagctaaactataatctgtcacatgaacaggaaaatgcaacctttggtacctgtgatgttcctccgatttctccccctccccctgcgtctggtagcacatcaccatcacgaccatcacaaagttcgcccaacatggctgcatttgatagcagaccagttacgcttcagtggttttgtggtatagttttggctacaatgctctccttttggtcttagattgtgacagttcatatgttacttcccttctaattcttttaacagcacaaaaatccctctctgtttcggcttagatatactgtttggtctctcattcttgacttgagccgttgttgtgtttgtaaaatttggagaaaatcatatcagacaaaattagtcactattgctagtttacatttgctttgactgatagatatatgtatacagttacctcacttctatcagtttttgcatatgtataagaataacatacatacacatatgtatgtatgtattcatctgtatttaaacttcatgtgtgtatctgagatttgtacttcctttgttggatgattgaaagctctacacgcaaattattgggctacattatttcacaagtcatataacatgctcaatacttgtgtactacttctaggctagtatgctatgctctatcagtatttgggcctttatttatttatattcaatctcatcatttaccagcttctgaacaatgacctcccaattcatgatttggacaataaaattaaaataggcatggatttatgctagtttctcagcagaattcaagctgggcaattcacctaaaaacaatggctgctcattgctctgtatctcttgcagctaagggtcactaaataagatgtctaagaagacataccatgttttttttaaacaaagtacagagtagtatttttttttaaaatatatatatgtatatatatatacataaaatagactgatttaattttttagagatctttgtttctaattacatttttatagagccaagcaacatgaaaataatgttttttttttttttgagatgaaacatgaaaataacgtgtaaacaacatattgcaaatatatgtgcaaataacatagtataatgttgtgaaaataatgtaaacaaataaccgtctatatttttgtataaaaaaaattaaatctgtaaaaatgttgaacaaattgtagatatgtattttgggataagttgaggaatatttttttttttattcattaattaaaaatatcttcctattatattttattaaagtatatcacaaaaagttgtccaatataccttcatcctccacttaagtctagcatataatttacattaaactaagggtataataaggatattatctataaaagtgagtatatcttaacaaatatagaaataaaaataaaaataaaaattaataaagtaaaatgggtgttaaatataattttctcattttataataaatactaatttttgtttgtcgaaaatattcaggaatttttagacacatactattttgcaaaaaattatcaaagttggaaaatttacacaactaaaattacacaataccgtaggatatatattttttttttgtcattttttcacaatctcttgtctatttaagaaaagagcattatctaaggattatatatactatatattgaaattttcaattaatttttaaaaaaaaaaatcgtgtgataatatttttgtaaaaattaacaaatttcaatatattttttttttttggtaagttcccattatctaatcatcaaaatattttgtcggtatcgttggttaaccaagctccctcaagtttcaataagaaagaaatgggccgggagttagcccatactataaattcatgggcttattttccacaaagcccaatgtattcccttaacatataaaggggtcatcttcttcattctgttcgcgccaaaactacaaaagctcccgccatttcacaacatccactctaacttgaaaccttgatagagttagagtgagacactccattatcagtctgcactaagatctagagagagagagagaaatggcggacgaggaaccagtcgatgccgggaggcggcgggggaaaggatctgaggccatggctcgtgccggagccctagaacgcctcaaagctctgcgaagcggtggccgcaaatctgaaactggaggttaccaggtcaagatggagaatccgatctacgacatggtcgatgaagacgagtatgacgccctagtagccaagaggaaagaagaagtcaggggcttcatcatcgacgatgatggtcttggctatggcgatgagggcgaagaagaagactggtctcaagctggtcttctttcttcggatgaatccggtggtgaatcggagagaccgaagaggaagaaagtggagaagaaggagcctcggccgaaaaagccctcttcctcttctgcttctctttctgccgcagccgccatgatgggtaagcagaggctttcgtctatgtttacttcttcggtgtttaagaagaataaggatgataagggtaaagtagtgtcttctgatagcattgtggatgatgttattgctgagtttgcgccggatgaagctgatagagagaggcgtaggagggtacattgtgctccattgcctgcttcgaagagttctatttcagctaatttaaatgttaagagcgagaaagtgtcgaatgtaggtattgatctattggctcgtcctgaattttcccgtgttgatagaaatggtgattctgaaccgggcagcgatgttgggaacgatgattcggtgttaagttatgatgaagtttgcgaagaagtgaaagagaaagactcagttatggaattagatgaagaattgggtcaggctccatgctttcagtcttctgactctgcagaaaagggaggcgggattgaggagaaagcagtgaatgttgttgaagcaaaggtagagcctgcagctaaggaggtgtttaccttgaatgcgaaggctaaagaagaaagggacccggctttcagtgcaactgcaggatggaaggcagtcaggaacggagaaattgggaatactggtggagttgtggagggcaatggttcaatcagtgaagaaaatttagattttgatttggattcagatggctcgattcctttctacattattgatgctcacgaagaattctatggtgctaatatgggaacactctatctatttgggaaggtaaaactgacaattttgattattttgttgatgtgattttggttaggcactagcaaatgttttttttttccttggcttcatttactccccattttttttaatcagagttcatgccttttgtctttcatgtaccttctagtttctagaatccattttcaaaaccaaacacaaggcatcaggtcaagacacgaatttaactttcttgattgacgtattttttgtagttggctaattctttttttcaagtacatacgctagacatgatacttagcaacaaactaaggtagttcccattctcatattggatgtgatgcaaaattaaagcaaagttaatgctaattttcaactcgtaggttgatcttaagcctagatgttccccattcagatcttagcaccaaaattgcccttaaagatgatatttagtgagttgttagaatgcccctatccatatgtttgaaaatttgagaatttgctgtggcctcttcaaactaaccctgagaaaaaggccatttttttctgcaatataggtcaaagcgggaacagcatatcacagttgctgtgtagtcgtcaagaacttgcagagatgcgtctatgctattccgcaccaatcttcttttaatgcggatgaattgactaagcttgaaaaggatgctgaagagtctcggatttcaccagctgattttcgtaaaaagctgcaagtgtgtaaattatctaaatatattttccccttatgttagttgttttctattttaagcttaactgatgccttctgtttccctctcttagggtgtggcttctggattaaagaacgatgtggcaaaacatttgttagatttaaatgtatctaattttagtatggcaccagtgaaggtttgtaaattcttcattcttagattccaccagttaagtttgttatgcaactctctctttctagaaccattcagagtttacctcacatcttctgctttttgttcacgtatatatgttgcagaggaaatatgcttttgagcgatctgacataccagtaggggaaagctatgtactcaagataaactatccatttaaggtacatcagtggacaatcagatgatccagttatttttttcactacaataatatgtgctaaaattataaactgtcagtttgtgttaactgtattacccctcaccccctctactcttaaatatcattatcacttaatttacttatgcatatcagcatatgacttgtttattaatatcaaatttattggactctagtcttatcttgtgctgtgaaactctggtttcacttttacaggatccaccccttccatcagatttgaaaggggaaactttctgcgcgttactcggaacacataacaggtacttgaagatatttcagctttatttccattgcttaatgagtatctcaaaatttcctcctcacttcattaagtgtgatattatgcccaatagctggttgattaatacaagaatagaacctgactttgcattgcaatatgcagcgctttggagctttttcttgttaaaagaaagatcaaagggccatcttggctatcaattgcaaaattttctacctgccaagctccacaacgggtgagattttgaagtctgagaatcgcctttttattcaagtgatgtcggtggcttaatccatgcattttcaatttcatagttaacagtttgtttatatgttacaggtcagctggtgcaaatttgaggttattgttgattctccaaaagatataggggtttcaaattcatcaaagatatctggagagattcctccagttgttgtgacagccataaatttgaaaaccattatcaacgagaagcaaaatattaatgaaattatctctgcttctgtcatctgctgcaatagggctaaggtttgttataaatcatcgtcacacagcagctggatttttttatgatttttgacatgttatgatatagaacgaaacttggtcaatgatattcaaattcttggatttccactttttttcatgtctaaaaaacagatagagtaatggtgttgttacttcagttaataatctagtctaacttggaaaagtttataacaatattgctatcgtcagaaaatcttaaaatgtgatttgtatatcaattgttggagtatggacagcatggaagtttctgttggttttttattctttcagtatcttaataagacactttacttcaaacatatattatatttttattgtgtgaattaaatttaattttcagagaaccatttagatgtctaatgctgctatttaacttttcagattgacagtccaatgttggcttcagaatggaagaagccaggtatgctaagtcattttactgttgttcgtaagcttgatgggggaatatttcccatgggattcactaaagaggccacagaacgaaactcaaaggctggatcaaatgtattatgctttgaaagcaggtaagttttactcagacatcatgtctaatcctgttttttttttttaatcagccaacagaaaaactacaatttctgtattttatttatattgtttctcttttaagtttgcttaaccttgcttttgcagtgaaagggctttgttaaaccgtttgatgattgagttacacaaattagacagtgacattcttgttggacataatatatctgggtttgatctggatgttctcctccatagagctcaggtgggaaaacttcagtgtgattaatcaaataaaaaattgtagatacttgatgtgtcctttgcagtggtgataaaactgaatgaaggtgaacatgtaaatatcctttttattatcaagttcctcaataacaagttatatgtactggccgcattaaaccaactggcaaaaactttcctcaacatccccctctcccaagaggaaaaaataataattaaaggccattaattatgagtaagtagttaatactgtcctcataccgtttagcttccttccatgtatgttaataaaaacaaaagaacttcagcacgtttagaaaaaagcttaactgcattcttattatgcgcttttcaatgtatctaattttctcacactgcaaattcggctgtttttctggtcagatgcacatttagaatattattagacaaaaatctaatgtactgttatgttacttttgtgcccaaattctagtcatggtttctcactaatgcaagttcctcttatccaatcatatgtggacatgatttgctgccattcttttaaagaagttcaaatgttaaattttgcaggtttgcagagtgccaagtactatgtggtccaaaataggccgcctcaagcgatctgtgatgcctaaactttcaaaagggaataccatttttggatctggagcaagtccaggaattatgtcttgcattgctggccggttgttgtgtgatacatatttatcttcccgtgacctattaaaagaggtattgtacttttcactttatttaggagctattaaaatgcagtgatggtcaatttagtttcagtttctcacatgcaagttgattgtgacaggttagctattctttgacggaactcaccaagacccagttaaacaaagacaggaaggagatctctccacaagatattccacatatgttccaaactatggaatccctcatggaacttgtatatttcagtgcttaccgttgattatcatttctagttgattaatgtttctgttctcatatatgatatgtaaatgaatgtttttcctgtcaactaatttagtttttattaagtgttgactttcaagattgttaattccgacgtgcaaccaaggcccaaaaaatgtgacaatgctaaatgtagtggtagtaataccttaataaagcttaaatggtttatttctaataagggttatattgttctcttgatgtatttagattgaatatggtgagacagatgcgtggttgtccatggagctcatgtttcatctgagtattcttccactcacacgtcagctgactaatataagtggtaatttgtgggggaaatccatgcaagtgagtatatgatcgtttctttgtcttttatcatgaaaggttgataatgcacctgattgttatattatatctctaacgtgtgccttttcagggcgcgagggcccaaagagtagaatatcttttgctgcatgcattccatgcgaagaagtatattgtccccgacaagctttcttttaatgcaaaggaaacaaaacaagtaaagaggagactaaacaatggcattgagaacaaaaatgctgatgatttggatgcggatgacacaagtttggagaacaatgctaatcaaggaaaaggaaagaaaggaccttcctatgcaggtggattggttcttgagccaaaaaggggactatatgacaagtatattttactacttgactttaatagtctttacccttctattattcaggtatgtaaatcaatctagtacaccacctatgctgctattgtaactcttactatgctcacttttgtgaatattgactagttgttttcactattcgggtaagtaaatcaatctagtacaccgcctatgctgctattgtagctcttacgatgcttaactttgtgaatattgacttgttgttttcacaggaatacaatatatgttttacaaccgttgaaagatcttcagaagggatactttctcgtttaccatctagtagaacaccaggagtactacctgaggtataattttcttggatataatttaaatgtacttcttatcagttacctgctcggttcataggttggttatcactttgttgcaaagatatccattcttcataaagttggatttggcattaagaatggaagatattggcttaagcatgttgtgtcttatgcattacaagtgaaacatatttctaatgtggagtaatctgccttgtgttttttcttttattaactttctccatatcttgttaatgatttttcttattttactgtgtagctgctgaagaatctagttgaaagaaggagaatggtcaagtcatggatgaagacagcatctggaattaagtttcaacaatttgacattcaacagcaagcgttgaagctcacagcaaataggttggtgtgttttttttttttgttctgtatccaatttttacatttcctttaatttgtgcttgttattcaataatgtctttaatttctttatattaatttctgtttatgactgtaccgtcgctgtgttcagtatgtatggatgtctggggttttcaaactcaaggttttatgctaagccactggctgagctcattactctccaggtatgaaataagctcgtgttacaagaaactgtaacaaatgtattaattgatgttttagactgattctatcaagtattcacccagatatgtggttgttttgcagggaagagagattctacagagtaccgttgatcttgttcagaacaatttgaatttagaggtcattccttgtatatcaggatttggtcaataagctcttaattaactgtgatctagttaaagattaggttttaaaggattcatcatttctatgtggcaggtaatttatggtgatacagattcaattatgatttatagcggtctggatgatatagccaaagcaagacccatagcaggaaaagtcatccaagaggtaaggcctcaatttgcaacttattcagaaaatactatgctacgtgtaatcccatttagaaatcaatttaagttttttattgcgttgagtctataagggttactttttgtaaaagagatgataacacagcatcctgtgctggaagaactttgaaatttgtagttgatacttaacatttgtataaacttttgttttccctaataaatttgtagattgttacttaacgtttctattggaaggatttgatgatttactccatgttagcttttggcaccatgtgcactacaaatactccataccattttggcctttttttccccactctatatgtttattccacagcaaggtataataacccttatttttttattcactactaggttaacaagaagtatcgatgtttagaaattgacctcgatggtttgtacaagaggatgctgcttctcaaaaagaagaagtatgcagctgtaaaagtgctgttcaaggatgggaaaccatatgaggtactgtaaaattagtttcaggctcttgttgtcagtagtgtttacaaggggaacaagcaaaagtcaaagtaactattcttctgcaggtcattgaacgtaaaggccttgatatggttcgccgagactggagtttgctctcaaaggaacttggagatttttgtctaagtcaaattttgtcaggagggtaggttatgccgtgtactatctattacttttcaagattttttttcttgttctaatggatttgtcttgtcacatcatcgaatcttatgcccccacagatcttgcgaggatgtggttgaagcaattcataactctctgatgagggtgagtttatgtcttttatttagatgggagttgggaatgctttccaccttttagtgtaaaaacaacgtatttatctaatagtcaattgactattattgtccctgataaacttaaagataacatttgatttatttgcatttgaacaggttcaggaggatatgaggaaaggacaagtagcccttgagaaatatatcatcaccaagacgttaactaaaccacctgaggcgtatcctgatgccaaaaaccaacctcatgttctggtgagtttaaataactgatttttaaaatgaatcgaactctcaaatcacattttctaatgttacactgtcatcccgggaaacattcctaggtggcacaaagattgaagcaaagtggatactcaagtggctgctctgttggcgatacaatcccttacattatctgctgtgaacaggtttgtgatacatcaaattcagttctctgttgatgtagtaggctgaacttgctaatggtgctataaaatatgatgtttatcatttaatatgctttttcttccccttcatcacattcccatttttggacaggggactagttctgttagctcaactggaattgctcagcgtgctagacaccctgacgaattaaaaagagaagatgggaaatggatgatcgatattgattactacttgtctcagcaggtggctttgtagtttcatgtgcaaaagataaattgtatgctacatcttctactttgtcttatggtatagtttcctcgtgcagatccatccggtggtgtcacgtttgtgtgcttcaatccagggtactagcccagaacgcttggctgattgtttgggacttgactcttctaaggtatattattccttttcctccctgacaatcaacatcagaaccacttcctcttttatatgtctaacaaactgaaaaattgcttcatgtagttcaaaagtagctcaagagacaatgttagcagtgatccatccagttcactcttgttcgctgttgacgatgaggagaggtaacctttatcttgtgtacttgtcctaacacatattcatatatgtcagtgcttccaaaccatacctgtaaaaaatgtgtaagattacctttgtaaccacaaaagtgtatgctaaaggatttgaacaacctgcatcttgagctatttgtagtttcttgttcaaatagtaaagagaatgaaacaaaatatacttgtgttgtaaattgcagatatggaggctgtgagccattgaacttgtcatgtcccagctgccctgggacttttgaatgtccaaccatctttacttcagtttgtaagtcagtgaaggaaaatctaacaaagccagaagaagagtctaccagcaacttttggcagagattacactgccccaaatgccctgcagaagcggatgcgggaaagctgtccccagcaatgattgccaaccaggtatttatcatgtattttcatttatgaaagtaatggacttcaatggtctccacagaaacttaatattttgattttgatttctattctcatagagaatctactgacaatgcgaactgggcctgttaatcttataggtcaaaagacaagcagaaaggttcatttcattgtattacaagggcttaatgacggtaatttaccttttctatttactattccagaaatgcagtactggcaggttgatttttgtggtcaattataatactttggttcttcttaagtgcttaatttacttttcagtgcgatgatgaaacttgcaaatacactacacgaagcctaaaccttcggcttgttggtgattctgagagaggcacagtttgtccaaactatcccagctgtaacgggcatctcataagaaaggtttgctcaacaaacttgttcaaatgaagttcatttcttttccttttattgcttatgttaattttgattacaaatgtatactttctccagtacacagaagcagatctgtacaagcagctctcatatttctgtcatgtattggatactgtacgctgcatagaaaaggttatttgaatttcattaaatggttttatcgacttgacatggtctgatttagaatgtaacgtaatgtatataactttcggttgcagatggatgctacagctagattgccggtggagaaagaattggtgaaaatccgtccagtggtcaatttggctgcatcaatagttcaaaggattcgtgaccgctgtgcctatgggtggatacagctacagagtttaaccgtatcagtatgatttctagcgtgagccactcaactcatttttgtttctctaattttattctttgatcttcatgtatatatataaaaatgtggaacattttattgtaccattagagaatgtccttagagggcatcttgtgtttcttgttgcgttcactaatttacaagccatgaataataaccgtctcgacaggttttgatatatatatataaactccaacacttgatagtggagtgtgtactgatgaagttatgcaacttttgggcctttgggactctagtatttctatactgcttactgtaatataagatacattattaaatacaatggtactgatactcgtgctggaatttagggtataatgtaaaaatcatctcactttccagtctttaaatatgatgctagacaaatttatgcactgatgtgcctgtaattgagcatgtttgaagctctggatttgtcctaacctatgtttgacacttttaagtttgagttggattggataattttatccaaccttccaaatttatccctagcgggactataaattcatataattatttagtctaaaattgggttttttatttatttttttattattttaaagtataatatatattttcttgggggattatttcatatattgtttttttaatttttttttaaatgggaaatttaattttttatgcttacatttgtttaaaaaaattcttaaattaataataactaatatttgtaggatatgataatttttatgatattcttaaaatatctcctatttacatcaccttcatttacacaatcggatcccccatcaaaccacacaatcggaccccatatcagaccaccaatcggaccatatctgctaccaatttttttttatgttttttatacataaaaaaaaaatagcattaggtgactatcagaccaccatcggatcccatcagaccaattctggtaccaatttttttttttttttatgtttttgtacatacaaaagtaacatcaggtgaccatcggatcactatcgcactaccaattttttttttatttttattttatgtttttgcactaaaaaaaagtatgggaaatttaagaagggtaattttgggttttagataaaatagtcatatattttcaatggtgatatgtattagtttaaggataaaatattaagtagtgtaagtatagaaaatcaaatttcccatttatattttgtttgatggaatgcaatggtaatgtaacagaatggtatcttgatgttaatgaatgcatgatgtaatgatcattgcaatataaaatcattataaaactttaaaagttaaaccaaagtaatggtaataataattacaattcctatgttcttttcatttatatttttagtaaaagtatgtggatatgtataccaataagaaccctatcaaagtcaagattgaacccaacaataacattaaaagtaagactaagattttgtaatacttagcattatttgtgttcactttctaatgctaaaaaaatgtgttacataagcagtgcgagactaatgaaacaaataactgagtttcacagggaaaaaactcaaaataatgaatttttattaacgaagaaacaattaaatattcaacaactacactggcggaaatatatgtactatgcccttattatgcttactatctaaaagccaaccccatttccaatttcccccttttttatttaacattgcaatgctgcaaatgttacactgtgttagctttcacggcccccctgtttacaaggccactctttcactctaactcgccaactggagcctcgttcagccataggaaatgaatgaagtcgtagagcttagcgctcacactcaccttcacagcatggagttgaaaaacacggttacaggagcaattgatgaaaaataataaaaccaagattggggaaataagaggtgtcttaggtaccttgtatggtgtcgggtttaatctcctcatgtggtcggaacgcatttgttcaagttgattgatgcaccgctgcctgatttccttgagaggtggcagatctcctcgtttgagaccttcaacaaacaacataattgatgagtttagacactggtacgtacatgtactttcaagagtgtattcatggttggtgacattttctcagttcttcagtaacaaattttttggttatacagatcagagtctctgaattagtgctaataaagttttggtttaaaataaaataaaaatacacaacataaatgcatactcaaacctgaattccccggccaataacatttgagaagctcttcaacacgctgtggcaccacgtatgctcttttcgattcactaaaagggtgacggcacaagattctttctcccacctgaacgtgataacatcaaacgtcaagttgacaattaaaaaagaatgtcacaactccaaaaattgtaccatcataaatgtatacgtaaagtacatattaccacaaaggctgagattactatacctttggaggtggttcattttctccagtcattatgtctaccaaaccataaccttctttcccgaataatctgaagcaccgttttttacaaggaatagagacctagaaagaaaagtagaagataatagataagaacaaatggtagaaagtcttacaaaactataagtcatactggaaatgcttgtaacgtgtgttcaaacctttgaaacatcttcagatagcttgatgcggggctgattattgatttcaacaagcttgaagacacaacctagggcagcttgagaatagcaagtaaccacattagttccaattccgaatgcatcaacctcatgaccctgcaaaaaaaaaagaacttttcaattaagaaatttgggcaatccaccaaaaagatgtttatgcatattcaacacatggcacaggtaatcatagtgatcagtaaccggttcaagattcttgtacattagttacaatctaaaagcattacctgtttatttaacgcatccaaggtttcctcattgagatcattactagccgtaatactcatctttccaaatccagacacttcaaattctttctcaatggccaaaaagaatttccggctctccaaagaaagatatgctaggtcaccagagtccaatctaatacctcctgctttgtagctggacataaaagccacccaaaacaatattgagaaaacttataaatatattagagtaaaaatgatcaatactagttgagcatatttacaatgataacatgaaagaacaaatcaaaactaatatgagaacaggaaacaataaagaatctaagaaagttgcaaaaagaaaagccaactgtatgttcatggagccaaaccaaatttatattttgcagaaggtaagcatgttgtgctttgaatgaaatgtctgtaatgcccccaaaaaactgtatttaatattcactaaaaaaggatttaggtcatttttaagaaatttcgaaattgactaaatattaccatgaaaacattcaatattggttaaccttactcataattcataaaagataaacagtattccacagtgcaattactcgtcctaatatatatgcacatcagttgtagttgtcaaaatctatagatagctcttgtaatcttctagatactgtagatatggattgatatatctatccctcaagtggaacatcttacatcattgtcagtctctcatcatcactacttttgcacaaattgttttcctattatgaatagcaagagaaaactatatttttgcaaattttcaatttgtaaatttctaagaacatccaaaaatgatgggaccgaacagagggggaaaaaactaatggcaattgaaaaagagagaactatggtattatttcatcatatacaaacaagccaatatacacgagacataccccagatcattgagtcccaaggcaactgcacaaaagtttggaattccactcctcataacctagtacaacaaatgcaaggctattgttaaaaacaccgcaaaaacaaatacaagctgtggatataaaagtatgattacaaatagcaatggaattatttcttgacctgaaaaacttaaccaatatataaaataataataaaaaaaattaacatccatttagttgctcagatagagctcaccaagtccttaatgaaagagaattaaatagcgaattaagtttgtaagtcaaatatccggaatgaaaaattacaagatttaagaataaataatttcaattacttgatattgaaaacaaaagaagattcaaaacaaattttaaggaagcaaaaaaacaaacatacagaaagcatggcatgtagacctcaaagtaccgtaaaaaatgattagataaaattctatacatttacttacatcatatgtgtctacaagtgctagaaagttattaggaaatgccagtgcataagatatgaaagctgccagctcactttgattggtttcgccaaaaagaccatgtaatgatgttgaccactgcaaaaaagtcatagctagcatcaacaaagtacatacaaatatataatcttataactaaggagcttagaatcctgaaaaggattctcttcattcacgtaaaaggaaaatactgatttaagatatgatcgttggaaatatttgcaacaaaattaatgatacagtcagaagacgaaaaagtaagaaaaggcataaaaggttaattgaatacataagaaattgtaaattggataatctaaagtccataatcgcaacaccttaattttgtttaaccaagtctgcgccaagttaacaaaatcctcacaagtagtagaaccatccttgctgcgaagcgatttatcaacaatctcatctggactctgcaaaacattaaatagaaataagacaagtaaggatgcagacaagcctattaattagaaatgaataagaatgcaaagaacctagttacatggtttcatatttgataaataagtagatcaatgcataacagtcagcaagttcattttcttggcaagtaatacataataaaaaaaacatatttctgtagtgtgaaggttctttatagtacaagaaactgtttgctaactcattccataaaagacatatgagacatcatatttgtaattataaactaaagttcccttagcaatagagaaaacaaaatgacaatgaagtcacagaaaaatatattacttagttgaaaacatacttccatgaaaacctttgtaaatcttttgcaaaaatattttggttaattaaagttaatttgcaaaacatctctataaacttcacacaaagatgtcatacaatttcttccaagagctacaaaccatgaatgagctaacaaaagcatgagaatgcgttccacgaagtggtattccgaataacttcccagctgcaacattgctgtaaaaacacagtataaagatttagactggttgtagcaggcaaaagccaatgagagaatcaacagattaattaaactactgctctcaagatcaatacatattttatctactatgttctaaagcaagttggcaataatttaccacactaataattgtagactagtaataaaaggtaggcatcttaatgtagcatggaaaaacaatcctaaataggtaatatatataaaaggacagacaattgaagaaatgcaatgcttagaaagttctaaaagaattcgaagagaggagaaactaaaaaaaatccaaagcatgccaaatgataatacaaaactaccttgttgcatcaaatcctccaagatagcagtattttgacgcccctactccaccatcaggcccctataacatcacattgatgaagataaacccacttcaacatttcaaaacttagtaaaaatagcgaccaggttgaaaacgatcaaactcatgcaaagtacctgagctcttcgaagaccaaactcaagtagaagttttgatttcccagcaacaaaccgatgccttgcagcattagtagcaactaatgatgcataattaataagattcaaaaatggagtttccagcaattggaccacctgaaatagtaagagataaaatatattagccttaaaatatgaattaggaccagaaatgaagcaatgcaagatagcattgatacacttagaagaagaagacagcaatgagtttcatggcactcacagcaacaggcccttcaactctcatcagtggaaccttcgggaaaacaactgatccctctgaggcagcatacacttcgacatctgagcagttgatacccctaagataatcgtaaaagccgtcctacatcaataatgctttgattatataactgtaaactattcggtaaatataaatattggtgagaaataagttaaaaaagggagataatatgctcaaatgtaggagctacaaggaaaattaatcatctctacagttccacatttttgtatagttcaatttagtctaaaaattctattgctccacatctttcaggggatgatatgtagctcagaaaatatttacagtttcaatcagctaaaggttctggttcccaatggaagaaaaagagaaaattgtcgtagataataaaagctatccataaattttggatgcatccagacttgcgaacaaaggtccaacaacactaaaagttttatgttcatataaaacatgagaaagtaactctatcatgatgtaatatttgctgatttataaaacaaataatacaaaaatctcatagccatatcatctataattattgaaaaaagaaaaaatgcccaagttcatgaggcctaaaaaggggatgcatcattgctgtctcacaaactaaaaagaaatctgttaacaaccacggacaaaaaaaatcggttacctcacatgaagaaggtaaagattggcgaacaaaggctatctcatcttctgtaaatctaaaattggcaatcagccttatgcactcttctaaaccagcaaagaccgtatattcaccaccaaaaggattcttccgaaaatacaaatcaaatctgtgacatatcataaacaattgaataaatgaagcagcttagacagacattcaacacactccacaacctcattaactgacataaaaatgaatcatttaagctaccatactacaatcccacatgaaaatatataatttcttttcataagtaaataaatagataaataataagcaatgccgtcaatacttcgaaactaatccataaaacattaaaaacagttgtagttttgaatgttttacccctttttttttccaatcaaagtatatcaatacattttcttcatataaatttaaatatattctgccctttaccatatctgtcgaaactaatacatataattctcagtttggtatcgtacctacaaaaagtacttttttttttcttccactttatatgttttcaatgacatagttaattgccaatccatacatattgcatggcaaagaaagaacataacaaaataaaatctaatgaattcatttcacaatttcaaattccaagagatttctcaggaaccaaacagaaaacagaaattcaaattcaaaaaaaaaaaagacactcacacggcttgctcattatgcttgccggctttccagtaagcgtaagccatagtgaactgataaagatcggtaaggagaggcgtaaccattggattggtcgggccatccagtaccttactcgcatttggaccgttcgcctccattgctcactcccaattcctagggtttttctttctttcttcaacttgaatttttttcctcaaatcaaactataatcttcctctattcatacacacacatctatttatacctatacctcctctcctggactctctgcgaatgctatcgtgcgcctcaccagaaatttaaaattatttatttaacaaaattaaaataaataaaaattaacgaaagggattgtgagaaagagacgaagaaattatcgaatagagagttttccaccgttttaaccgatgatgatgatgctttctttctacgaacattcctttctattctctgttaattaattaattaattaattaattaataatttttaataaatgacttcgaacaaatctaccaataatattagaattaaaattatgataatcttcaaaaaaataaatatttgatatttttaattagcaatgttttatttccaccattaattgtgtgtatgtatatatatatttaattttgaccgcagaagagactctgtggtgcagcttttttatttatttgtttttggtttttatatttttgaaagaacaaaaaagaatttgttaaattttggtagcatttgatttttgaatcatcgatcgtggcccgtccttaacgcactttcaagagtcacttctccattcaaccatgcaaacttcgacccgacccgacccgacttgaattatacgcaagtaattattttattagaataattatatatgacactattttttataaaatatttatatttttacgttcacagaatgttttttttacatttttatgattttcttaaaaataatacgaaaacaacatactatcaacaagaaaactacataaaagtaacatcaaaataacatacagataacaaaaaatcaacaaaaaattaataaaataataaaaaaattgtatttctgtaaataaaaaaaaaaatcgtaaatatgtttaaaattacatgaaatctgtatttttataattttttttaattatatttatgtttttgtgaaataatccttattttatttacatttaccattacccgtgtaatataagtaagaatatatgccaaattttctttctaaagaaaagaacaagaagattatatggaaaactaatgataaacaaatgaatttgggtagaaatataggaaaagttgaaagttgaaaatgttcaaagtcatataaaataattatgaatgattgcatttgcattcacgaattcaatttaaatttagatttagacaaaaaacatgatgcacatggtattcactttattgcagcactaataatactagtctgaaatagtattatataattaaagggattttatctaaattattaaatgggcgtgatatatagtgccagattcaataccaataaataataaaataaattttgaatgcatcgataattatgaagaataaaaatatattagacaccatactttaatgtaattatataatccttattaatatacagctcaaattacaatgcatttgttaaggaaata

SEQ ID NO: 27692 - DNA, 5701 bp, Cannabis sativa
ttattcaatagaaaaaaattagaaaacataacaaaatagagaaaatagagaaatggaaggaaaagatgccacatcaatgctcttatgctttcatttatttatatatatagataagtgtctcgtcaccagtcccactaactagcgtgccctcattttgtaggccagtagttgtacttctttcaacacttgtggatagtgttgcaaccatcttaaagtaacttattcagttgtggctctcaatgaaagtactaaaatattgacggagaaaattggccaacttattcgtatgtatagacgagatgaaatttataagtaactataagtaaaatagagagtacacacaataatttataatagttcactctttatgtcgcgacaataatggagttatgtctacttcgagttgttattctcaagagaatgattacaagaaaattagctaagtatgaaaactctaatttctagaaaaatgttctgaccttataggtaagtttttgaatgtcaggggagctctccttttatagggaatgaggtcctattaaagtaataataaaatatgaaaaaaaaatataaaaaagaaatatatatatttaggatatttttggccgttgatgatgatctaacagtaaaattgactctggttgtcagttgtcaattttcaaaacttgaatctcatctgcgggaccttttttgggtaacttgtaattgaaattcgtaactctcttgaaaacaaaatttggacttgatatatttagaattttgattgaagtgtgatacatgacttgatagaccattgaaatagcttcggaaactcaagttgaattgtgtcaaccagattattattaagtgagttatggccgctttattgaaggttgctctaataccaatgcccaggttgacatatgacgttaacttggatgctacgtcaaagaaaaaacgtgttgatgatgtatttttttatgcctaagtgatattttgacatcacttagctagtttctttgttctggtgaagtcgttcactagttctcgaagatgttgctatactatttcgtagaattgggagactcgaaactactcgatttgcgactagtcactttgtcaaaaaaagtgaaaatatgaagttgtgaatttaaattttttgagttcatatctctagtttactatgaaaaactagacgaacgctcaagacagaatcagaatcggataagtagaacctaacgcaccaagtcatacgtcaacctaggcgttgggtgctcttttcggagcttctgagatgtcgttttgatgcttctaagtctttgaaattgaggatgaggtctcctaccccattttgaccatgccgaagagaatgtctggagcattatttatatttgagtgacagattcaaatgcaccagtttgattgttaacttgggctcaacttttagctcttcaggactcgttttctccctgagtttacttgtatctttgttatttctaatgaaggaaaaaatgcccataacactttttcagataaatgattagaaacggcccaagttgacaaaatgtcaacctaggggctaggcccaacgctaggtgtcaacttggctactgggtgcagtttctggccactaaatggctctgtttgattcctagaaacacttgtatcttaatctttgacaaaaacaaagaatatgctcgagagatttcttataaaactccttggaaatggcccaagttgacaaaatgtcaacttgggtgctgggcccatcgcctatgtcaacctaggcgctgggtcctcatcctggcctctaggttgatctgtttctccttcgaaagtatttgtttcctcgttttggatgaacacgaaaatgctcaagaaagttcttcagtttgatgattggaagtgccccaaattgacaatatgtcaacctgagcattgggtgcctgggacacctggtgctccaggtgctcaattttgaagttactccgaatctaatttttatgcctcaaatatattcgtgacatgtctaattcatgtctcagtacaaagttttaccaattttcactaagacattccgaaaattgaaatcctaattagaacgttaacctaagtgctgggtgaaacctaggtgcctgacttctggggtattgtttcatgtatttttagcaataaatcaattaatatatatatatatattatacataaattcaaaattagcttattaaatcgaatatttttgtcacattaaatatactaaaaatcgaattaataatttggaggaaaaaaatattcatttctaccatgttagtgtaaacaagaaaattaggactttataattaataatcatttgtttttactgtgctgtgattaattttttgtgccaagcgcatgacataaaactgaggaagaagaagcaaatttatagtattaatactgatattattgaaagaaaatttagaaaaacatctttgataaaattttattattattctatttttaaacaaaatataaatttctttatacacataatttttaaatcaaaaattgtgtgtttatatatttcaagtaccaaacaaaggttgaaattgtacattatccgattccaagacatgagattgatgaggttgatccatggccataggtgaaggaatgtcctcaacctctcttttgggcttaacccatctcccatgatcattacaaacaagtcctttatgagctaattggtaccaacattgtgggattctaagcttatcaactaacatatcacatcccttgttaactaatgcaacatctctcctagcattgtctctaaatggtgtcgtatgactcaagaaaccatccacaagatgcaagtaagtctccaaactatgaaacccagctaaattaattccatgctttaagtaaggagatgacttaacatccagctttaactcagctccaacatgagtataaacccattcaagagtccccataatgtcctcaagtttctctaaactctcattcaaaacaagccccggcattctatgaaccatgtcttgtttgatcacaactctcagcgttctaacgcccatgtcatgaatctcgtctctaaacgcgtggttcccaactctcggtgctccaaaggagattacgctaatgctaacctcctttggaagagttgctgcagcctcgtaggcgtttagaagagctaaagcgcccccgaggctgtggccagttatagtgacactaacttcttcacccttttgtctatacatttcaacaagctttttcacttctttcattacttgttccgaagcactagacttgttgtacctagtggattcactcttagaagagtaaatgctcaaaaacccatgttcaactttcgcttctctattcccaattggctccaattttctcttaaaatcttcgtaccattcggaaggcgccaccgttcctcgccacgccacaacaatgtccctccggccaatccttcgcgactcgtcgtcatcgctcaccgccacatatcccatccaattggagtccttactccacgttgaatcaaccaaattggatctctgtagccaagtgggaacatcaatgtgcgaagacattgcgtaaatgtacttagtaacattatacccatttttggtcaaacccaatttatcgaacaggtggtgtgcattatacctacaactcccgcaatactcagaaaacgaatcgaaatcgaaagcgtcgtaagtggcctgagcaaactcgccgtacttaacgatttctcgcctcaaccaagggtgaagagggtttagtagagcatcctcttcctcccaaccgccgtggaaaccatggatttcccgccatttttgggcgatcacctcttttggggaagtggtcggcgtggagtgtttctcttccgggaaagaatcccagtttgagggattttctccggcgacggcggatgtggtcggagtttggatttgaaggtggaaaaagttggagagggatttggcaaatcgtagggttgagttattattattggtggagaatggatggtggagatgtaggggttgtggttgagacccagtgatggagacggtgtcgttttgggtgggaatacggttgaagatggtggtagaagatagagccatggattgtatgaaatggttgaattgaaattttagtgtatatttatagatttgatcaaatattttaaataatcaatcacgcggggttgattgatatagtagttgaaagttaccaatttaataatgctttgactaattatcttgtgggttttttttatgagcattgagtacttgtgtctagcaccatttagctatgtcatcttgcgattggctagcaatatttattaaaagttattatattaaattatatgagacccgatacttagttggaccaataacgatgttaacagataagagggtgctaggtactacgggtatcttttagcattactctttttttattaatacggattctatgctcttaattttatttttatttttttagttaattaagatttttgttccctaaactttaacatgtaccaaattatgctatctaaacttttatgggcgttaaaaattctccttgagattgttggatttaaggatttttttttttaattttagtaagaaaagtctaacatgaataaaagttcaaggagcttgatttggtacatgttaaagttcgaaatgtatgatttagtagataacaaagtctaggaagcttgatttagtacatggataatcatagagttaataaaattgaatgaaactggacaaatgtcctttaatctaacaatctcaatagttcagtagaatttttaacggttaacaaacttcgtgagcataatttagtacatgtcaaaattcaaagacaaaaattctaattaacctttttttaaacaattacaatacctaattaaataaatcaattatacggtgtataagattttttattacaaaattacaatgatcaatcaaagaatgattgggaataacttgagagtaagaagaagaaatacgatttgagttgcggttgtgacatgatttgatggtcatttaggattgcaatttatgttgcgactgggcatagttgagtaatggcaatttagttagatggtgatttaggttgtaatttgggttgcgataccgattgcaacttcagttttgttatggagatcatggaagcttcatgtggtggttttgcgatttagattatgattgggatgtggctgagattgtgatatgatttaaagttgatttagggttgtgatatcagttacgactttagtttcgttatagaaattaatggaagcttcacatgatggttgatctcgaataattacagagagatgataaaataacctagaggaaaaagaacggggttgagactagtatatggtttgatcatgcttatatgttgcaagttcaattttgatttggaagaaacaaaacttcagtttccatgggggagagtaactgggaggaggaagaagaagaaaagacaaccaaaaatgtgaaaaaatagatataattataaaaatgaatcataaaatataaatttaatgtaaaattataaaagatagtataaaaataaaaaagaaaaactaaaacagtaaaagtaggaatttaaaaaaaaaaaaaaatactccatatattattttttttcaaatttaaagtttgagtttctaaagtgatttttccggtaatttttatgt

SEQ ID NO: 27693 - DNA, 1495 bp, Cannabis sativa
cgaaggatgtaaagatgatgtatcgactcagggaagtataagtaatgagtcagttgctggacagcaacctgtggcggataagtccagtgcaggcacgaaatctgaaaatgatatttcgaagacagatcgcctgtctcatgttgtgccacttggtctcgatgaatttaagagtaaacaatacagtaccaaaagtaaacctggaattgatcagagtggaggtataaagcatagagttgagcctggagggaaggaatacaactatgcatcagcatcgaaaggagctaaggtcttggctttcaacaaggaagccaaaggtgcctcaaatatcttaggcagagacaaagacaagtaccttcgaaatccatgttcagcagaagacaaatatgttgatatagagctttcggaagagactttagttgacacaatagagatagctaatttcgaacattactcatcgaatttgaaggactttgaactgcgtggcagtttggtttatccatcagataaatgggttaaactaggaaacttcactgctggtaatgttaagctagcacagagatttgttcttcaggaaccgaaatgggtgagatatctaaaggtgaatcttctaagccactatggctctgagttctattgtacactgagtactattgaagtttatggtgtagatgctgttgaaagaatgcttgaggacttgatatctgctcaaggtactaagtccatgtcggaaggagcaaaaggtgaccagaaacctgtttcatcccagccagagccccttgagggtcatgatactaatcaaaaaactgccaaagaaacaggatctcaaacaacaactggaagttcgatcgagaacctagagatttctaagaatgatgtgcccgatcctattgaagaagtgcgtcatcaacaagttggaaggatgcccggggacacagttctcaaaattcttatgcagaaagtccgttccctggatgtaaatttatctgtattggaacgatacttagaggaattaacttcaaaatatggcaacttttttaaagaaatcgacaaagatataggagagaaggacatacttttagagaagatcagaacagaaataaccaatctccttgagaatcacaggacattggtatatttcacctcttttatattttcattagaattctcatcagtttatagtaataccattttcattagaacaaaagttaatgctaatctttttctctttcttacaggctacagaagttgatgatcttaattcttggaagtccattgtctccttacaaatggataatttagccagggacaatgccattctcaggtgaggaacttgtcacactttcggggtttttatttgctcgaattgtgcttctgactgttcatatggatgttctaataagtgggattcaattgcagatacgaggtagagaaggtgcgggagaagcagatatcgatagatgataagaatattgtgatatttcttttatgtttaatt

SEQ ID NO: 27694 - DNA, 1628 bp, Cannabis sativa
atcgatgaggacattatcaagtgaatcctgtgcttgtttagagcagaggcctctaaaagacaaaacagcttgaatggcttgttcagatcgattgagctgtttcattactacagccatgtcttttagggcactgtctactctatctcctgagtttatggcttcccaaaacaacactaatgccccttctggatccttttcaactagctgtttttaccatatagtatagaaaggaaattgagagtaagagagtatatatagtgcaatcatgtatatgactatatatgtcatattaatttaaatgtgctataaaaaaatattataattcaaattttaactcattacacataatttaattaaaacactataaaatatcacgaactaattataaaatattaattatagataatattaaataacctcttgtagaaatgctagtgtatatatatagtcacacatttttaatataatttatatatttataacgacaatattatattattataaggagcattggcgcattaatgtgcattataatattctataattaattagtaatttattataatatttattaaattataataaataaaaactaatattaaattatacaaataataatattctacttgatatttatatgtatatttagcatttccctcaggaacttttgagaaggtaataaaataatggttgttggaaaatggtcccacatcgtttttcatttcgttacaccattactcttttctatatttagtttacttcctataatttttaatttttaactttataattataaccactaaaaaactcatataaacaaaagtaatcatagtttaattttaatatatactaaattgttttgataattttccttttaatatatactagtaaatataaaaactagaaatataaaattataacttataaaattttcatgtaaacaaactaataaagaaaaaaaatagattttaatttcacttttgtcaaaccaaattatacatgtggggccatagcgtctataagatataatgtaagttatacatgtatattacacgaatataacaaggtttatatataaatacaaattaattaattatacaatacaacaaattaattatattaaactaattaacaatcatattttttcaaaaaaaataaaataaaattaatgaatagttatgaaattgtaaatgaataaagataatatagatacctgagcatgtttggctctaacataaggagtatcaccagaagggaccttgtgaatcacatgataaagatcatcctttttattagtattattgctcatcatcatcatcttctgcatcttcaaataattatttacttccattatatatatatatatatatactctcttctaatactcaaagaaaagaaaaagaggagagatttggatttagttaatggtacggcttggtttgatgaggaaggttatatatagacgacagctcttatgaggtggtcagtgaatatagactcttatacgtccaaattcactctctcttattaatgtgttgaacaaccaatgtactcttctctagcttgtctgctcgacacgtgtcttattttcattcgatgttctatcatcccttcctcttcttagcttg

SEQ ID NO: 27695 - DNA, 2585 bp, Cannabis sativa
tcgtttttaaaaccgtcgcgaaaacgaatatttgtagtagtgagatacttgttattataaattaaactggaatgtcatttacaataacaaagtaaaaaggtataggtaaatcctccaactaagagcaagtcccatctacccctaaagcgaacttagctaaatatgtacaaccatgttggctgaacgtttagcatggacaacattcacttgagagaaaaaggataaaagactataaacatcaattaatagatcatgataggaagtaattatagtagatcctttttgcaaggcgtttgctacaagaagcgcatcagtctctactattgcaatcgacaattgtagctgtataacccaattaagactataaaacatagccttggcttccatttcattagatgcaaaattaccgataattggttttgccaatgcaacaagaacatgacctgcagaattacgaacaaacaacccctactccaataatattttgattagcatcaagggcggcatctacattcaactttaggtccgtgcctgttggtggtttccatggggcattagcagctgctggtgcaggaatgggagcattcttcctggctgcattatggtactttcctttggctgtccaaaaattagataaataattgacagcaaaaggaagcaagtgttggtgctggttttgcagtaaagccatgaacaactcgatttctttctgtccaaattgaccaaaatgtgcaaataatttgttccatctcctgtttgttgtaaatagttgagagatttaccaaatagtctcccttgtacattgcagatgctttactccagtcaaaatttagattcatgttgcgccatatagctttggcatatttgcagccaaatagtgcgtgcccaatagactcccaagatgttttacaaactgaacatgtggagtccgtgatgatcttacacctcactaaagatgtagcaactggtagagcattgtggataacccgccaagcaaagatcttaactttttgggagagttgcaaagaccaaaagaacttccaccaagaagcttgtgaattagaacttgagcaattattggcttccgcatctgctatagatgttgcaaggtggtatccagattgtattgtgtaggtacccgagatgttatagtgccatataagagcattagtactctaaaaaaagctgagaggcagtgttactatacgaacgacatccaatggagaaaaccattgttgaagaagggggacattccaaactcgttcatctgtaattaagtggccaaccattgcatctgcaggaccagtaaatcgaatgggagtgaacgaatcctgaccaggtatccatggatcaagtgcagcccaaaactctctttcttcaccaattttccaacgtaatcctttaatgagcaactcacgtccccaaatgattccttgccaagctaaagaggggttgtgtccatgaggagcaagtaggaaatcattgtgaggaaagtaataacttttgagtaattgtccaagaagcgaatctggtttttccaacaacctccatgctttctttgccaacaaagcttgattaaatttttcaaaagatcgaaatcccattccaccatctgttttagatttacatagtaaattccaagctctccaatgtatttttgaaccattctcattcgacccccaccaaaaatttgctatcatagattctagttggttgcaaacatagactggaagtcgaaagtagctcataacatatgttggaatagcttaaaccacagctttaagaggcacttcacgcccccagccaaaaaaaatttctcgttccaattgtgcattaggcgccaaatcttctctttaatgtcactaaacaactattgtttttctcggccagtgtatgatggaagacccaaatatttttcatggcattcacaaatgagcattgaaagatgtctgtggaaaaagacctgtgacgccaacgtggtatttggagagaaagacatgaccgatttatatgattcagaagttggcttgaggctcggtgataaatatccaagactttctttattgcaagacatgaactttcattggcatgacagaaaaggagactgtcatctacaaaaagcaagtgagaaatcaacgaggcatgtctagtgagcttgaaaccactcaactgtcctgcttgttcttcaaattgcaacaatcttgaaagaccttcagaacagatgaggaacaagtatggacacaaaggacaaccttggcgcaagccacgagttggggtcaaggatcatgaaacttctccattgacagtaaaagagaaaatgtttgttgagaggcaagtcataataaggctgatctattattctacaaagcctattttcctcataacttctttaataaagcgccattcaactagatcaaggccttactcatgtccaacttaagagaaacaatccccttccctctcgtggttccgtttttaatggcatggacaagttcgaatgccactaaaatattatcgatgatgagacggtaggcaagaaggcactttgagtttccgaaatgacatgtgggagaacaaccttaaat

SEQ ID NO: 27696 - DNA, 2009 bp, Cannabis sativa
atattattaattttaaaattatgatattgaaaaaaactaaaaattaaaataaaattaacatacgttacttgccacgtaacatctatctagtatatatatatatatatatattaagacaaatattatgttttaaaatatttgcgcataactactttaaattttaaatttgtatgtaatataaacttaacaatttttttttttttttgaagaaagtaccaaatattaataaatttgttatttttttttcaatttcatcactctctacatattttaagtttgcaattagatttgtttatattttgtagtgacacaaatagttaatgttagtaaacttgttttttttccccaattttattagtttggattttgcaaatattttaaatttataatcagactcaattcttaaatttttcaaaaagaaaatttaaacttataatttatcctacacgttctagttcaaacccaataatttaaattatgagttttacatgtgtcttatttaaaacattaacagaatttgtattaatgaaatcagacgaaaaattattaagtttatttgagttacaaactcaaattatgaacatttatgttgcaaatatttctttaaaaaatatgttgtaactatgatagaaaattggtgagcaagtcgatccaatataccgactgttaatacaaagataatttgatttatttaataaaatgttataaatattaataattatgtgaacgtctaaatcttttatttattgccattaattgtaattaatattccttttttcttagtttcctaatatttgacttttatatgtgtataaataggagatcacctattggaataaaatattaagaaaattctcatctcttctttatttttctttctctaaattataatattacataatatgttatcagcacgagcatctaaccaaggtataataatatttgttatatgtatctcaaattgtttcaaagtcatgatacgctaaatatatatgtatatatatactcatctgactgaaacacattcgagctagctattttttatttatttattttgttatgaatcaatatttatacaatatatgtctatgcttatatatatctatatagatgcctatatactatattttagtattttactgtctatgtgttattttttgttgtacttttttttttcttttcaaagtttatgtatatgtctaataatttacacttatattgatatagttttcttcatggcaaatcttgcaaaacttgactttgtgacacttgatatttctggaagaaattatttatcatggattctttatgttgaaatctatttagatgctatgggtcggagacaccatcaatgattaaaatactgaaacaaaacaaaataaggccaaggctatgattttccttcgccatcatctccatgaagggttaaaatcttaatatttaaccgtaaaagatcctcttgtgctttggaaaaatttgaaagaaatactactacaaaaattataattttcgtcagtttttaagtgtcatttaaagaatttacgtcggttgagaaaaccgacgtatataccgtagtcgcaaatagttttctattagcgtcatttgaaaaatgacgcaaaaaccaattatctacattttaaaaccgacgcaaaaaatacacacttctattcacgtcggtcaacgccatgaacagtagcgttgaccgacgcaaatagtataatttgtagtagtgaaagatatggccatcaaaggctaagaatgattggttgcacctgaggttgtcagattttaaatcagtaagtgattataactctgtaatgtttaatatcacttctaaattaatgttgtgtggaaaaaaagttttcgactatgaaatgttaaaaaaaatatactacttttcatgcctctaatgtgctgctgcagcaacaatatagaaagcaaaattttaaaaaatatttagaattgatttcatgtcttctagtagctgaacagaataatgaacttttgat

SEQ ID NO: 27697 - DNA, 1323 bp, Cannabis sativa
ctcttctctattttctttctctaaattatcatattacataatattaatatttcataataattatatcatactataattatttttgagtacataatatttacacatgtattaaaatttagaataaaattattaattctacataaataaaattataaaatatatatatttttttaagatgtaactattgttatatagaagtatattttgttaatacgggacttgaaaaatgtataactaattacaatatagaggttattcttataactggcttaatatagataggaggttatactgtataacatgtataacacacttagaattcataaaatttctgtaattgagaaatatatcatgtctatttttgacaataatacttatattcattcatgttagtacacacataatcaagagagctatggacacttattctttaattgtttttttaaattttttttttagtacttcttgaatggagaaagtattagataggattggattcaatgtaattgcagatgtaaaactttggcacgtgtagtcattggaatgctctttcctttcatttcaaaatggaatagtcattctatcaaaatggtggaaatagcattccattgaaatgatattctaatactttaaaatgcaaccaaataaagaaatagaataaaaattattttctttcaattccattctattttatcacctccaaccaaacgctaccttaattaattagtattacttttatccattatttattatgtaacatgactggaattgttttttaggaaaatggtaagaaaattattaaccaattgtagcatgttattttgtgtttttagttattctttttcatttagccatataatttttgttatttttgcatacaatggttagctttatgttggataaaacaggagccaatttgtgaaaaaaataaataaataaataaataagagccaataatttgataataaactttatgtttatatgtcaattttattatcttagctgtacagttaatgtttctttcagtttccgttatatattattattttataataacaatttcatgtagaaaacttccaataatacattctcccaaataggaaaatgatatgtacaatttcttctgtttaattaatggattctcatatcttattattggaccgaatcaaagttttgtgactgaacatatctcttataataaataaatagtatcacattttaaataagtatataaaatatgtaaatatgcatgtattttgtgatcaaatattatatatttttgtacatgtactaacttatcaattgaattgtttagagagagat

SEQ ID NO: 27698 - DNA, 15576 bp, Cannabis sativa
  modified_base (985)..(986): a, c, t, g, unknown or other
  modified_base (4397)..(4399): a, c, t, g, unknown or other
ggaagccttaaaccctaggtttacaattcaaatcccttgaaaatagcatagttagttagatatttacaaaagaccaaaatgcctttaattgtagatattcttcagccagtctttaggcttttagggcccaatttggagcccatatcttgtgtccacatggagagttatacatggagtcttgctaggtcaatcttggccatccataggcctatagggaagtctggccggccatggtcctgccaggtcaatcttggtcggccatagtcctgccaggaccttgcaggacaaggcctgcagtctggcaagacaaggcctctaggaactgacaggtcactatagctccaccaagaggaggccaacctttgagtgcggtggtcagcctttttcaagttgaggatagctttgtacattgtttctttgaagaggttaggttcccttggtcaaatagagtctccttgggtctagaagtcacttcttggccgactagcttgtgcatagatcctggccagcctataggcttaccctggccggccgataggctcctcttggctggccaaggatgttggtacgactccttgtgggctcgctttactcccttcaatcgctgcttggcggtgttgctatatcttgcatggaggctctgttctgctattagcggggctgcactccacatgtgctctatctttggcatacgtggacatgccacgtcaggtggacaaaatttgggataacattttccccccaagtccctgttcaaatgtctggttggatagagactttctagctgttatcttgtctgtagtagtctttgttgagtaaccttatctagccaagtgttggctttttggctgacatgctttggatatttgatcttctctatttatatacacctcatcttcttttcttggatatcgcttctttgtaactgccattaacaagtttcaagcttttggaaactttttgattcatgttagtttgtaatctnnttggtatattgatcctcatgacaattttggaatgtgcaatgtgtgacttttatataagaaggattcgattttggccttcgctataattctagagtctttgagtcataagaaatacgaggctcataatcgagttttagacacacattagaattcaaaacttaccttgatcggcctaggaggtcttgcttgagacctggccaaccataattcttgatcatgggagttggccagctttagggattttcccttataaagcttgcctgttcatgcttgggtttgatgaccctagccagctcttggctgagtcatgggaccatggccgcaaggcttgcgaaccttggccgtcatgggccttggttccaagtaggtggcaagttttctgtcctctcttgactttggcaagaatctagctctataggcatatacaacttagcctcatatgtggtttccttaactctgtatgattcttaatggtgagtctattatagttgaatattcaacttaagactcaacatggcttggttcctaacatggcttggttcctataaggaactctgccttaaccgtagcctagtacgtggcccatataggagctctgtccaattcttttctagctatgcggttctagtagggcctttgcctcatgcatgcgaaccgatctcatatctggcctcaaggctttcatgttcttgctttggcctataggccctttgtttttgaacactactattatttagccttaaagccatctatgacggacatatgatcgtcttgactgtcttcttatggccatgaaaggtaagggtccggatttactttgtctagccaaagtatgcctgtacgacttagaggtaggtttagtagcttattttaagccttaaaatttctcagaataagttcattgtgccagttcgatgcattgtacggtatgggcacccctcaagcgaccatgcatgcaagtctctttgtcacttgctattcacaaagtttcataaactttgcctgggttcttcctaggggtggtgtccatagtatgcatatggaactaaaagagtaactttaagaagttaatcttgtgagcaagtggtttagacacggtcggtctaatgtgtaacaaaagcttacaacttagtgtccgcttttgaaattatgtagtggctacccttacgcggcttatcgaagcagaggccaccgttgaagaatggtgggagaccacgccaagaaggccatgggtactagcgcttttatggattcttgcacgatgaaatgttagaggaacttaattgacaagttggccagtgagagtacttaccgagatgttccctatttcaatgtttgagtagaagtaattcatttgattttgttttcctctgtgtttgcgttattgcagctgcgattagctggtgccatggcaaagacaagatcaaagattcaggggaaacccaaatctgcaaccaaacttgcaaagaagaagggattgaaagggaagaagtatggaaattgctccattccgatggagcaaatctctggaatcgaagctttggaggtctcggaggaggacgacctggtggaggatgatcctgccctgaaagatgttttgcagtcgcctctgtctcctaaatcttccgtagctgcgatccagaggcaacaagagcaagttgatagtgaaggctttacaaaggtcataagcactaggaaaaaagctgatagagacactacaattacagcagaaccaaaggagacaatagtgcaaaatgttttccaggtccttgatgaacaagatggggatgctaaaataggggaggtttatgcagatttggttgaaacaggagggtgggaggaccctctctttctaatggatagactcctacgatggaatgttagaggagccaacaatcaacacaaacaacaattaataaagcaatttattaattcccaaaaggttgattttgttgggctccttgagactagagtcaagccaccaaaacttggtacattgtactcgaatgtttttcaaaattggtgtttttcttctaatatagcgtggcatgcaggtggtaagattgttattgcttggaacccatggaggttcactgttgacatccttaaatgcactagccaacttatgcatttaaagctgtcaacagttgaaggctttggcagttttttaactatagtatatgcttccaataacaaagttgagagaaggatgttatggaaagatttgatgggcttgaacactatagagaactagttcttaatgggagacttaaaatgacatcctatctaaaggaagaaagagtggggcatagagtcaaattctacctggataattagttcttaagttgtgtaaattcatgtcagttgaaggatatcaaagcaagtggaaatttcatcacttggtctaacaaaaaacatggtgatgaaaggatcttttccaagattgatcgagtacttgccaacaaaacttggattaacaaatatgatcgggcagaggcaatttttttaaacgaagggctttttgatcatactcctgtgattttatctcttcacccaaaactagtgagtggaaggaagccatttaaatactttaatatgtggaaatcacatcctaagtatgagagaggttttaaagagatttgggatagacctattgctagcatgaaaatgtttcaagtcatatctaagatgaagcaattcaaactcaagcttaaagagattaataaggagggttttcatgatttacaggctgctgtttctagaaataaattcgacttagatgctctacaacactagattcaccaaaacccattagattttcagctgcattctcaagaaaaagaagctagagagaagttgataaagtctcaaagtgattatgcatccttccttcatcagaaagcaaaagctgcttggttacaaagtggggattgtaatacagccctatttcatgactgtataaagcaaagacagcggcaaaataggatcttatccattgagaagcttgatgggagtagagttaatgaaccttctaagataacagaagttttcctggaattctataacaacttactcagcaccagaatggaaaacaaaaggaaaatagagaagagaatattggctaggggctccactctcactcctgatcatgtcagggtgcttactcacaaattcacaagtgatgatgtgaagaaacctattttcagtatccctgggaacaagtcacctggtcctgatggatactcaagtagcttgtttcaagataattgggagtatattggaggggatatcagtgcagctgtgctttcatttttggactcaggtaacattcttaaagaaattaattcaactataattaccttggttccaaaatgtaaatgccctaattctgttaaggattttagaccaatnnnttgttgcaatgttatctataagattgcaactaagctcttgagttctagaatcagtaacatccttcctgatataatatctcattcctaaggaggttttataaaaggaaggttcatagggcataatattatgatttggcaagatctggtaagacgttatggaaggaaagcgaataaacctatattgaaaagttcattgtttttccctctcctttgctctgttcagcttctgagttgtagccatggctaaaacaagatccaaagttcagggaaaacaaaccactatgatcaagaagaagaagaaaggtctgacttcaagttcggatgtgaggaaaactaaatctctggatgctattcttggtgtagagccagcgatcttttcggatgaagatgaaggggagatttcagaggcgactgaagcagaacgggaacttcaaaatccacaatgccaggatctttttcaagaacctttgtcgcctaggtcatcactccgatcaatcaggcatcaagaaaatatcaggaaagacattgttgtattgctggatactgctcagggttctcgaagtgcttctacgcaggtgaaaggtaatcctaatcccattcctctgcgatctggttgcgttcaaaaaaatttggagaaatcttttgctaagaatgatattggaagtagagttaagatcacgaaggagtatatccatgaggaaattgaattctggttgcctccaattgtttattatgtgcttggggctaatcctccattgcaagtattggaagggtttgctaggagaatgtggaaagagaaggtagaatgagtgggcatggtctcatatgggatttttctgattagattccattcaatggaagatagggatgaaatactcaagggaggttatatcttcttcaataagagaccgctagtaacgaaggcatgggatccagaggtgaatttcaaaagggaggatatttgaatggcaccaatttgggtgcatttggatgatctagaattgaagtattggggggaaaagtcgttattcaagattattgggcaaatagggaaacctataatggtggatgatgctactaaaatgagagacaaactaagtttccctagggtgcttattgaagtttcattgcagcaagattatccggatttgattgagtttgaacatgggaaaggctttactacttctgtggcaattacttatgaatggaagccgttggtgtgtagtcactgctcgggaatgggacatattgctgcagattgtagaaagaaattggaaaggaagcaggaatggatagtcaaggatgtgcaaaagcaggataaggctgaggtgaaacctgatgctgatgggtttcggccggttactaaaggctggaagattaagaaccaaggagagggattagtggctacaggtactagtaactctttccaggtattacaatagattgataaaggaagggagaatgatcaaatgggtgcagagcaggagattgttgacaagggaggggggagatccctctcttggagatggataaaataatggcttggaatgtccggggaataaacaaccagcaaaagcaaatgtcagtcaagcaattgattgagcaacaaaagatagggctggtttgactcctcgagacaagagttaaggctcggaattcgggagccttatatgttcgtatgtttgaagggtggtgttttacatcgaatagtgcttgacacaagggaggtagaataatagtgtgttggaagccggatagctttgtggtcaatatccttaaatgtactagccaaatgattcatctctttgtggaatccatagatagaaaggcaagattttttgttacctttatttatgggctcaactctgatgaagggagaagtatcctttggcaagacctaaaggagtttgctattaaggaggcttggttggttcatggggatttcaatgagatgcttcacaaggaagagagaattggttttcgagcaaggtataaagaagcgagggagtttcatgagtgtgtggaagtttgcaaattggaagatgttaagtatacatggaacttttttacttggagtaacaagcaacatggtgaagatagaatgtactccaagatcgatagagttctagcgaatcaactttggatggatttgtttccttctgctgaggtttattttaaaaatgaaggtatttttgaccattctcaagctatactaactatctactatatgccaagtgggcacaaaaggcatttttgttattttaggatgtggtccaagcacatacttataaggatttgatctctgatagttgggcaaagcaggtaaaaggttcgaaaatgtatcaagttgtgattaaactgagaagcttaaagcagggactatatgctttgaacaggaggcactataatgatgtacctgccactgctgtcacagcaaaggaagaccttgataactgccaagagagactgaggaatgaccctttaaatggtgaattggttgaaagtgggagacataaattctggattttttcatgcttaccttcgggccagaagaactcagaatagggtgccttctattacaaacctggaaggacacagggtggaaaaacctgatcaggtgatcgatgcatttatgtcttttaaccaaaaacttttaggcagcagaatgagcagtaggaaaccagttcagaattgtgtaataaggtaggggccgattgtatccagggaacaagcagatatgcttctagctgagtacaggtttgatgaagtgaagaaggctatttttgatatcccagggaacaaagctcaggccccgatgggtatgggagtttcttttttcaggacaactggaagataataggcaaagatacagctgatgctattatttcattccttcattcctagcaactcttaaaggaattgaactctactgtacttacccttgtgcctaaaagtaagtgtccgaacacgatgggggattataggcctattgcttgctgcaatgtgctttataaggctattaccaaacttatatgcactcggcttaaaaggattctaccagaattagtggcaaagaatcaaggaggatttgttcatggaagatttattggacacaacatcatgatttgtcaagatctcatcagaaactatggtaggaggacaaaaaaagcaaactatatgatcaagttggatctacagaagacctatgataccattgagtgggatttcatggaagagatgctctatggatttcaattcccaccaaaattcatcaacttggttatgacttgtgttaggactcctcgtttctctttgatgataaatggatcattacatggtttttttgaggctaagcgaggtttgaggtagggagatccaatgtccccacttttatttgtcatgagaatggaatacctgccccgaatcatgaggaaggttgggaagaagcaaggtttatttttatgagagatgtgggggtcttgagctgaatcatttaagctttgctgatgatgttttattgttttgcaatggagacttcaagagcatatattacatgttgcagggactgaaactcttctctcacacatcaggcttgtttcctaacccatctaaatctgttgtttattgtagcaacatgactgaggcagatgtacatagaatcctagatgcattaggctttcaaaagcaagagtttccattcaggtatttgggtgtgcctatttttccaaagagaatctcctcagcagattgtaaactcttggtggaaaagatgatggctcggatcaaaacttggagctcgagaaatctttcctttgctggacgtgtggtactcatgaactcagttctcatggccattcacttttattggtaccaagtgatgatgctgccaaagaaaattgtaagtgaaattgagtctatttgccatagttttttatggaatggccaatacacattaacaggtgttcttgcggttgcttgggcctcggtttgtcaatctaaaagctcaggtggattaggattccggtgcatctcggattggaacaaagcggccatattcaaatatgtttgggatatttccaagaaggaagataacatatgggttaaatgggttcataatgtctacattaaggatgaggattggtgtacctataaacctacaactcaagcaagttggtattggagaaaattggtgatggttaaagaaaaaatgaagagtttgggctccttaaacatggcacaagaaaaatacttggtggctgttggttaaagagaattacatgtccagtcggctagagtggattgggacaagtttgtttggaaccggttcaatattccaaggcatagtttcattgcatggttggcgatgcttaggaagttgaagacaaaggaaagattgaagagaattggagtaattgagagagatgattgcctactatgtaactgtggcagcgagaccatcgaacatctctttttttgctgttagttttcaaaggattttttgatacaaatcaaacggtggctgcaatggaaagcctcggcagcaaccctgaagaatatcagcaagtggttaactaaggctagatgcaacagcttcaaaaagaaagtgtatgctgctaccatagcagccttgatctatttgatttggagcaaccgaaaaaatgttttttggaatggggagatagaaaattatgatagaattgtttgcaaagttaaagctgtcattaagaatagaatagtttgtatatggcctaaagatgtaactagtagtgaagagagttgtttcaactcattgtaagtacattgtaaagattatagagttttttttttggaggccttctattgagggtgctcttaggttgtataaattgttgtttggttttaatacacttgctaatttaccaaaaaaaaagcgaataaaccaagttgcatgatcaagcttgatctccaaaaggcatatcatactattgaatgggaatttatagaggaggttttaacaggcttgaatttcccccaaagtttcatccgattagttatgaattgcatctctacccctaagttctctcttatgttcaatggaaccttgcatggtttctttgaatctaagagagggcttagacaaggggatcccatgtcccccttgctgtttgttctaggtatggaataattgtctcggttaatgggaaagattggagacaaagaggatttttacttccatgacaaatgtgccggtcttaaattgaatcaccttgcttttgcggatgatgttcttatgtttttccatggagatctcaaaagtgtgatgtatgtgttacaggctttgaagcttttttctatcacatctggtcttcattctaatccaattaaaatggcaatttattgctgtaacatggatcaaggatgtgtaaacaagatcttgcacctttcaggatacatgaggcaaaatcttcctttcacatatttggggatcccaatttgtgcaaagaagatattagggaaggaatgtgaactactagcacagaaaatgacggcaagaatcaggagctggagttcaaggaatctctcctttgcaggtcgaataacattgatcaactcagttcttatagctattcaagtttattggagtcaaatagtgattatgccaaagaaaattctcaagtctattgaatctatatgtagagcattcctttggaaagggcaagcattgtttcacggggcaggggcagtagcttgggatatagtgtgttaaccaaaagctgaagggggattaggaatcaaaaagttggaagaatggaacaaggcagccatgagtaagtatgtgtgggctatctcgaaccaccaagagagtctttggcttcaatgggttcatagtgtgtacatcaaagatcaaaattggtggagttacaatgcttctattcatgcgagttggtattggaagaagcttgtaaccatcaagaaccaactcaccaacttagctgattgtgtttcatttcagcaaggaaaatatacaatagtagacggttatagcttgtttactgctccacagcctagagtgaagtggtgtaagaaggtatgggctcgaatgaacacaccaaaacataacagaacaaaacatagtgtgatactattgctagcaatgcttaatcgactgaaaacaaaagaaagattgaaaaagtttggcatcctggtgcaagatcactacagtttgtgtgattctaacattgaaaatgagtagcatttattttttgattgctgtctatctacttaatgctttgatgaaatcaaggaatggcttgattggaaggcaaaaaccaggtctcttccacaactggttcggtagattggtagggcaagagtttctaagtttaaaaaattaatgctggctgttactatagcagcagtggtataccacatttggcaagcaaggaatgaggtcgtttggcatggaagcaaggtgaataaatgtcaaatagttgaagacatcaagtggagtttgaagacccgaattaacatgttttttccaaagaaaactcaaagtatagagattggttttatgctttataatggatttgtaaaataaagatttgaattgaggaaaagaaattgtataaatgtttaggccctagtgtaggtgctattagactgtaaatatgattgtgaaatataactcactgatttatcaaaaaaaaaaattttgggtagaagttctaacttcaagttctcgttgcacttgccagacttgtgtgcacctttactgttattaggaaatatggtgtggaccttctcagttttgcctgaacatgcttactgtaggggatctgctgtcaaggaatattcttcaaggagtaattctcttgtgaagaatttcttttctcgatctatttgttgacgagcctagtaactccttgtgcgcaggcatgctactttgagttggcttggtctcttcttctttcccttttattaagggatcctgctagcaagatgttgtgtacctcttggtcactgtagaccagaagtatgagagcagactggtggtggattgggctggccagggtaagaccaagtggacaggtggtcagccatattgagagagcattgcttgggagattggctgaggccatggctggccaacatgtggaggtggtggccgaccagaatgtggattctatggccggccaacttgctaaggacatggttggccaaccttctaaaggcccagtcaatgtagtggttggatcctatttgcattcgattggcttttcccccagcataattgacatagagcgtttgtgcacttctgccataagctatatagcttctttcttggaaatggtctttggtggtgtttgagtaccacttctgtgtgttaggttgtgcaagattggacatcttgtagtcgtcctcctaatccctactctctagtaaggtctttttttttggagaaataagcaacaataggtgtcatccatgttggagtgtcatctagatgttgacctcctctaggacaaaaatgctagattcttctaggaactaaatgggcaccaagttttctttgtcagctatggtactgctcgctaggagggcaagtgcgtctgctatggcattttgttctttttgaaataggacttagttctttgaagaattgagcaggtaccaagtttgccttggttgtcaaggcgcatctggctagttgagcgagtgcatcggctgttgtgctgtctttgggggcttgccttctaatatagcctttgagttgtcttaacaactctgataggccatcatattcttgtattgagctgtatattcacctaggacataacctacgactagctgagagtcgtggtgcatgttgaggtggttagctcgcgcttcgagtgctaaccttggggccagcatttggagcttcatgtttagtctcattgttagaagctttgtaactgactttgttgccttgcgccttaagggccaggcttgcatcaggcatgtggtcaatgcacctcttggattctcgctcttgcttcttctctggctcttgattttctcctgaactttgagggatttgggtagatgtgcttctatgattagccatcacgctagtgagagcttggccttttgtggccatgcctagttgtgaggtgcttttatgttagccaagtctcaatggttcacttgagtagctggcataatgctccagatttctgtagaacctaccgcaactgttgatcggtgtacacctctatggggtgtatctagaagtatagccttaactttgtggaagccaagagcaagctgtgggtcaggttctccatgagtgggaactaactttcaatgttgatcactctcttgttggtgtaatatacagggtgttgtacactgtcttcttctcttgtgagggcagcactcacaacatgtgttgtgactgcttggtccacgcctagctcttctttgtctagggatttgggcaacacaggtggtcgagccaatcgttttctttagctcctgggatgcaatttcacattcctttgtccactcaaatttattgtcgcttctgcttcgtgtcgaagaagggtacccatttgtctgtatacttaggcacaagtccgctaagtgcagcagtgcatcccatttggatttgtacttccttgattgttgtgtgcgacttcatgttcaaaagggcttggatcttgtatgggtttgagtttcttcatgttgtagctgtggaggattttgaaataatctgtctagggcctccatatgccttaacccttttggacttagaaagcatgtcgtccacgcacaccttcatgttgcgactgataggatcgttgaacattttgttcataagcttcttatgtgtggcccctgttttcttcagccctaaagggcgtgactttgtagcagcacatgcctaagtctgtcacaaagcttgtatactcctgatctggtgggtgcatcttctttttcttggctttggacaaggccaagttatgatgggcagattgttgatctcctcttgacatccaccccatgctttgtttggaatttcaggcaaaggtggtagatggatgttatcgccttcaaattgtataggcttggttagcctattatggcgttggaaaccgagggaatgttgatcatgatgttttgcaccatcagagttctagtggttggattttctccaacagtaagaggtaatctgatatacccgatgagagtgatgcttcggccagagaggccatacatcacttgattgtagggcgccaagtcagtgagttggagcctcatcttttcatgtgttgattttgaaaagaatgttaaggaaggctccattgtccaccatgtatcttgctgcagttatattaccaatttgtacggtaacgaccaaggggtcattgtgtgggaaactgtcttggacatgatctcctttttgagaaagagatcgtgggcttgccaagctttggttgtttagagcctcgctcttcacctaccaggaagtcgcttttgggctcgtgatgaagtttctgagcatagtgctctctggctttgttggtctcgcctgtaatatgggatctgccaatgtcaacccctaagtatcctgccatctgaggtttgggaagaattggtggtacttgcctgtacgcttggccaaagatggtgaccaacctttggagatggaggccatccttcggaggtagaggctagacttcaaagattgtggctagccttcgaaggtatgggccaggcttcggagatggaggccaaacttctaattgcttgttgttgactcgccctactggaacgtttagtgatgccttgctttgggagttttgatagaagagttaagaatacacacttctcctccttcttccttggacttcatggcataaatggatcgttgaattttcctcttttgcgattatgttggttagagtcatcgttgttgggtagtgtttggggcgctatgaggccctattttcggtagtcattgtcttcccctcttatttgggctttcgatacaacttcttctaactttatgaagccatcagctcgctcaaggaactcctccatgctgttcgttgagatcatcttgatatctttctagaagtcactcaatggtaggatgccttcgagtatggccgtctatcgaccttattctgtcaagcctgtgaccttggtggccttagccatgaactgttgaatgtagtccttcaagggttcttcttgtctttgctttattttgacaagaccctctagtcgggcaggtatttatcttgaagtagagaattgaatatagaactctcaggagagctcttcccaagagttaaatcttcctgggactagcttaaaataccattgttgggctactttagctagagtttccagaaaggttcggcatcgcacatctccagatacttgtaggacatctgtttggatcttaaagtacgttaggtgtactagagggttttctcttcccgtgtacatcttccaagccggcatcttgaatttgggtaagggcaaggcattgatgtatgccaagaatggtgatccccttgccctgtctagcttgagttctgaaggttttagaccagctaggcccttgagcatgtctcgtatttgatccaactatggttgcacaaaagggtctgttgctgtaagggcctggttgattgagctgcaaccttggattggccagagcctagccaactatacattgggagagggtatactcaaggttggccagtgctaagtctggtgcttgtacatggtcggccacccctaagttgggcagggcctagccacccacacttctttgcctggctagtggagcttgtgcattgacatagggcaaatcataccagttgttggagtttggtggatgtaactgtctaaagttatgaacttcacatctaaattttttgttttgggtgtttccacctactcccgatcctcgttggttgaaaattgatcttcgggagacttgctccccttagggagggactgctcttctctggctagccatggggattgctagaggaggctggccagccatgggtattgctagaggagtctgactagctatgggtactactggaggaggttggctgactgtggggactcctattagtggttgtccagcaacaagatggacaaaggggctatttgttggaattattttacca

SEQ ID NO: 27699 - DNA, 3231 bp, Cannabis sativa
tttttttttttagatattttgagaaattacaactcattttttataagacaacttatattaaagttatataacctctttttactaatttttttttaaataaaataatttaagatactaaactagtgtttaaaataattaattgtatgcgtataaataaaaataagcacacgtaaaattaaatattataaattattcaatatttttttaaaaaaaaattgaagaaatgcttactatgattattatatacactatcatataaaagtgaaaataaataagtattcactaatataaaagaaaacataatagtacccctataaatgtatgtcattatgcataaatttaatttttttagagtacaatgatttcattcattcatatcaatactcaatactaagctattgtaggttattattatttatttatatattttaaaaaaacctaaagtttatgttatttttattcaaataaataaaactaaaatttcaacattttatgtacaatcaatgaatcaaatcttattcatataattatcacacaatcatgatatatatatatgcattagaaatttaaaaataaaataaaataaaatcatgataaactatattttattctacattgttaattaaaagataccaattttgtgttaatttccaattttaaacatgatgaatctccaagtttaataataaattttgttctctaatcttgaaggtacaaaataattaattaattaagttgtattatattctaatccatattaggaaaaaggaagaaaaagacagattcgttgcttctttttcctctgccaaagtaagattatttagtgttatttcacatgaaatttattataacattaaataaataaaataaaataaaataaaataaacacacatatgaatttattaaatcgaccgcagtccatggtaaaaatccgacagttgacccgagagcctctgcaatatcaaccgtcggatcttctttcttctcgatcgaacggtggtccaacccgatccaacggttaaaattctcgaacgtaacgacataagcatcagtatctcccacgtgccacgtggcccaatccaaagctcaaactcaacctcctcgcctatattttattcttttcctcttttgcccttttgcacgtgatacaataaccccggtttaacaaaccgaaggaaagggtaaaatggtaatttcgtaatgttcttcttagcaccggagctagagaaacttcaacgacgttgacgctccaaccagatttgcaggaccctcttggtccaatcccacgtatagtttagagagagagagagaggttttcaggtagaagcaacggttgacgtgtttttggagatcgtgggtagggtaggtgaaacgacgccgtttttcactgttgtatacaattttttttcttcctcagttttcttcttcttctctgtgtttgggtctttcttactttattcggacgcgtaaagaactttttcttttattttttttttaagataaaaaatattatctttttgctaattaaacaatttcggcttcggaaattttggagctttatagctatttatagggaagtgacattttcacgattcttcttcttctttttggtgagtcttccagcttgtataagctagtttgcttcgttaatcagagaaataataccctttttccgattatgcattttcctcatctggctttctagggaagtttggtacaaggatattaagtaaccgttactcattgatttcagattaagtagaattgagtagtaatggaaggtgcattggtgaaattttgctactcaaacagagatgttaatacaaaatctgagttttttaagtaattagagccgttggggaatcgttttttttttttcttgttcattttcgtttcagtatcaacgttaaaatgcttgagaatcgggtttgtattaattacagaaactgggatcaatctctatataaagctttggattttcttcattttgggtatgttgcagaggaatagaggtgaagaagaagaagaattaagaagacaaaagaagggtttttgttagtaaatctgtaaaaggtttcagaaaccacagcatcttcagcagtagattcagggaattaagctacattccctcaaggatttatgtgttttgtttaacggttttgtgaaagtgacaaaagaaattaaaggtaacatttttatttttgtgaggtttctatgtgtttctacatcttgtttcttagctttagtaaaatgtagatagataatttatgtgggtttgtgtgtgtatgggagaaagtaagaaaggtgtcaagttgaaagcgatggtctggtgagttgggaccattttttttctgtaaaaagctccaaaattgcattggccactgaaaataatatgacactctgttacttcgtcttcaagcatagtcggttggcactaaggaaagttttcagttttgtcatttgcattttggtaacagttgaagcaaaaaactaaagaaggaaagaaagaaagagaaaaattgttttcaattacatgctattctagcttggattcaaagaataagcaaggtgctcaagtgttttaaatcgtaatatagccatgtttaaattgattttagtttaatatttattttatttttttaatgttagttgaattatgctcattattatctttaggttgttggattaaagacgtggttagcttgttgttgctgatttgacccttaattagtttagtgttcttttatgttttttttttctggtgtggttgcctaattacaatgattgacttgttgttgcagatgatctggtagtgaagtgcttgattccttttggaaattagaatttctaccttttcttaaggtttcaaccatcttgcacttttggaaaacaagagtgactgtgagtagtacttgtcttttcatcttttcatctttgagaagttcttaatttgattaaattgataattagagttcttgttaacacacagtgaagggttaattagcgataatgggagcaattgggggagaagagcttatgaagtgggagaagatgcaaggagcaagtgggcgcgaggagaagattcttgttttggtgaggttgagacctttgaatgagaaggagattgcatcaaatgaggtagcagactgggaatgcatcaatgacaccactgtcctataccgaaataccctgcgagaggggtcaacatttccaaatgcatattccttcggt

SEQ ID NO: 27700 - DNA, 2731 bp, Cannabis sativa
taccttaaatcacaccagacctcgttaaataccaactttaagaccatccaaaatggcttcaagttcagctgcatgtggtaaaatggccccaatctgaggattagaagtagcaaaaagaagctccccatcatcattcctaatcacaaacccgcctccatatcgatcccgctactgtgagacccctgcatccacgtttatggtaaaagaaccaacttctggttttgccaacaccacactccttgattttgctggcccttgctccccctactgttactttcttggaattcccttaaaaagttgccaccccattccaatatatcttcgaccttaggttggaaaccggcatggtgcacactgtgataggtagttgacctcttagccattaaaacaacgcagagagagagagagagagaaatgaaaaggagagaaagaagtctctaatattattgattaagcatttgttacatgatttgatatatatacataacagtcaagaataacaaacacctaaccgactaactaacaagagacagttgacagccaaccaaacctaacaactaacagaattaactgaattaacagaatcctaacaacctgtcctaatacgccccctcaaacttataattggagggatcaccaattgtaagtttgtgcctaaaggaggagaacagttgactagatataggtttgataaggccatcagcaatttggtcaatagctaggacatgttttatttgaaccaaatgctgaagaatcttctctcggacaaagtaaagatcagttcaatgtgctaggtgcgagcatgcagaattggattggcagtaagaagcatggtgctcaaattgtcacaccaaacagttggagatctaggcagaggaatgtgcaactcagtagacaaagagtggagccagttgagttcagtggcagtttgagctaagcttcgaaattcaacttcagtactgctcctagacaatgtgtgttgtttcatgcattgccaggctatgagatttcagccaaagaatattgcaaaatcagaggttgaacgtttgtcatcagggtctgtggcccagtctgcatcacaaaatgcagtaagatcaaggtgatcatatttgttaagattaaggccatagtctatagtgccactgagatatcgtaagattctcttaacaacatgccaatgagattgtaagggattaaccataaattggcaaactttgttgacactaaatgaaatcgcaagcctggtgataaccaaatattgtagggctcctacaatagacctatatagttgagggttgtcaacagggggactgccatatgctaataatttgagaccactgaccatgggagtgttggaaggcttggcagcattcatctcagctttgtgaaagaggtccctgatgtatttggcttgagaccagtgaagaccactggatgtagaagtaactttaatgccaagaaagaactgcagatctcccatatctttaagagcaaatttggcattaagagcatctgtgtaatgagagattagtttgggatcactgcctgtgatgatatgtcatcaacataaactaaaataagtgtcactgggagtggtgtgtatcttataaaaagactgtgatcttattttgatgaagcaaatcccaatgacagtaggcaatgatgcagtttctcaaaccaggctcgaggagcatgtttgaggccatataaagccttgtgaagtttgcaaacaaggtctggagagggaggagggtcttcaaagccaagggttgcagcatataaacctcttcttgcaaatcaccattcaagaaagcattatgtacatctaattgctttattggccatcctttggtgagagcaatggtaagaacaactctaatggtgacaggcttgataacaggactgaatgtttctgtgtaatcaaaaccaggctgttgatgaaagccttttacaacaagtctagctttaaacttttggacactcccatctggatttttatttttcctatacactcatttgcaaccaatatcagtccttccaggaggaagcttgacaagggtgtatcttctgtttcttttcaaggcaagaacctcatctgccattgctttgttccagtgtaattgttgtagggcattcttaagggtagtaggaatctcattaacactataggcttttagctttttgattccatttttggcacgagtttgcatgttgtgtgtgttggtagagcagtaacaacaacagtggtaggttgaggtgctggtgcagaaacaagcatgaatggggtctgagtcactggtgttgcatcacaatgtgtaggaagttgaccttggttgtcaacaggttcttgaggaggctcaggatcaagagatgacattggtaggtgacttggttgtggagctagtggaaccattgggacaagcagttgtggtgatgaagtagattaggtaccttgtgaattatgatcttcaccacttgcaagcacgtgtggatcagaaacaccagcaacatgtgtgtgagcttgggacatatcaatgtcattaggaaataatgattcaacagtataaggcacatgaacaaggggaactctgctagatgtagcagacatagactcaggagaaatagggttttgtgatgtgggtgagtgatgagggaaggatgtttcatcaaaaataacatctcttgagatgtatagtctgccagattgatccaaacacttgtagcccttatg

SEQ ID NO: 27701 - DNA, 1157 bp, Cannabis sativa
tcagaagtgaaagggggttggaaaataattgcaacacttcactctaagaaatacaagcatttttcttcctccattgttgctctgaatatttcttcaagtttctatatttttatattttcatcttcattctatgtcttgtgtttgagtttcgatttttcaggcttaagttagttgacgagtgtcaattattgaagtgggaaaatttgaaggaattgtttttactcttatcttgaaaatcaaattttacacacactcaagccaaacttgttcttatttcttttagtatacttgcaattctctctagattcctaaattatatttcatctaattatagagagagttttttgtatattaccatgtaaaaattcattcattgtattgaggtgaggttgacatcgatattgaaaaataacttgggtataagtgaggttgataccaattttgtaaacaaccaaattaggtgagattgacacatcgataatctagtgaggttgataccccgttgaaaaaaactattaggtttgggaaagaccctaaggaaaaatccccctatttaaggactcgtcatacacgttaacttggcccattaattgaacttaatgctaggtccataactttaaagaccaaagatgtacggagcttgagttctcccaatccttgtaaaattaggagtttgtaatttctatccttaaactccttacatcaagtttactaattgattttacttgtgtttgtttatttactttgcattaaatttcaacctttgtataaaatgtattgttgatttttaaatttttaaatttttaaaattagtttaaatttacaattcaatctctctcttagaaacatatcttacgagaacaaagaattccataaacatagcttacacataaaaaaaaaaaaaaaaaaaaaaagccatgagagataggaaaaagttaaactactataaataaagattgaaaaccatagtcatacttcatctaattttcacttaaatataagtggtatatacactatatagtaacttttctctaaaatttatatttatactttaacaagaaaatttttacatttatactttttcacctttgtttttttttttttaatttttactgttttttattaattaattttttacaaaattttattttattatt

SEQ ID NO: 27702 - DNA, 2705 bp, Cannabis sativa
gggattaagtaacttaagctgaaagcccaaactaacatcattttgggcctttataaaagaagctcacaaatgaatttttgattcggtgattttcacgcctcagtcagattaagaggcgcctcacctgtgtgacacgtacacctctttgctccatacaaaggcgcacaccttagttcgaaaaagatttgcgttgcctcagaatcacaattttaaatactggggaggatagagaaagtgaaaagagaatgggggagagggagtgagttgatggaggatagagaaagtgaatagagaatgtggggagaggttgtgagttgatgaaggaaggatacactatgaagatagtgtgtagaggatagggaaagtcaatggagagtggggggagagggagtgagttaatgaagggaggctacataatgaaataggagaggagagagtgtatagagacaaaaaaataccaattatgttctcttttttggtttcaaaaatatttttttttttttgaattaataaaagaagttttaccaatcgttatttttttttttaaatatcttttagatttttctgataatttattttaaaaaaatatattagagaaaagggtgctaccctgtgtgttttgtagctagcacatagggttaatggttttgagtgttgttataaagacacgttaaggtggacaacccacatggtgtgccactttatatgtggttgatggtgtctaacgctgattagattataacgagtggggtctgcttttaaattcaaccattcataaaaattcataaagtggtcaccttatctggtgctgggtatcttaaggtgttaccgcattcatctttaagactatatcttactggtgtttatatactattatgtcttaacatctattctttgaaaaactaggttggctacatcggacaaccttcttgtgtcaatccaagacaagataaagtgggctgatactgtcagtgacttggacaggaaacataagaaggatgttgaagataaggtggaagaagtgaagaagtccctttccctcaaggtcagtaaattagtactatcttttttatttttagctttctaacatagttattttctcctaattaaatggaagcatttatcaaatggtaactaccaactgtttctaatatatataaatatatttgtgtgtgtatatataaaaatgatttgcacacactaacaaaacaaagttgcatgaaatttatcctatcgtaataatctatctttctgggtatatgatttagtcaaatttgttatccaagagccgtagctcaaattggcagatattgtatttttttcttggcattttgtgattttagtaaagcgtcacaaaagaacgaaaagcaataagattgctgcagatattgtttaatagagacatctaattgtttttttgctgtcctacaaattattaatttatgaggtggttttatatgatcttggcttctaatgctttatagaatttataaaatcttcaattttactgttttgttacagttaagcgtgtgtttgtattgggaagtatcaacaattatagtcacttgactaaattattgtcggagcttaaaatttaagaactaattttagaagcctaatatttaaactcttaacatatggtatctgcactagaaattgttcaaatattttcattgtaagaaataaatcaactagcaagtaactttccaattctaacaagtcacttctgtagtcatttattacttttaacttgctattcatattcttgcaaaaaaaagcaaacttgctattcatagagaaaactatttgagcgattgagaaatgtaaaagaatttcttatgccatttaagacccctggcctcctcaacatgagtatatgaagagtctgttattaaattgtgggatattgtggtcgatgtgtcttacttacgtcgtggcagaagttacaaactgtaagcaggccgacattgagttccgagggcatgaggaggtcttctctgaacctggtggagtgatggactatgaggaagaccgtagccgaccaaagaggtaaagggagacttaattcacacagcttattttgagaggtggtccaacttttttcagtgcctgaaaaaaaaatgctataaatatcattttattgtattaatctcgtggttttttcacattttaataaaaatgggaaattatcctacctcccccatggtgtaaattttattgtttatttaacggcctattgatcagtgtttgattgtcacattaaacactgcaggagacgacatccaatctcttgaaaatatggatgagtggtgcgactttggatgggttcgggcgattgccttgatttttgccaatggcattccctagtccttcagccgtggatcactgaacttgaagaaaatagtgtctggtactaaacctgttgttgatgcttcaggctctttctttggtagactttgtagccattgtttctcgaattgagttgtcaggaggaaaactagatttgttggaacggctaacattttgtgaatctattactactgaataacttgtaatttcattgtgctttttgatgtttcaattaaattagttcatacaagtgattttttcttatattggaattccatttattaattgttcatggttgtctttctcaccttcctttgcacgatcgatactacatcgtgtcagaaacaccaagaatt

SEQ ID NO: 27703 - DNA, 1385 bp, Cannabis sativa
agtcactagatgagactagcagtataccaagttaataaaatctttcgcatatatgtattattatatatattactactatataaaattgtaaatcaccaaataaaagaataagcttttgattgttggaaaaagttgtgcttcaatagaataacaaactaacataattacaactcaaagtaaaatattacaatgacaaaataagaaattaaataatattacaactctaaacaaaacatacatataaaatgtaaaataaagaattacaactcaaagtaataagttacaaataagatactataatgtaaataacatatatataggagatgtgagagcaatattaacaccacaaccacaagtaataagtagaaaaatcaccaaacttgaacaaaatcttacacttttgtccaaaaatttattttcccttaccacaaaatttagaggaagagacaaattaaaatagctttctagatttatcaagcctattatgtttctaacaatgtgctctcttgattgaaaattaatttctatcaaaatacaaattaccaacacttcatgggtgttaccaacccttaaataagtgtaaatgaggttatagacgttggtgaatgaagctcggacttagcccatccgttcccatgtcgagtaagggttttttttgaaacggttgctctaggcgacttgtcgtcaagctagttgtcagcacactaagttttggagttttgtaactccttttcagcccttattaatttttaatgttttgtacctcattttaatcacataaataagtgttgttacctccgataacagctatataatgatagctttgattcccatatttatttgtgtaataattttcttaattggactctttgaaattgtgatgaagagttacaaaatagttaccagatttgtagaaactacttttattttctctatctataactccctgttacagtattgtccataaaaaaactataatacataaaataataatcaaactatttattatatttatttatcacattatgaatattttattttatatatattatattgaaaataacattgcaaataatataacaatatgaactccataaataaaatgaagtctctgtcacatatttaatagaaattatttaaaaaaaatacaaaaatatagttgtacgaaattttaaatatttttacgattttaaaaattttatttacataaaaatatatattttctatttttttttatgttgtactcttgatattttgttgttggttttttattatttgtatattattttttatgttgtttgaatgatattttactactattttgatgtgattttttttttttattttggttcatttatgaatactgtaaaaatataaacaaaaat

SEQ ID NO: 27704 - DNA, 1698 bp, Cannabis sativa
aaagtgtaatccatcttatgaagaacgacatgtaccatgaaatgtccaaacatattgatatcaagttacactttatcagggacattattgctagcaagaaagttaaagtgaagaagattaacatatatgaaaatctagctgatatgtttactaagtgcgttacgggtgagaagtttaggttatgcctaaagttgttgaatatagaagactgctgatcctccactcattgaggaaaaccttgctgatggaacgattttacctatttgtttcttgctcagaattcatacttgttcaagtatataaacgaggtagaatttgtggagtttatatacttgtacaagttagcgagttaagttagtttgggaatcattaattaatctctattgtgttagttggctcaagttctcattgtacttgtcaatatataaagaccattttgttactcattagagtgtggttgagttgagagaaaattgttgtaaaggatttgacacttgtataactcaggccccttgagggagtcattttgtaggagcaaaactccattactgatgaataacactatccctctaatgtacgtactctgagcatcatcatcaatcaatgaaggcaaaacctcaagttagttgcacccaaagagtagatccaagctcactacttgtgatcaaactttgtaatctctgtgtttgtttactctattttactattcatttcagaacattgttatttttggtgttttctttcttattattctttaattctctgtgtttgttatgttcgtggagggtgattaattcaccacaatacttaataaatatttggtatcaataagaatattaaatgtaataattttgagaattccattttcaaaaaaaaaaaaaaaaaacctatgagattatgatataatatttttttttataaactttttatttttttcttaaaagaaattacattggagagatttagatataaaactcttaggtgatttttacatgtgatgtaatggaaataataataagaatataaatagtaatgtaataagaattataataaaattagtattatgatgtttagtttaacactaaaataaaaattgtaattgaataaaataagagtatattgacaaaaatatttttaattttattatttttaatatttaaagttaaataaaagtaaaaaaaagcaaaataaatcttttctaacaatataatcactagttttataatataatttggttttataatataatgagaattacaatatatgatgtaaggttaattaagatttttttctccctaaacatcgacatgtaccaaatcatgcccctgaacttttaaagtggttgaaaatgccccctaaactattagattgttgaatttaaggatttttgttcaattttagtaaaaaaaagtctaacatggataaaaattcaggggcatgatttattacatgtcaaagttcaaggggcatgatttggtagatataaaagtttggagagcattgtttagtacataaacaatcactgaaataatcaaattaaataaaattaaataaaagtccttaaatctaacaatctatatagtcaagggaaatttttaactgccagaaaagatcagggagctgttagacttttatttgggcttacattaaattttattggttttattaaaacttgggttgattggatagttctttgct

SEQ ID NO: 27705 - DNA, 6118 bp, Cannabis sativa
  modified_base (1670)..(1676): a, c, t, g, unknown or other
gagagagagagagagaggtatttggtgatgaaatgaattagggtattagatatgttaggctttatattagggtttgtttataaatgcatcgaagcccattacgggtatgtgtgtgtgtgttttcaattagatgtttcgtcggttttgcactgacacaagttagtgtcagttcacaaccaacactaataattaaccatgaaactgaagcaaagttagcattgattcacaactaatgcaaataaaaaccaacggtaaccttgcatcagtgtataacaacgccaaatttttcagctctttaattgcgtctgtttttaaatttgttcaatgttagagccgacgctaaaatgtcagtttgtagtagtgctctctctttagcctccaagctaaagatgttattcaacttattcataacacaacatccatagaaaatctagatttaaactcaagttataatctatatctgtggatagtactacaaaatctatttctctagatcgaataaacactctgtatatggttacaatactaatcatttaagacacaatgtaagtttacacaataacaaaatctgtttagttaccgataaaatgagaaagaagatggaaaacacagattgaacatgtggactccttgatgctcacaatgtacctctccttaatcgagtccgatgatgaagctttcattgaggtcatgacaaccgtctttgtcttcatcgtcatcctcaacaactaacaaccatgaaaaactgaacaacctaaactagatctaaaaatccaacacaaaacctagatttgataagatgtaaagcaaaaaaaaaaaaaaaaaaaaaacaaagaagaggaagaggagggagacattgagagaaatcaacaccatgagccctttcagatcaagagagagagggagggagaaaaaaaacagaaagaaagaacaagagaggtaacagaggagcagctatctgacggtagtcgatgaaagttgtccgacagaggtgagtgggggaggcagaagagatggggtcctagggtttttattttattttatttttgaaaatgaaataaaaatttcatttatcagatggggttctaggaatttaggtttagttagtgaaaatatagctttttttttttttttaatttatgttataatttgttttagtttttactttgttttattttattctatttataattttattaattttataactttaatgtttttttttattttaaaattaattttgaaattattttttataattttgaaataataatattaagtatactaatatgaatatatcatgtatacgagattatacatataagcaattcttattaactgttaaaagtagtaactaaataaatttattaacgatttaatagttaagagggcgttttaccatcaaaatttatccaaaaaaattaaatacaagtgaaataatactttttaggtttaactaccaaaaacacttttattaattacgagcattattattgggaaccagtgttgcctagcacctctcactacaaaaaattttacttttagtcacaacaaaacttgggactaaaagtaaaaaaaattgtgactaattataaattatcatttatatgttgtgactaaaaattacagtttgttgtggctaaatgtatttttagtcacaatacttattnnnnnnnaaactaaattagtgacaacttttaactaaagattatattttagtcacaagtaacattttgttgtgactacaagttatatttagtcacaaaaaaattattttgtgattaaaaagatgtcactaaaagtaacagaatttttgtagtgtctagacatgtcactttatgattggcttgctattctccctaaaagttattatagtaaactatatggactaatatcaatattaacaaataaaaaaaaaatactatatactactaatactaataccttttaccattcacattaattaccagcccattgttaactcgcgagactaatgtgggtgtaccctagaatcactcatcgtacccttttttgtggtgggtattgtatggacattggtaccctcttattgcacattccatatataattcattcttaaatatacttgatcattctagtatttgttgcttgaatcataggcaaatgggaaaacccaaaaaagaagcctcttccacatatattcgaccacaattttgatatcgtcaactatgtgtgtagtgtgagggaattattaatctctcctcttttgaaaacattattaactaatggatttattcattaatttcaggaaactatagtctataccttttttattttattatttatttagtgttactttattattttatttttgcttttgtttggttccgtagtcaatgatttatttccctggcgtaaaaagcagacccaaacttaacgacatgtctcatatagaaaaccgaaaattcaacagtatagtaatcctaatcaaataaaacgatatcacctttgaaattgtcttagtgaaaaggtatgtgatcaacgacattaaaataaagtcacatcacatcacattcatgcatgcttaccaattgaaactaatttttaagattgaaaaaataatagaacctgtaaatgtcttttggggtttttttgctgtgctgagctggattattacaataaataaataaaaatggtttaagagctcactgaattaaaaattaaaaaaaaaaaaaaagtgtatgtgagctgactgaattaatcaattcttgaaagaaaattaaataaacaagttcgtattaaaaattgcagattaattttcaaccattattaatttatttaatctaaactatccattattatgaataatcacgaccgcaaatggtattgataattgttgactttgtcataattaaggttagggtgagaaataaaaaatatatgaaaataaaggaaaccccaattcaaaaaaaatatatataaataaataaaaaaaaaaatctaaaaaaataatttggggcatctaagagcaactctaataaggagtactgccttgatgggtgcttgtcgaggttggcaatttttatttatttattattttattttatatagaaagaatttcattaatcaaaactaccaaaatacagataatttgatactctatgaaagcgagagagagaatgaagaaaataacagaggatcactctaaagagatgagcactgcaaatatatattggattcaattacagagtttgttacaaaagctacttcaagactcagctgaaggaagaattagttacaactgatatcagaaattatactaacttttagttgtaaaacgaagaaaatatgtgaagaagtggaaaaatgaatcttcattaatcaagaggttcaatacaaatggtgggctatatagcacacaccagaaacaagaacacaccagcaaataaaactaaaataacagaatctaacaacctaactaactcaatacacaacacctttacaaactcttgatactcccccttaaggtggagggtatatattgcaacttcccatcttttctttgagaatttggaattggttaggaagtagagccttagtatatatgtcggctatttgttctttactgctggtatgaacagttttcacaaacccctcttggaccttttcgctcacgagatgacaatcgattttaatgtgcttagttctctcatgaaagaccgagttggcagcaatttgttgagctgctttattgtcacaatgttgcataaaagaaaaaatatgttcatgaaatataacatccctaaaatagaacattttgttagagttgagatcaagaagtttgtaagctttcatccccatgggatagcccataaagacacaaggggtggctctaggtaggagcaaattttaacctagaagcccctaaagtagaggcataagcaaggcacccaaaagcttttaaatgttcataactagggagcttacctctaaggacttcaaaacgagatttgtgcttgagattgggtgtaggagtcctatttatgaggtaggcagctgtgctaatacactctcataggattgaaacaacaaggctctagccgcatttaacaaatttggtgttttctttccacaaccgaattctgttgtgatctttgcacacaagaatgataatgcatgatgcccaaagaagaaaataaagcaggaaattaaagttcttttgcattgtcagaccaaatgcctttaacttgagcattatattgagttttaacgagctgtaagaaagatggaatggttgtttgggcatcagatttattctttataagatgaatccatatgtacctagagcaatcatcaacaatagtaatgaaatacctaaagccctcaacagtttgaatgttatatggcccccaaatatcaatatgaagtaattcaaaacaatgctgagatatgttgtgattgctaacaaaaggtagcttcctatgtttggcaaaatgacaaatggagcaataaaaattagggcaagaagaatattgaaattgtaaagctttatttaatgaatgattctttacacatgaagcatggccaagtccataatgccacaaattttcattacttattttggaatctgaaatagaacaaacaataggaagtttaggttcagacagatagtaaagatttccaattctttcacccatcccaatcacttgattcttggtaaaatcctggatcaaacatttgttaggaagaaacaaaaatgagtaatttgctgaatcggataaagcacaaaccgatattaaattgtgttgaaaatcaggaacacaaagaacattttcaagaatgatattagacactttaacaattccaacaaaagaaactctagtgctgacaccattaggcaaaccaacagatgttattttactatttttctagacaaaaataaacaaggatgaattggagcacacatgatgtgtagctccagtatcaattatccatttagatttaggaacaagagaagccataccaaaaatgttggatacaattggttgttctggctgttgaggttgcacctggttttcttgcagcttctgtgctaacatagccattaatttctgacattgagcagccaagtcttgatgatcatgtactatttcattgctttcatgccctgtagtgcaattagctgaagatctagcttgctgatttcttggttttctaggtgtctctcatggaaatctgccatacaacttgtgtctagggggatacccgtgaattctataacacttagcaatggtctgtccgggaacaccacaatgagaacaaatgggacgcttgtcacctttgttatcagactgattgtgtccacgattagcttgggcattgccagaaaattgacctgtgctatcacttgtttgctggttattctcatattgaggtacaacaatgcctctttgtttctcctcctgaattatgctagcataggctttattcacattaggaagtggatcttgaagcagaatttgagacctagcatttaggtaagactcattcaaaaaaatgaggaactcaagcactttattctcatttttatactcttgaataatcttcaaggctccacaagtgcacactggttatggtctatattcttgtagcaaatcccataaacctttgagtttagtgtaatatgaaatcacatcactagaaccctgggttaatgtctgcatagatccttttactttaaagattctgggggcattcttttgatgaaacctttcctgcaattcaaaccatatacaagaggcatcttccatatacattatactatctgctatactaggagaaacagagttcaagatccacgaaattaccagaaaattacatcgaatccaagaatggtaattttcatcgtcttcctcaggagctgggagtctaccatcaacgaattttatcttgtttcttgttgataatgctaccatcatcgaccttcgccatgagctaaagttgtctgcaccagtaagaatctttggtaccaaggatgaagatgcactgtcagtatttgagagtaaataagggctccaaggatcattagctggtaatttattattttcttcaaagactgcaaatcgattcgattcttcag

SEQ ID NO: 27706 - DNA, 2629 bp, Cannabis sativa
aaaaaaaaaaaaaaaacttggtgatgagttaacaagtaacttggtgcaaggggagggaattcccactgtgactcccgactatctttccgttgtttaatgaacttgacgttctttcagaaaaaaaaaaaagaagtaattctaactaattcaagaggaagctaacaattctaactgaaataacataacagttagcactaactcctaagtgactagcaagcttaacagaaattgtgagtttggctctataaattgaggaaagtgttgacttgaaatggctttttgtgagatcattagcaagttgatcaatagttggaacatgttttacaacaatttgatgattgtgaaccttttcttgaacgaaatacaaatcaagtttaatgtgcttgatttgagcatggagtacctattggttttacggtagcgatccagggaccatgaacctatattcaaagctcaaataaattagatttatttattgagcctaattaatcaaataatctttgtttattcattctataattactccagtgttcattgatataatcaattctagtgattattcctctttgtgtcagttgtaattagttttggtcaaattactgttttaccctttctattacttctttatcgtttagtaccattaattcactagtagaaatataatttagataccatataaatttacgcgcaacgttccagttctagaattaacacataaagggaatcaacccgttagaaaagtcaggaatttcataattataaatcatgttctcagccatccacattattatattcccaaaaaaagaaattgtaagaatcatcttctctgagaattttaacgagtgaatcaaagaaactaatcccaaaaagttggatctcgcaccaggcgcatccattataaatttttggttatgtctttcgggctaaccaatgctccggtggctttcatggatctgatgaatcgagtattcaaagatctcctcgatgtttgtgttatagtctttatagatgatatccttgtcagaagcaaagcatgagcaacattagatgattttgcaaagactacgggaacataaaactaattttaagaagtgcaagttcgagttatcgcaagtatccttcttaggtcatattatcaataaagatgaggttatggtagatccaagaaagatcgagttagtgacggactggccaagaccgaagacattaactaaaatcagaagttttctgggtttagctaggtattatagtcgttttgtggaaggattttctaagattttcacgcctttgacaaagttaactaaaaagatcagtgatttgtgtggattgacaagtgtgaagctagttttcatacttgaaacaacgatttattacaactccagtgttagctttgccatcagaccaaaaaaagtttgttgtttactatgacgtccatagacaatgtttggggtacgttttgatgaaagctaacaaggtcattgcttatgattcttgccaattgaagaaatatgagcaacgttacctaactcatgatttagaactcgctacggtggtgtttgcactaaagatttggcgttattatctttacgtggagaaatgttaaatctatactgaccaagtctcaagtatttctttaatcagaaagatttgaatatgagacaaggacggtagttggaattagttaaagattatgaatacgagattttgcatattatcccaagaaagccaatatggtagcagacgcctagagtaggaaaggtcccaggtagatttttagtactaaaatgatttctcttcaattagcgatagacatggtcgagacaggtattgagtttgtggttgataaactcaatattttaacacttcaatctaacatgttagaaaggatgaatctttccgttgtcaaaatcatcaagagcttgaaaagtatttacagttactacagtgacatgcttttatgccagtactcatattctcccctttggttattttattcttattccccattgttgaaaaccattgacatccacaactcgagctgaagccacttgctgcttggctcgtttaggcacccaaacttgttttcctttgctattttacatattgagtttgtatggcatatacatttacacattccagatatagtgggcttccgttcataattcaccaacacatctatttcttgatctttctcattaatgaaggaaatgatactcggaaaggattaatcaataatggagacttcaatcatcactcgcacaaaattcattttatctcttcttttagtcaccacatccaatttaattggacttcccaactatatatcttcaacaatgacttttcttcccaataattaaaatctaaattagcaatttgaatccaaataaaaactattttaatatattctttgtgaaaatcatcaagatcaaatctcgatcacaataaaagaaaacacctctagataacactttaatttaatctacctctttgtccaaacacatccttttgcaaaattcatcaaacacttgtaaaagaaaatattaacaataaaacacaaaaggagtactattatatattagaaaattgtaaaaatgactgtggtgattaatacggactttgttgttaaatc

SEQ ID NO: 27707 - DNA, 1910 bp, Cannabis sativa
ctccattgttgaaatttgcattggctaagtttgctagaacatttgtcagagaatctgtggtgagttgttgtagtctcatttcttgactttgtaacataaattaaacttcttgcagagagagagagaggctcagatcgagaggtgaggttgacaacaacagcttcatactcagatcctaatcctccgagtatgtaaagtaccaaatcatcatcagacatggtttgtccagctgcattaagactgtcatcatactgcttcatcttcaatatgtattcttcgattgacatggaacctttcttggtggattggagcaatcctctcagttgcaggagtctctagtgacgaataacgatgcaaaagtacttcagatctcaacagatgttcgaaaatggatgacatgtccaagcatattgtcaaagatagaatttataagccaatgcatcaagaactgatcaaatctcatccattgttgatattttggattaggaatgttacctgcaagtaagatcggtggagcaggacgaggttcaaggatgtatccatcaagatcataaacacgtgcacagcaagcaccagagatctcgagatcgtgtaattggttcgatcaagttgaagattgagtggaagaagattattgttggggagaattattcttgcttgatcattctgatgatactgtgcttgtttttgatcaggtgcaccaaatcgcgcttgattgtttagttgctgctgcacttgttcttgctccgatggatcaattctttgatctgatatgactctgatactatgtgaaagctctgttttcacagagttgaacaatgaagagagagagagagagagagttgctcaatctaactagattggccaaaaactttatttataatgctcagatacaagaagagaaagataaaaaattacaacacagaaaattattacaaaaaacaaagtaattaactaactctggtcttcttgtattccaacaaccacatttaaataacaaaagaagtattatcgggttcaattcaccccattattgcaagtgcaacaaaaataaatacataaatattattttaggtggttaattcgtcaaatttttatttctacttaaaataatattttttcaaatgaacagtaaaaaaattagttagtctaaaaatttgtttgtcaaattaaaaagaaaaagtagaaaattgatgttgttgtcttttctttcacacccaccaaataaagttaacaatttgaccttccttcagaccttccaataaaaaagttaaaaaaatattttcattaataacatattaacaagaagacaattgacttttatgctttttatttacattgacccaactcactatatagctaggaccaccttttattacgggaccatgacctaaattaaaagttattgttttttgtcttttttttttaaaaaaaaaaacaaaatttcataatattggaaaaattgaaattctttgtctcattgtgattgtagaaaagaaatgcatagataaataccatataggcattatgatttaaatacttgtccctggctccatttggaagcattatagtaaatgttccaaactcaccaattatacttattctaatataaacaaaacagaacaaaataggagcagaatagcagcaaaataacaaaacatctctaagaatggcatctttttcattattaaaaataaaatataaacaaaattgacaacaactttttggcggtgcaaatctcaaaatttgataccttttcattttattttgcaatttaatagttggagtaataatatatacatacatagatatattttagcttaggattgaaaaataagattaattaaaaataactagataattttaataactttattacaaattagagtaaatcaatatatatatatata

SEQ ID NO: 27708 - DNA, 2234 bp, Cannabis sativa
gttttgtggttttgagggacatcaacaattaataaccatcttttccactcctatttcaaattctacccgtaggattaatcatctttctgatctaacggagactaacccaagggtatataaaggaaaaaggaaccatctttgcactatccttaccacttttgaaactctaaaaattttctaagcctctccgtcgaaaaaccatcaccagatttgctcaaaaatttgtatgccctctcgatcattgacattttttctgcgagtttcatctgattttattttcgacttcaagcactcggagagatcttcatgacgttcagggattcgcaaattgtagagccattcatcgtcttaaaccccaacattgaacagtaagtggcttttctccttaatatctcacatgcttattatgttgtatttctgggtttaattgttaccttatttttctgtatccttatcatctcatttaattttagtaattgttagggttgcactgtatctgggtaaatattagggtttagacagtacgtaggttttccagatcctccaattcaccaccttctggtttgataaatttcttgcgggaattggtattgctttctccttgcagtaatgtcccaatttatttcaaaggtttatcgtccagaagatttagaaattgagtttcctactaaaattgccatcccttaaaaacccaaaatttcaaagcccacatccaaattagaggtaaacgatgaaagcattagggaacacttagtgaaaattaatcaggaagacaatgctagtcgctacagatgtttcttgcatgaaatcactgaaggcaaatgctgtttcttgcgagatgctgcttggcctgaacctccgagtgtgtcttctattcctttcgctaaacctctatttttacccagagtcacaattacttttgaaccaggtgacttggactttgaaataatgtccccaagaccctaacatcacctttgaggcaaagttaatagagtcgagggtgcgaactatctcaggcaacgtaggcgattcactgaggacatgtggaatcgagtataggcgagtctgtcaagttagatcagtgcgagctggtgaatttagttgttacccacctgtgcatcttataggcgagacctctaagggggtcagtggcgaggcctatacaagtggctcgactggaataggagcttagagccttgagcacataagagcaggggcaataatccccctttgtgattatttcaaggacttttccaaccacctcaggcttgccccgttccaaccaaatcccgtctccaacagaatcctcacaagcttaagggttctgtacaaaatcctaaattgtgagtgccccattcctctagaaatagagtatctctacactatcaaagcagttctagcgaggaagaatgtcgtaagacgcttttactatctcagcattcactccgacgagcacgaaatcatcgtggattttccaaacaaaacttccttcaaggacaacttctttttgacgaccagcgtgtccccgattggcacaaccacttttcgtataattcgtaagtgatttttttctttatacttggttaaattaaccatgtcttttattcgggtttagttaatcatagtttttccttattcctaatagttgtctcgaaatgaactgcccatactactaagatggccgagcggcacaagctcttgttgactctgccttacggccttaggtcatccaattttcttctaaatgaggtcaatctgaggtctgtggacctcttaactgacaaggagtttacttgtgattacaaatatcccaagtattcttcttggcagcaggttactacccctcgggaagcccgtgaaggagcatcccgaggtaatcaatgtggttggtctcccacactgtttagggctaagagtaacactctagtcgcattctgagatagccactttaacatttatatttgacatcccctcctcgtagatcgcataacacataggtttgataggtggcatcccagatttcgtgtcgaaattaactgcaatgagtcatactacggtatagccgagcaatatggtaccgagaaaaatagggcaagtcacctagatgtgagatgggatttagagccagtcgatgccttcaatatattcaagattacgggttgtagggattttagtggatactacagtccttctaccccatattctagtgatacctctgttgggttttgtgccct

SEQ ID NO: 27709 - DNA, 2546 bp, Cannabis sativa
  modified_base (2473)..(2475): a, c, t, g, unknown or other
taaagcacaacaatttcctaacatccataaagcacaacagacttccaagtgctttcacagccaatggcaagcctttgcatttcctaacaatttctttgccaattttttttgagtttgactccatagtaaatcctttattgcgagctataatctttacaaacaacttcaagcaagcttcttccttcaactcattaagatggtgaaatctagttgttcccatgatagatgcaacttaatgacgtcgtgttgtaacgattatcttactacttatcccaaaaatcatattgttagcaccaaacatcatcgaaaattaccaagaacttcttttccttcaacctttcttgtatcttctcttgcatcacattcaagttctcaacactacaagcatctctagttattgcttcaaggacattttttgttactttacaaacatcaaactcatctgacacacaaacccatgtcttgtgttcaaaatacttgttaacttcatcatcattataaacagcttgagctaaagtagttttaccaattccacccaagcccactgtgtaccatccatctcatctgacaacaccattcctttcaaacatttcttttcatcatctcttctctaccaaaaaattcagaatcatctatggttgacattgaaggtggtctctgtgtcaacatgttctcaacaccctcttgtagatcaagaatgtccctctgtttttcaaaagtttcaaacctctcaagaagcttctccatttctgtcttcctatcaagatcagttgagtcaaatttagagaagaatttacttactttggctttggactttggacttcgcttctagcttgaatttgagagcatcatattcaatttcgtcaaaaagatcctctacatcttcaacaacatcttgaagcttatcaagccacttctcaatgatggggtccctcatctgcttctgatctgcatcactaagcaccttagcaagagaaaggaatgtagtctccagtttatcgagaaagcctatcgaaatcagagtctttctttccccttaagaagctggctacatcagaataagcaatcttcttcatcaaaaactcaaaggaaaaagagacaacaagtcctaccaccaactcagccatggctctcctcctcactagttcaatagcaagtacagtaaaagattctgggaatgtcaatcagcaatggcaatactgaaagaaacaaccagagtatgaaaacaaaatcagtttcttaagatgaaacaaaaacataggtttgaacaataatatatgaaaacatgtgcacccacgtacatgtgcctgttaagctgcgagattaacatgtgtctttaaatgcttttcccacacacaaacactaatattgaaaatctattcgtaaatatgaattatgtaatggcaaaattttattagtctaactcttacacagaattaatttatatatatataaatatatatattaaatctgatgagaacccacctcagagaatacaaaccagtagcaaataacaaaacacagcagcaaaacaaaatagcagaacaaatagaatagtatcatatgaattaagggaaaacttgagacaaaagtctcttacaatggcagagagcaaaggctctccatgatgcagagatttcactccatagtcggatcccaacactcacacacactcactacaaaaggcagcacacccttataattacaaatacaccaccacaaagtcaccaaacaaaatatttatccaatgaccaagctcaatcatgaggataaacagaactaattcagactttttaggacggaacataaaaaaactttatagcactcatttgtagcaatagttttttttttttttttttgaaatgagaaagggtcctctcctcttagaccggacccaccctgatatatattgaaaagcctcacttgtagccgaagcagaagaaaaccatggttacaatttaaacaaaacaactaggcctaagacaaataacactctccaatgcttatccaaataaactaatcataacctcttactgccattacaaaattgtttgtaattattttccaccctctgcatgaatcaaaaaaagaacaggtcctcaaaatgtttggctctaaagacccaagcagctgtccataacttaactctctcccacacatctgcttctgaattagcaacctcttcaaaaattctgacatttctttctaaccacacagcccagattgttgctaagatcgtcgttggccatacctttgttctacgtttactgccaattagtttagaaactattatttgagatacggaatttggcattacccaagacagctcgaacttcactaacacattgatccttactaacacattgatccataaacgtcgaatgaatttgcactccaaaaacaaatgtccaacatcttcgtcgccgctgcctttgctgtggatcatccaaggcacattagcatggcgtacttnnnctgttcgaaccggggtttgaaacaaaacttctcctcaggaggatagatggggcgattcaggtgagatccaa

SEQ ID NO: 27710 - DNA, 3308 bp, Cannabis sativa
attggcctatttcagcaagaaactagggtcaaaatttatggcagcatcagcctatattcgagaattaagagcagtagtagaagcagtaaccaagtggcgccagtatcttttgggtaggcagttcattatcaggacagaccataaaagcctcagggaactcctcacacaagtgatccaaacaccggagcagcaacactttcttcgaaagcttttgggattttcgttcactattgaatacaaggcaggacataataatgcagcagcagacgctctatcttgtcaatatgagggtcaacaattgagtctattggcagaaatttcttcggggtgctttgaatttttggaagaagttagacgagataatatcacttgtctagaccttcgacagctgcacaagcaactacaagaccaaaaactagaagctaacgactatacatgccgagacgggctgttatattacaaaaatcgattggttattagtcaacattcaaatctaaaaaagctcttgttgtcagagttccacgattcaccaacgggaggacatactggggtaaaacggaccttgctccgttggagtgctaattttttttggcgagctatgcgacatgatgtgaagcagtatacaatcttttttggtatgccagaccattaaatactcacctcacgctccttatggactcatacagccagtaatggcaatggattttattgttagcttacccaactcaaatgggttgaccaatatattagtggtggttgatcgttttactaaatacgcccattttggcaccttgttcagccactattcagcaacaaaggtggctgagctttttttccaacatggtgatgcagcttcatggggtgccaagatccattgtatcgaacagagacccgatttttacaagcgcattctggcggaaactatttgagttgatgggaacaaagttgaagattagctccgcataccacccacagacaaacggacaaaccgaagtaacaaacaggtatagagcagtatctaagagccttcacaacagacaacccaaagaagtggagtaagtttctggcttgggcaggatttcactataataccagccatcattcttcgattggaatgactctgcttcaagctgtttatgggcaactaccactgtccatttcgtcttacacgggaggcacaactactatacaggcggtagaggaggatctgctaacaagagatgccttattgcagcagctgaaagtaaacttacagaaggctcataatcgaatgcaacaacaagctaacaagaagagaagagatatcgagtttcagtcaggagatttggtattggtgaaactacaaccataccgtcagtccacggtagcaaaacggttaaactcaaagttatgtagaagatacttcggtccatgtaaagtggttgcaaggcaaggggaagtagcttacacattagagttgtcggctaatagtcatatccaccctacctttcatgtatcattactaaagccgttccatggaccactaccggttagaagctaccagctgtccgaacttacagtagccaatcgccctatgatggtcccaatcgcaatctcggccacacattctcatagcatcaacaacaaaactttgaagcatgtgctagtttaatggtcacttagctcgccggaagatgcaacatgggaagatttccaagaattatgtaagcagtacaagatcaccaaccttgaggacaaggttgttttcgaggaggggagaagtgatagcccagcccaagacttgagcccaataaaactagactcggaagcaatccgggagggcattagagactggatagagagctcaacccaagaagaggacccaacccgtgaagaagaactcaccttggttgagaagaaaaaccagcagaaagaaagcaacgaagagaagagtgtgtgtgggagaaggaatcgcgtgagacccaaatggctaaccgattttgtgaggatggagagatactgagagggataactaaatttgttattgttgctgaattgtgttgtttgtttggatggacatataaatatctgtttttttaattgttttgggatttatgttgaatgagaagctgaaaaataaatttggagttttgtattgactcgaacaatactgctgcccattgttgggtatcaattataatttttctgtggtccaaaaagaaagaaaaccaacgacatccattttgtactaagcatgaagcatattttaaaagttatgtgaaatgaaagttttaataatttaataccgtgcgttttagtgagaaagagttgtggagagaaaaattgtgcatataatttgaaatcataaatatatatactctgatggatagacaagttattacataatcttgtggtatccattttcttaactttttataaataataataatatactgacagcaaaaatgaccaaatatagtaacacaaaatttagagaattgaaaaccaagaatgaaaaatagaaaaatgaccacaatattttttttagtgattcaccctcttttagcttaataagctagtctacttgaatttttatttacaagtatcttacttaaaggaaaaacttctaagcaacacttggtaattacaaaaagtattaaagcttgagagcttttaagcttgatagccaagagataaattgaacgtaaaactaatgaatgagcaatgccatctatttataggaatgaatttaggtcatggtcaagttaaccatgcatgaatgtgattctcttaatcatagttaagtctaatttaattgtaaaatactaataaaataatattttaactaaatatcgtaattagaatatttccaaaattacttttgagtgtagtcttcaatctgagtcattgatattgtatttgaatatatgaatgagatctactaatcttaaaatccaatgatgatcattgatcttgagatttaaggagaagtgttgatatgatatcaaagtctcttatctcacagataactgaaacttgactaagtttgaaattttttataactctaatgcctaaattcgcattctccctaggactcaactttaagatataatgattctaaatttggacttccttgttaaacataattttgtagagatttgaataagcttaccaatgccaccaaatgcccaaaatactcaaaatgctacttgttatttgtatttttgaattaatgatacgtgtactttcaaggcctaaaattatccaagatgggtccatccctggcccaatcaaattaataaagcaacccacagcagagttaggttaca

SEQ ID NO: 27711 - DNA, 1303 bp, Cannabis sativa
aacatatttagagattgataaattccctttttgaacatgagaaaatgacctttttaattgcaagagacatgctttattttaactcgagaacttctattcaagagcatgccacacactgaaggaagagttgtaattggcaacaaaggcaagaactgcctcagacatggacgagcggagccaagaaaggaggagttgatccttcttcttccattaaatgaacatgggattgagctcaccattaacaagatttttgaggtggaggaaccctagtgaagagaatatcatcaggatcgtggcctatgacagtggaaaacacctgagatttccaagacatgaaattattgtgattgagtttgatggtgaaaatagaattcagagaattagagaatggattccaggaaagaatgggagcattagtcgatgttgtagcagtaggtgtagtggcagtagtcattgttgccaaactagttgcaggattagatgttgaagaagccatagacgttagtcaaaggcgattgataccatgtaaaaataaaaacaagatgcagagtaaaagtttaagaaccgaaagaaataaagaaaactttagtagaagaatgcaattgcaattttattatttatatcagtagtaaaatgttgctagctttaaaaaaaaacaaaaaaaagagtaacaacttctaattaactaacttgctaattaactattgtagttaatagattagatcgatttcaattagattttgagattgacatttgataattgaacgaattaaaatttaacttttaacatttaatctaatttaataatttttttataattaaattaaattgttcaattcaactagcttggattaaatattagattaaatcggatccttcacacctactaataccattgccaatatgaatatatcttcagccgtcgtccctgataatgattgaaaccgcaagtcaaataatgcactcaatcaatccattatctgtcccaaaagttgccctccccaccaagaacctgcctagtggaatcccactgtaggataaacaaatctcaaatagcattattatgtctacttacttaagtttatttcttataattgattttcttttttttgtgaagttttataattgaaaattatgaaagaataatttgtatcataaatatttaaatttaattttttattatatataaatatttaagtttaatattttacgaaaaataatactaactcatatttttaaaattttaatagtacacatcatatcaagtcatcatctcgtattattttttttattactatatttt

SEQ ID NO: 27712 - DNA, 3564 bp, Cannabis sativa
ataaaagtattactcaatcaatttatcatctcactgtttatttgccaaaattatgtaaatatatatatatcaatgttatttttgccaaataattttgaaaatgagaaaaccatctttctagttaccaatactaatattctaaattagaaaattgaaattcacggttgcatcgcaaccaactactcaaatacaattcgtagcggacaaagttcgactgaagcagtaaattaatacaaatatcaaaataaatcagtgcaattaattaaataaaaagatcgatatatatatatatatatgtgaaaaagaaaattgagaaagagatttaagcgaaggtagattcaaataatcaacagtttggaaaagacattaactctagggaggaaaatattttaccttcgttgcataatttcagtaaaaaatcaaagatttgaaaagacgaagagaaaatgttgagcagagatcgaagcagaagaagtcgcacacttggtcatcttcttcttcttctctctgtagtatggtgttttcttctagcgatatgaaaatgtataagagatttggtagacgacatcgtttgggtctgcttgtccatttcttttggagaagtaatttctgccgtgggttttccgtccgcgaaagtagtacgaaaatgagggtgtattaggtattataattttagtacagaaaattagttcaaaataatgtagacattcatgtaaataatgacaccatcactcgatctagatgtaaatccgatccgattgtagccaacaaccacgatttatgatttgcataaaagaaataaatattaatcatcacttaattttaatatttatttatttctcattcattttgtttatgtttctgtttgtttttctaataggtacttttatatctcagaaaagtcctctattagcaaatactcctcatcacttagttttaagttctttatatatatatatatatttgttatggaaaatcatacatttattcaaagaccatctcagttacaaataagataaaaaatcacttggaacagatttaaaaataaaattacaatcaagaaataatatagaggctctagcaaacttataagccgccatattaattgatcgtctaacaaaataaacaaaaatatttttttagaacattaagcatagtcatacaatcactaaccacttgaccaaacatggaaatcataacaattgagttatgtaaggcttgaacaaccaaaagataatcggtttcaagtatcacttgtggccattgacacgccttgatctagcttagcgcttcttggactcccatgacttcgaatatttcaggagaagactgaccatgaaaagtcttagtgcagccttcaataagcaatcctcacccattacgagccacgaaaccaatcccaaattgttgggtctcaccaaacatcgctgcgtcaacattgaccttaacactattttcttgtggagccatccaatgctctgctccatcacttggtagaaaactagtaatgaaacctccaaaccatcattttgagcatttagccattgattaaggaagcctcttactaacgaaatgatgatatccatacctactattttattccgccaaaccctatcattccttgtattccaaatagcccaagaaatagcaaccaacaactctttttccttccaatctagcacttagaattttgcaacacactaagcgaaaaaactcagctcctactgcacacccgtgcctataccaacccgatcccaacaaagtttagtaactaggcaggttaccaaggcgtgcaaaatagattcatcatccagtgaacacacttgatagagggagttaacctcaacgtgctttgagcaaagttgagccatggtagggaggcaaccgttactagctctccaaaccagatttttcatctttgggggaagcttgaggttccataatttcttccaaatttattcactgaagactcctctaagttcacctctcctttaagcttttggatcagtttataggcgcttttaagggtgtacaaaccagataattctctgaaccaaattagacaatcttgagctaacatagcttggataggaatttaaagaattaactctcggtcttgtgaattaaataaatcattcaacacttccaaatcccaatccgatccatccattgtcataagattggaaactttagcattcataagactcgtatgcaaagaggttactaatggatttcctttatcaggtaaccaaggatcacctaacactaaaatatttttgccatcactaacagactagcgaacaccattagccattaggttttgggcctcaagaacactacgccaaacaaaactttgattagagccaataactgctataaggaaagtacctttaggataatacatggatttgaaaactgagataccaaagattcaggtttaacgagaaacatctaaccttgcttgccaaacagtgtcaaattaaagtcccttaaactatgaaagcccattccaccctctgttttgtgattacaaagtcgtttccacgacatccaatggatactggtgttagtgctagacgatgactgctaacaatacttagacatcaaactcttcatttctctcgtgacttcaagaagtagtaaaaagacattcatggaatagcttgggagcaattgagcaacaaactttattaaaacttccttgcatgcctgagatatgaactttgttccccaaccttaaagtcttttccgaaccttctcctttaaaaaacccagtgcagttgttttattacgacttgtagagcttgcaagacccaagtataagcttccttcaagggtagcaaccattcccaaggatctgctaagtctttctgtcaccatatccacatggtattggagataaaaaaaaaatatagaagatttagagaaattgaccttctgactcgaagccaattcaaatttgtggagaatttctttgattcgagtatcctccaattttgtagccttacagtaaaaatagttatcatctgcgaataacatgtgggaaatcctcgaagcactattagctactttacaaccatgaagccaccctctttgctcatacttgcgaagtaatgttgagaagccctctacacaaagaataaagaggtaatgtgaaagggggtctccttgacgaatccctctcgaaggaatgattggtccaatttcatggttcccatgaataactttatacctcatagatgtaacacacctcaaaactagttggacccaactctcaataaatcctaactttcataacatcgcttcaagaaaagaccattcaactcgatcatatgccttgctcatatcaagtttgagagccatgtaaccattttttcctttttgttttcttttcaagtaatgtaggattttaaatgaaaccaaaacattgttagagattaaacgacccagaataaacgcactttgattttttaaaataatagaatccataaatggcttcatcatattgaccattacctttgtgataatcttgtacatattgttacaaagggctattggacaaaa

SEQ ID NO: 27713 - DNA, 3640 bp, Cannabis sativa
aaactgactttttcactgtaagaggactctgtatatgtagtcttagcctaaatatttatcacaacaaggatactagcattactttcatagaatcagtacgcttatacataagtacttttgctgttgtagaacactttcggtgtgaaatctctaaggaacagtccttttgccgagcatgaaatgatggctgctctttaccttcaagtgagtattgtcagccaggccctcatttttgtaactcgctcacgcagctggtcatttgttgaacgccctggactattactgctcgtcgctttcatgattgcacagctggtaaggatactgcatttttcctttccatatataatctataattaagtaaatcagaatctacattcataagaaacttgttataattctgctttgtcttccaggttgcaactctaatagccgtctatgccaactggaactttgcaagaattaaaggtatcagttggggatgggctggagtcatctggctttacagcattgtgttctacgtgccactcgacataatgaagtttgccatccgttacatcttaagtggaaaggcctggttgaacttgctagacaacagggtaaggatattctcttacagattaatgatcaacatatttatttgaaacttcagaagagtaaagctaagaatgaagaaagatttatcattgattttgctaaatgtgtaaacagactgcttttaccaccaagaaagattatggtaaagaggaaagagaagctcaatgggctcttgctcagagaaccttgcatggacttcaaccaccagaatctaataaccttttccctgaaaagagcagctatagagaactttctgagattgcggagcaggccaagaggcgagctgaagttgcaaggtaagctccgtttctctttaaactatgccttgtgctgttttttatgtgatacatgtttcttatatggcatcagaacattttgttaaaactctttctttttcaacctatggtttcaggcttcgtgagcttcacacactaaagggacatgttgaatcagtggtgaagctaaaggggttggacattgacacaatccaacagcattacactgtgtgatcatgttaatccaacaaacatgaattcggaggaaaaggactgcattcaaatgatgtaagtttagagagcagaagggagagagagaagacggcaaacatgcagatcgggagaaaggcctagttagttaagaattcctaaaatatatggagagaatcattgtgctatatataaactctcttgaaatggtttagatttttccttatttcagttggcagcagaaaatgtgtgtttggtttcttcttgctctgatgttaggggccaaaataatgccccaaagtttttcttttcttttcttggtttttgtaatcatttccctttgttttttttatcatacacatatttgtctttctgtatgtttactattacaaccacaaacatttaaccaatatttggtgccttctaattgtttgaagtagcatacaggggctcttttattgccattcaaatcttttcccatgattttatttaccgagattttgaaaaactgaattaataaaagattaaattaagaaaagataattttcaagtaaataagataggtttttatgtagttggggtattaattgtttgaaggagcatacaggggctcttttattgcaattcaaatcctttccaatggttttatttaccgagattttgaaaaactgaattaataaaagattaagttaagaaaagataactttcaagtaaataagacatgtttttatgtagttggggtattaatatattttagtttataagtcaatattattcaagctttttggttatggaatattttacacaatttctctttccaaggtttgtaacccttagcctaacttgaaattgtaacattttgcatgaagggataaaatcttataggttagggttgggttattgagtaaacttgaacccattagagttttcatgagtaaaaatcccactgatggggtattgacattggaccggtcaagtgaggtccagtttgtaagataaccttcatcagtacgagatagtaccatttgatggtgataggtgggcatgtgtcgtcgatggtgtacaataaatatcacggtagtggacgttggacaaaaatgtatgtagctttatgtgttatgtgcctttctcaagtccgacgtaagggacaaagccctgattcggtgcgattcagtgttagaaggctaccacgtaggacaacacctggactcctcttcgactgcctatttcggattaccccgtgagggcatccggatatgttccattaagtctttccttctctggacgagttgcccttctggaaccaaaaaggcctaaccttatagggattagagctggcctgcagttcaatctaaagccatggttggactccgtcatgggccgacgcactggcttaattaggcctgtgaatgggcccgtctaagttgattttgggaccttcaaagtgcacgtgtcacctatttggaaacatatataacatttatcccccaagccttcgtggctcaatagttgtggaagcttgcacctgtccttcggacccgtcttggtgcgcatgaccatgaatagttcatgctcttcgaaattccaaggcgatggatcacatatgattgcatacttcttaatttccatgagtggagtacacatttgctaatttgttagatccgcacacatcatgcaactcaaggaagcgcgtggaacctcgaattgcaaaagggcagttggtcgtgtcagcgagattgccaaggcgaatgtcatcattagcaagccttggtcatgtatgtaatgaccacatatctttaatatgggaattagcaggtaattagggcttattgtcagaaatagactttaaattattttttttttttgcagttatggagatatatttgaaatctaggtgtattatgtattatatgaaattttacatttttatattttatgcctgacgatagtggaatgtggcgatttggccattagagtcacttagatacgatgttatatcttagaattaacagggcaagatagttagacatttagaatgtcaaaattactcacgattatgattttggatcattttacccctaggtatatgtagtttacttcttggtgaagtaagagtattttagactgtttactctaaattatttattaaataagacaaggggatgtttagtattatttttatgttagtggacgtataactgaaataaaggtaattaaattaggtttatctttattaaaaatcaaaaaccaaaatttccaagtctttttctctctttctttgttctgccccaagaagaaccaaagcaaattagggttttccatcaattcatacatgagttaagaggattttagcctagaaatttcgagtttagtgttagcctagtaaaggtaagcatctccttcattaattttaagtttcaagttaggtttttcatttttttttttgaggaattagtttcaatataggcttgaagtgttttgggtttgcttcttgagttatttttgagttaatagtattttttttaagttgcttgtgttggtgtgttggaatttattttacc

SEQ ID NO: 27714 - DNA, 4878 bp, Cannabis sativa
tatatcatttcatagaatgttaatagcttggcttttaatctagcaaaaggaaagataaagaattggttttaaaaggagaatatttcacttatcatgcaattgagttgagaatgtggcttccgttccatagccattgcatctgatgctttgctcctggtgcaagctttgatagtgcgtaaattacctccatgttggaaaacaagggcgatggcgatcaagatttggagtaagcttgaggattttcagaattgtacttttgtccatttcaatagatcagacaatatacaagctgataatttggcaaagtctgctagatgtaatgatcttgttcatgatttcaaacttagggaggggtgtcctgttgtgatttccaactatgttattttcagttgaataaaccccccctttttctctcaaaaaaaaaatgtaacttaactcatcggttatccgagtgaagttacacaatttaagaagaataaatatggttgttttcccattcaaaaaaaaaaatatatatggttgtttttccttgaattatgattcttgttaaattttattctcttatttttctttttagaaaaatcaaaattgttgtaaatattttcattaaaaaaaaacaatttacttatgcattcatgtgttaccgatataattgcaataaaaagtatctatttaagaagtttaaactacttaaaatctaatttattaatattaaacataccaacattaattttagacatgcatataatatattcccaaaatctaattagactactatataaatttattagaataaaaaaataaaacatctctctcaaaggtaaataataggagaaaattaggatttctcctagagttgtacataaatttttgtaaacttcctaagccgaacaaattgttcaaaccaaatcgagataactcaataaataatacaaacagaaaaacttgatgaaaatataacccgtccaatctttatattaagtgggttgaaaataatatcaactcgcccaatcaactcgaactaacccgaccaacccaattaagaagatttttatatatatatatttattatatataatttacatataatataatctatatacatatttcaaaccactatattttttcatggtggttgatttaaacttttaattcaatctatatttgtctgattatcacaattaactaaaatatgacaattgaatgtgaaaaaaaaatattaatgctcagtttggacaagtttatttatttttcttaattgggcgggttgtatttaaatatttgtaactcgatctttacgttgggttgaataaaatggaacgtaaaccaaccaaaccgaccgacgtacacccctagtttctcgtttcaaaatctatagatattagaggttgtcttttttctctggctaggcccatcaacctttttatatgacatgggtttgagtgttttagtcttatctcgatgacatagttttgagagtttttgtcttgtctttgtggcatagtgtaacgccttgactctcaggaacgtcacatgtgtgcttttacaatcttattataactaatctattagtttaggaaaaaagtgtggcttaattaaaacttttaattaaattaaaagaaaaacgttcgttctaaatattgtcgtaatatggggattccctgctaacgaaatctttttttctactagttacaaaatcgttattacttatacatccaatcttagaaaaaggttgatcctgcttctcaaaagccaagacaacacggttgatatgtacactgttaggagacctttgactcatggccgaacaaaactccaattcttcttacctgcaccacgaagcaatcgtgagtcacaatgacttagcaagaaaagctactagacaaaaagtatagtaagtacttagcatttacaacacagtatgcatgttagtggatcactacatattcaacatgcatatacatatcagtacatctatacgaatacattcataacacattataagaataatcacagcaactcataattatcaatttcacctttccactaaatagacattcgttcaatccattgcaatataatctcagtgctttgtaaagcactctaatcatatatcattgtaattgcataatatcagtgcttcattaagcactctacttacacaatactataatcacttatactcaatgcttcataaagcatccttaccactcgttatcaacgagctatatatgtcactatcgttgcccgttaacgcaaacgataagtaagaaacctatccgtagtttcaacgagtaattactcattacggtaatgaccgtatcttttactcgatcacaatcgagtcacaacgataataatcgttccatatcatttccctcgatcataatcgagtcacaacgataacaatcgtttcatattatttccctcgatcataatcgagtcacaacgataataatcgttccataccttctttcctcaatcataatcaagtcacaacatacacatatcaggatctcgactgtaatcgaaactatcacaattataatcatcaaccacaaaacgatgcataatacttttcttacctcggtccagaaattaaggatgcgggccgacctgaatggaataaagcacgacaatcccgagtcctatttcacgacaaggaaattcgataaacaactcatccatattccaaacaaaccctatctccataacaagacaaatttctaactctccactggttcaaaatagcttatacgttactaaaatacccaaatctaagctctgaaaaataccccgaacaaaactggtttcgaggctaaaaaccaaagttttcttcccctgctaccaaaaccggttaaccggttttcacagcacctgtgaaaccagtttaccggttttccctgctgcagaaatgggaaaacttggttttgccccaaaaccgaaccaaaagtcatccaaacctaatgaaaccttccagaacaatttataggcatcaaatcaaggtatacaattcaatatttcatcacagttcatcatgttccatcaattatcacattaaaacccaaagtgaaccctaaaatattaaaatttatgctaccaacctagcagccacaaaaatcatcaaaacccaacaccaatatactctcattcagtcttataattacaacattaaattattttaatcctacagctataaagttgtaaaaccctaacccaaaaccaattcaaaaactaagaaatcttaagttcatgtgacaagaaacttacccccaaagcttctaaaccgaattggaagaagatgagctagaaatcaaagagaattggtgaacattttccttggctctaggctgaatccttggctgctcgaaaggaaaagaggagaatatgagttataactccttaactcttctaatttccaactcaacaaagctatcccccttattttcattattcttatttttattattattataattttttaaaatatttaatgaaatcagccactagttaacataggacaaaacacatttctaacattaacaaatgaccattatacccctcctaataaccttttacttaaagctaaccctatggtattttggtaattctagtaaatctgccaaaccgacaacttaactttccaaattaattcggtaaattcccattccaaaccctacatttttatcgtgacatatgtgaccactccatcgagttcctatgggcaccggacccgaaaaccttttatttcaaaaaaaaaaaaatggtatccacgatacccacatattccaataaaatctccgtaattaataaattacgctttaattaattatttattaaactcacattaattaacctaagtaagatcataatcttacttcattaccagaatattttgcatatttaataaaatatgcccaattaaatatcatagtattttccgggatattacacatagttttaagtgttttagtattgtttgtgtgatatagttttgttttgttttgttttgttgtcggttcttttttgttctttgataacttgtcatcaaatcgttgttagtagttggaaatgacaagttctttatgattgaaggagttgttagtagtgcagttacgtaccttacacaataattgagtgctcaagctacgaggttgaatgagtctgatgtaatagtttttactgttgtgtctttggatgaaacataatatacatattcttaaggttaattgtgatgctgcaattttttatttgattttatgtcaaacgatctgaaaattagatggctgattatttgattcatttttcttttaatccaggtcgtgtctccaatgggaagatgtccgattagattgtagactattattttagttaattgtcattaataaaaatctattatttattcaaaaatatatctatgttatattaaatgtggctatataatataagtgttgttttacatatctttcttatcttctatcttatcttatattaaatgtggctatatatataacttaatgtgtgtgtgttttttttaaattacaatttaaaattaactcactgcacatatttaaaaaaatatctttatattatcatttttttttattcaatccacacatctacaaaaaattatctttttattttatttataaacattaataaaacaaaaaaagtgtttatgtttcttaaagaatcactattgcgacgttgccgctacttattgtagttaccaaaaaaatatatttttattactaaatgtggttatataatagaaagtgttgttctacatatctttcttatcttttatcttatattaaatgtgactatatataatagggatattggcggctaaaccacctgaattttacggtttgtaac

SEQ ID NO: 27715 - DNA, 1462 bp, Cannabis sativa
  modified_base (764)..(772): a, c, t, g, unknown or other
ccctataaaattgtcgtttggtttgtaaacatgaaggactattatgtctttcaaaattttaattttttaatatttctcagattttaattcctttatttatttttagttttcttttccccttcctcacgatacccttctctctctttactccttcattctacactctctcttcaacctttcttcatcgtagctctgagctctctcgtcttacaggttcgccattttctctttctattaagctcttcttttaaagttctctttgtattacagtttatatgctcacacttatttgtttgaatattcttctttgtccatggactttgtacccccttttctggttttctgtttaatattttgattttgatcggaaaagggtttgtataattatcaattggggtaaatgggtattttttttattttacattttctctctgtggtttgaatagtttttgcgcagtttgagtatggaagatctgggtcaagaataggtttaggcatttatcgaattgagtcaaagtgaaaaataaaattgtttagattgtttcatttgtcttaaatttattgatttagtgttaaagagaaacaattataggtaatggttttaacaggttgtttctcagtagtactctccatctttttaaatttatttttgttttttgtagatttttttttttcttctaatagacagttttagtttttcttggattttgattatgcaagagctttagtttttgtaatgcatctatctatctatctatctatcnnnnnnnnnatctatctatctatataaatatatatatatatttatatatagttggttagattctacaaagggaaagaagatgggttactggtgttctattaagcttgaattagttatccttgtaatattgataattgaacatgtatgtattctctgtgtttggatttgtgtgaggtttgtggttgcctttcatttttccccccctttttcaaaaggggtgttaaattggtgaaggtcaagcttcttggatgccataaaataatgtaatttgggtttttttatattcttacggatatcgttgtctaagaatggctcttgtgtattggtcatgcttagttgagtgctatgagatcgcatgctaggaaagaagatgttacaataatctcatttcgaagagtgtgtttcatagagcttcttcattattaagatagtgaaccataatggtattatatctttgaagttgatatctaatgttttgttaaccattcataaataaatagtgtgtttctttcttgtccaggctttcattggtttgtttacagcttgtttctttgaattgttaatgtcatagatgtactttgcctatgccatttctgtactgtgttttttgcttacagcttgcttcattgaatttttcggtactcttgttaattttaagacctgttgttgtcttttgttttatttgagttgagatcactt

SEQ ID NO: 27716 - DNA, 1478 bp, Cannabis sativa
tatatatatattatgataattaccttcataagttttctttatgtatttattaattaattagctaattatcttttcatgtataattatatcccacccttttcctttataatctcttaactagcttaaaaaatagtgtattttgtaattaatattgaggagtcttattagtaacttaattaattaggtttaattattaattaaggttgtgtacttaattattatttgttgtaactttgttttgtgcatgatgttttaaactaagtggaaatgcatgtccttattgtgtaatatgtttgatgtaattataattagtctctcatagccattgctttggttttttttttaatttaaggaaagataattaatataattaaaattaaatactttgtggactttttttttcattaggggcaaatgaggacttgaattaattaattatacatgttttaacaaatttactaataataataaagtaaaatcaacaaccaaaattaatgcatctaaagaaaagtaacaaaagcttccaaattaagtactaatatgcaataaagttaaaataaattaaatgtcatcttggtaggtaattaatggttgatggctattatacgaaacaatttaatgagaaatacagttggaagaatggaattattattaaaaacaaattacttagtaacagtaaaatttatgattaaaaataaaaaaaaaaattataaataataatttatatattgtggttaaaaaatttataactagccataaaaattacaatttattgtgattaaatgtgttttttttattacaatacttgttataattaaaagtaaattagtgacaatttatatttaaatatatcatattttaactacacataaatttctgttgtgattaaaaattacttttagtcataaaatatttatattatgactaaaaattatcattaaaaataatattttttaataaattttaggatatatataagtaaagtaacaataataattattccaaatacactttgagtttagtggcaaatatgtattttcttatgctattttattctccctcattcttctatgtgttggattaaaagttataaattgatttggaaattattatattatgttttataatgcatgataaattgtaaaaagcatctccaaattagtaagttgtgattaaaatatatattaatcataatatttgttgtgattaaaattaaattagtaacaatttgtatgtaaatattatattttaatcataaataattttttttattgtgattaaaaattatatttaattaaaaaaattatattacgattaaaaaagtagttcttttgttttttaatgaacactactattaatatcatactaaaattataattaagtatgagattttatatattttaattaactaattattataaaatatgttaataatttgttaaacactagtactaaaagcactagtacctaatggtgat

SEQ ID NO: 27717 - DNA, 2837 bp, Cannabis sativa
cgatcttctgttggtttaccttactataggtacaattaaaatattatattgtatttgacttttgcgctctttagttttgctgttactcagaaaaattttatctgttgaggagcattcgttagggataataaacgatctatcaaacagtttctagagttatttggccaaaattttgacttggcaacttgttattcaatgcaattctcagatataagtaaataagttatagtactagatttcatttagttcaacatgtactttacaagcattattctcctctttagaatgaatttaatcaatctcagagccatgaaacttgtgcttacttgtaaaaaaaatctgtttccatattaactgctttcgatttttttttttcaggagcttattcaatatttgaagtacacttgtcctgctcatctttatgcaacttcaatttctccaccggctggagaacaaataatgtctgccattaaggtcatccttggagaggatggtactagtagaggtttggactctgtttgttagtttgatttttcgatttctttttctcctacatttaatatttgctgtacagtttcaactttgagcttcttttatgctcaactgctgctcaaatatgaccaaaactttatggagctgttgctccctttcaggagcccagaagcttgcacgaattcgggaaaatagtaacttcttcaggtcagaactacaaaaaatgggtttcgaggttctgggggataatgattctccagttatgccaattatgctttacaacccagccaaaatccctgccttctcacgtgaatgtctccgccagaacgtgagttcatttccaggataaccgctctctttcaattttcctactacacattacatttgacactaactaaataattccactacaggttgctgttgtcacggtagcatttcccgcgacccctcttcttttggcaagggcacgaatatgcatctcagcatctcattccagggaagacctactcaaagccttggaggtaataatgcctgctgattaagatttgtaccttactactaaatctgtccctcaaaactttctttgctcaatgcctgttgcacttctgtttatatgaacaggtgattagccgagttggtgatcttgtcggcatcaaatacttccccgccgaaccaagcaagcaattgccagattcagactcaaaaaagtgtgactgagaaaaatgagagagaaagaaaaagctttcaagccagagaagaggagagaggttggtaaagaaaacaaaagaaaaaagaaaagttcatgttgctactttgattacttaggtttcatttgtgcttgctttgcattttaacaacatcttattatgtgagcctctaaaatgacctctcattagtattgaaacacacacacacacgagtggagtggtatatgttcttcttgtggcttcttcaattattgaattttgtccccaattttaataattttgtacagatgtagcttgagcaaaccatattttatgctattattcttcaagggtagtcttttgtatggggaataataataatgataacattgtaactcttgatggtacatcttcaacaattttattttatttttggaactgtgaaattcatagttgtaattttatttgacttgtaattcttcttttttccattctcatttacttaatttaaatataaatctatgtattgggggtagatattgcgaatgaaaggaacacaactaagttagatacttgaccaatatattattcctttctcttctttgtttgtgaagtttaggattgtgtcggcagatactaagcaaacttgaacgtgaattttttttttttaaagaaaaaaaatatgaagtttcgtatataaactttttttttttttgatggaatcttaaataaacttgagaaaggtacgagattcccaagtcattttgtttttatattatttaaaattatcagatagatgcatgtacttctggtaacacctaattatatttattttttatgtatatatgacagccttatattatggatatatatttatgataaaattttctgtacttaaaataagatttaaataattgattgtctataattaattattttaaaatttatttttaatacaataagttattgagaatttctaaataacttataaaatatctacaataataatatagtcatatagtagacatctcactaagaaataattatagtgaaagcgtcaagtactataagagtctgctataagtgtattttaatattgatttttacatattttaatttaataaatgatataaaacaccgctaactaatcatatagtgttgagtgttgagcagcttaaagtacttaatagctcttaagaatatctatggtaaattattttaatttttccaaatcatgtgaaatgttgtaactatatttaatacaatcatatttaaaaatttaaggtatagtttctcaaagtgctcaaaaataatccctacgtgattgagacagaaataatgtctacgataatttttctatacaagtaatatttttcacaaaatttataaaggcaataaatataaatatataaaaaatttcagctagctggtaacaatttgttgatcagaacagccattaatacatcatttcacaacaggccaagcatgtgtgtataaacacataatataataatgctgatctcttagcttcttctccattataaaaatatgattagttataacattcaggattctattgacatagttttaatttcaagtgcagtatcagtttgtaacaattaccaacactacatttttgttaaaataaagaaaagaaaa

SEQ ID NO: 27718 - DNA, 3278 bp, Cannabis sativa
tttttttttttttgaatgtagtatttacaattatagaatataatggcatcctcatcatgatattggtcaaatttgttagggttaggataaaattaggattgggagaaaaagtttttttttattttttttttttttgagaggaaagaagaagtaatcctaaaggaaagacaaaattgaaggtatggtacaggcttcatccccaatccatcatgcatcttcataaagcttaagcacctttttggccaagttaagggctgtagtgtttgcagtcctgcgaacatggctaattctggtgcctaggcagagagaaaaaagttttctgagctaggcaataagatttccaaaaatactagccaactcagagtctgaattaagagcgtatgttcttacagtctgtttctatgaagtgaattggaaagttttctttaaggaaccacttgagggagataataagagcttttgcttcttgaacttgaggtgctccatagcaaggtaagggaattgtgagagctgctatagtttccccatatattgtcgttgcgtaagattcctgctaaacctgacttgttattcacagggtcgattgctgtatctatggaaagtgtggctagaccctgagggggagggacccaagttgcattcgccttaggtgtggcagtctgagaatcaatgagagctcgatcattctcattttcttgggtgtatttggtgagcatcaatcgagtcttctccaaaagatcagggaggttaccaattttatttttttcccaaaaatatgctcaatcctgtcatgccaaatgaaccaagccaaacaagcaaacaactccatttttttcttgatcatattttttagatattggtaatatggcatacctttctaataaaacttgatacatttgcaaaaaaataaggcatgacttaaattttttagctcaaaaccgcttctagaacaaatcggggaggggacaatggttcgtttgtgtaggtttgtgagagtgagcaaagagttctttgtggccttggaaggcaaaatgttttatcttcgaagggatgttaaagtaccaaaaagaattccaccagaggcaaggttgggaagagtttggctctttgctcaaatgatcaacaatactattgttgagtgtattattacgttttattcatcaagatgcaagattcaaattgttatttaccaaaatattgaaaccgatcgacccattgtaagatatagtgaaaatttatatgtactcgattatataatatataattataagtgatgaggacgaggatccaagatatgttatacctttctttacgataatgagcaggtctttcttaggccggcaaaagtaagagcattaaacgcaccacacgcaaggagcggatattgtagaatgatctacatatataccttatcactggtttatatattaagatctgttttatactcattaattaattaatcactatatatgtatatgttattctagtattttataacagcatttctatttggcacagtgccttttataatattttataagagtattgctatcttttataatatttttttatttaataattatgtgtacatttatatttttaaaatatttaattattttgactttccttttcccaacaccttctctgaccaactattttcagcttgttgtcaattataattagtgtgctaggttataattagttgcttagcatttttcatgtcaatattttttttggtttaattaagtattgaatcttatataatttaatataataattttgagtaatttcactagccaatcgcaagacgacatgtttaaaggtgctaagcaccactaatgaccaataagaatgccctaaaacaaagatgctgccattacacgtacgccacttagagaataaaaatatattttctgatcaactttacgacgtttttgtgaggtactcaaacaagtaattccattccatttgtgagaaatgacaagcctatttaaggtggttttccaaagcttaaatatctctatatatataactaaatacatatacatataactcataataagaagtatagattgtagaactgaaatttatattaaataacagagatagatataacatacatatatctctctatgattcgaacgatggttcaaagagtacgtgaggtgctgatactaatgttcctggcgttgatgtcgaaaacaaacggcgaatggaagccgaaccactggggcagatcgaattgcgttcggcagccaccgccgtctctgcccgttccaccagtacaagaggaaaactgcctaagctggagggtggcggttgaagcaaacaatgtgcggggatggcggacagtgccgacgcagtgccttagttatgtggaaaggtacatgatcggtgggcagtacgaaaaggatgttagctttatcatcgatcaaatattggcttacgctggtgacataactctcagcgacgatggcatggatgcttgggtgtttgatgttgatgatacttgcatatcaaatgttttttactacaagggaaagagatatgggtaagttattaaatcaataatataaaatatctcttacaattgattatataggaacaatattatcaataataaatttattcctttagtacgcattagatttattttgtcatcttattagatctttttttatatcatttgaatttagacacctaagaaaaaatatatatgtttttattttacttttctttgtttttaaaagaaaaaaaaaagattttactatacatattttatccagatatatataaaaaatgactataatctactatttgaaacatttaattctttttgaagccggttttttaaggttctatatatatataattagggtactataaaagataatatataatatactatttaaaacatttaattctattctaagcagcaggttataattatgtataaattcaaaaaaagttgtgtattttttataataataataataataataataataataataacactaagatttctcaattatgaattcatcatatggcgaactactataaatatttaaaaaaaaaataagccatttttcattacaattataatacatgtataatattaaaataaatttataagattacatctttatattttatataagataagaaataaaaaattaccgttttctcaaataataattacgtaggaatgctatatattttgacaaattatcatgaatgattagtatgatgtggtaatataattattaaaaaataat

SEQ ID NO: 27719 - DNA, 2716 bp, Cannabis sativa
ggtgcttaaagacggcctataccacctgactactacaaagaccaatctcaataccaaccatgttagtcatagtcaaccgttctcctttacagcagccactaatatcgagtcaaataacagtagtgtatctccttctatgtccgatctatggcatagaaggcttggtcatccatctaaagttgtcttgagtcaagttatgaagtctagtaatgtaaaacctgctatgaatgaaagtgttttattttgtgatgcttgtcaatttgggaagtcacatgctttaccctttaaaagctctaattctagagcctccactgtcctcgaattgatacacactgacctatgagggcctgcccctattgcttcacacactaacttcaagttttacattcacttcatagatgattatagtaggcacacttggctctatccacttaaacacaaatctgatgctcttgctgcattcaaacatttcaaagtgttggttgaaaatcaatttgacaagaaaattaaagccataagatccgactggggtggtgaatatgatgccttctcggacttagttactgaaaatggcattgtttttcaacactcttgtcctcacacctcggctcaaaatggtagagccgagaggaaacatagacacatagtcgagatgggcctaactctccttgcacaagcacatatgccattaaagtattggtcagatgctttcttcacagctgtatacttgataaatagactcccaacaactgttttggcagggaaatcaccatatgaaattttgtttgataaaattcctgattacaagtttcttaaggtgtttggggttgcatgttttccgtgtctaagaacatatcaaacacacaaattcgagtttcattcggtcaagtgtgtgaatttgggatatagtgaaacatacaaaggttacaagtgtttgagtccacacggtagaatatacatttctagacatgttatatttaatgaaaacgagttccctttcaaggaagggttcttgaataactaccagaaagaaaacatagtcacccttccaacaccacagtcttggtatgtactgccctttgtgtcaccaacaacagccccatacaccacttctcagtcacaacagccagcaccttcagtagaaccatcctctcccgtcactgcggcaacaccagaagagagaaatgttcgagacattgagcctggttcaccagtttctaactcaccagatgttactgttagtgttactaatgagcaggtacagccgttggttgaaaatttgcctctaactcgtccaacacctccacggcatcccatgataaccagggctcgtgctggtatcttcaagccgaaagtgtatcttggacaaacaaagtttgatttatctctgcatgaaccttattcggttgatgacgcactcaagcacagtgggtggaacaaggctatgagtgtggaaattgttgctcttctcaagaatggaacttgggttctcgtaccacctgatgaagctcactccgttgttggctgcaagtgggtgttcaagatcaaatataacgctgatggtagcttccaaaaattcaaggcgagacttgtagcaaagggcttccaccagcggccaggggtggatttcaaagagaccttcagtccggtcattaaggcttcgacagttcgagttgttttaacactggcagtgacaaaaggatgggagataaggcaaattgatatcaataacgccttccttaatggcattcttgaggaggatgtttttatgacacaacccccgggtttcgaagacccttcaaaaccaggctttgtgtgtaaactgaagaagtcgatttatggcttgagacaagcgccaagatcctggtatgatcagttaaagaaaacgctcatcgattggggtttcagcaactctaaagcagattcatctttgtttatgctacaacaccccaaatatgtcctcatggtgttggtgtatgtcgatgacataataataactgggagttgtggcagggaaataaatgcctttatttctaaactagacaagagttttgcattgaaagatttggggcccttgaattattttctcggaatagaagttttcagagacaacactggtatttacttgtctcaagcaaagtatatatcagaactcttgcagaaacacaatatgatgaatgtgaagccgtgtcctactcctatgacagcagggaagccactgtccataagcgatggtgagttgctgaacgatccttttatgtacagaagcttgattggggcattgcaatacttaagtcacaccagaccagacatctcttactctgttaataagcttagccagttcttaaaaggacctacaactactcactggaatgcagccaagagaataatgcgatatttgaaagggtcaacacatctcggtctgcatattacaccaagtgatcaccttaatctcataggcttctctgatgcagattgggactgctgcccctatgataggaaatcagtaggaggatactgtgtcttctttggtgaaaccttagtgtcctggtcttcgaagaaacaaagtgtcgttgcaaggtcaagcacagagtttgaatacagagccctggcacatcttgccactgaaattgcttggttacaggagctgttaaaagagatgaagttcaaagtgttcgaaaaatcggttgtgtggtgtgacaatatgggtgcaagt

SEQ ID NO: 27720 - DNA, 4694 bp, Cannabis sativa
  modified_base (4639)..(4651): a, c, t, g, unknown or other
agccagcaaggctatcagtggctggtgacactattgatgccgccatgtcgaaggttgggggctacgctaggagttactttatggggtataacataaaaggtgttcgcctattcttccatcgggtcccaactttcatccagccactccttatcttgagactaagagatatggccaaccacattttgtctcccccatttgagcagcgcaacatctatacattgacttatgaggaaaacttcaggaagtatggcaaagaggcctctttgacaaggatggcttagtcggtgactaggaaggactgaactcttaggcagcgtcttgctcgtgggggcgctgttggcgatgccccggttttgattaggcttgagagataggagcctacgaggtctgcccgacttgtatcgatagacaaaggcaaaggcaaggccgtcataactgaaaatagctctagtgagtcctcatttgaagattaggggcctttaggtggcactccttcgattgatcatcctaaggagtttgacggtagtaactcttttaccattgcttgcattttgtatatattacttgtatgttgacctcattgttctttttgtagacatgacttctaggctaaaagatttgatgaggcgaccatcgagtagcccctctggtgggcatgttctgtgtaaggtttcttggacagaggttacctcgcacatgacatggtccctcttcctccacctcctttaggcccacctctagtcaatcagcctgtgattcgtgattcttacttctcctcctcctctcaaggcaccgggcaagaacagccgaaaacatagccaggtagtttattccagcaaaagtgaaaagggcaaggaattttcacataactatattggcaagtgcctatcaagtgttgatgagcagctctaggagctagatgatgactcccttgaatatatgatggacagctccttgagagatggggcatctgttagctctcttattgtttgctcagtttttacttcatgcactgtactaccctattgatcttgtttcttcttttttgattttaatgtctcttgaacttatccatgaccatgataggaccaagggctctacaacgaccttcaagaagaaacttgaacgcaaggatgctgagcttgcaacaaaagatgcgcaactccaggagaaggatctctaacttactgagcttgacaaggtgatggcagatctagaatcggcggagaaggatctaagagatgtcaagggccagtacgacggtgtgggccagctgcttggaatttggactaaggaggtgacaaaactgatttcagagaacatcatattgaagagggagttggatgctgcaaagaaaacctactaagagaagtaggaaagtcttgatacagccttgcggggtcaggatgaccttgtagttgagttcagtgacttggctatggaaactttttatgagtgttacctcgataatcctcagggcaacttttcttatgtcgagtctcttgatcgcaagagcataattgctcgaggcagggagttgtatgctaccagaatagccaaggagagtgctccagaagcatctgccatccaacctggccaggcttcttctgaggtgcatgatggccaggttagggagaccagccagctttctatggagacacacactggccagggtactagtgaggtaccttctgtgcaggtcgttggccaaactgatcctgtcttggagactcttgatgtttaggttacctcccaggacccatctactctagactcatttgtacctgaaaacaattgaaggccttacttttattattttttcatgcttttattttgcacttttttagctttgttcttgtatggccttaaggccctttacttttgaactagtgaccgactagtctatctttaatcctagctttatcttcttttaattttttgaacatgtagctgggtgggcaacatttactcccaaacttatgcattttatgttcaccttaaagaataccatttgcacatacttaactattaatttcttgctttgccaaagcttcaaaaattttttgcttaagtatatttgtggtttttcgatgttgtgtgtgggttccccccaagtgatcaagtaggcttaaggtctcttggtcacttgcaattaaacaagtatatagatcatttgcctgtgtattttcttgggaggaccgttttacacgcatgttgaattaaaactaagaattaactttagaaagctaatatgttaacaagttatttgacacaatttgaactaaaaaaacttttttattcattaattgatcttacatatgtgttgttgttgtgcaacgtacatttttcgtataataaaagcttacaaatataaagtctacttttaaaacctaagttgtggctacccctgcacggtatacgtgcaagggccatcactgaagagtgatggtcatatagctcttttttgaattcatgtacggtgagccatccaagaaccaccactgaagagtaatgttacaagtgagctactggtagtactttttgagatgatctacattccattatcttagtaggagaactaattccaacttctcattgtaccgaccaagtttgtaagcacctttacttgtaatttcataacttggtatgttccttcccagttaggtccgaatactcctgctacaaaatctttggaatttaagaatactcttcgtagcactaagtctcctacaaagtatttactctccttaacttgcttattgaagtactaggcaactttttgtcggtaggcatgcatctttaagttggcttggtctcttctttcttctatttcattaagggattatgccaacaaggtgtggtttgttccttggtcataggttatcctcatgtgggacgatggttccaatccaacgtgcagcaatgcttcatagccatgggctaatccaaatggtgtatgtccagtggtcgtcttctcggtggtcttgtgtggccaaagtacctctcgaaggaggtcaggccaactaccttttgccttttctagacattttttcatagtgtctttgatggtcctatttatagcttctacatgtccattcgcttgtgggtgtgcaactgtggaaaagcttttgaaaatgtcagtctattacagaattcagtgaacatatccctgtcaaactattttccactgtctaacacaatttcctttaggtagttgcccaatcaagtttatcccccatatagtaaagggccaaggagactgcatttgtattagctcgtttggtggagctcttgggatctttgagaatctttggaatttgtcacattttttgacatagtccattgaatcctcgatcatggtagaccgaaagtaaccttgtctgagtatctttttggaaaggctttgcccctcagcgtcctctccatataaaccttcatgcacttcaattaatagtcgttcagcttcttcctagctgacacatcttagaagtggcatagagaagccacgtttgtgcataaccccgcctaggatgaggtactgggcatctttcttcctcatttttcttgcttcgttcttgtcttttggcaagactcctgtttggaggtatcctgctattggtttcatccatgtaggactatcatccaacatgtctatttcttctaaaatagtgatgcttgggtctttcaagaactgaataggcaccaagttggtcttatctgttaaggtgttgctggctaattgggcaagtgcatcggctattgtattttcttctctagggacttacctaatggtgtgacctttgagctgacttaataagtcttggattttgctcaagtaggccatcattctttcttcttgggtagtatattcacctaggacatggttgatgaccaactaagagtcattatatatgtcaaggttttatgcccacacttcatgtgtaagctttattcttgcaattagagcttcatattcagcctcattattagaggccttcaaatctaacttgattgcttagtgcagttgttgcccccaagtgtaatgagggcaatgccagcatcggataggcaatccgtacatcttccatcaacacgtagctttcaggttgaattctcttgttcttgcttcttctctggcacttgcttttctcctgaatcttaagagattttaggagatatgcctatatattcagtcacaaattcagcaagagccatgccttttattcccactcttcgttggtaggtgatttcatgttggccaagttctattgttgacttgagtagccagccagatgtttcagatttttgaagtacttgttgcaagggctggtcggtgtacactcttattaaaagagcttgtaagtaaggtcttaggtttctcgaagttaggagcaagtattacgcaacttttcaatgagtgggtattgactttcagcatcaatgtattttgctgacatagtatattgggtgttgaatgccattttcttctctaatgagaactgcacttacatcaaactctgtgactgacaggtatatgcccaattcttcattgtccagaggctttgatcagataggaggttgagccagttgtttctttagctcttgaaaggcagattcacatgttgggttttatgccctnnnnnnnnnnnnnttcaatataatcagatttacatattaataaagatcagaaataa

SEQ ID NO: 27721 - DNA, 4030 bp, Cannabis sativa
  modified_base (3102)..(3105): a, c, t, g, unknown or other
  modified_base (3155)..(3162): a, c, t, g, unknown or other
  modified_base (3237)..(3238): a, c, t, g, unknown or other
  modified_base (3286)..(3291): a, c, t, g, unknown or other
aaaataatacttttattactcaatttcatctgcagtgatgtcttagatttttttcatgtttaacatggttttcgtcttccttgctgtttagttattgagacatccagaaaagggctatatacttatgaagatatggtcagtatgggaaaggatgcagggaaggagcttctctcacaggcaggtcctggcttttttgacagctgagtaactgattgtttagtgttagaacataataagaatattgatgctatttatgcaattttagatgattattcccaattgagtgtattcatagattaaagttttttttgtttacttttgtaatattatgaaggataattatgctattgattgtaatttagtcgaggaatgaagcacactaagattaggattagtgctgtatttcgagtgagtagttcaagctgaattttgttgttgttgtaacatctctatctctctctatcatttcaagattacataatggtagtatattatcattgaagaaactatttgaattttacttattcaatattacttggctacttggctattgtaccgtatgtatcttttgatacaattggaacaatatggtccttcctaaccaacaattcgttcaattgggttttaattttcctaaaaatgaataacataaccgcaaagtaatgctaaaatggtttagctggcaatttcctattgttcaagaagtgctcaatgagcataagggactgtcttggtgcaaattgaggaacttcatgaccagctcctcttatggtcacaaaatctagacccttgtactcaacagtccaacctcccacctatgtatataggaccaaagagaaaacaaaatggtattaattaaaaatataaattaataaattaaaggaaaaaaaattgttgtatacctgtctactattgtaccaaggagtccaatcttgagttatttgtaatccaagcttttttaatgtgtatctagtagatgtgactggaattctcccatcagtatctccgctgtatattttcaaaaatataattataacataataattggtgactacagaacaaattattctagttttatttttgatttatacgtacctgtaaacccaaatgcgaagccctccagcaataagctttttaattataggaagtacagaagccggtgcatccttccaaaactcgatcttctcgctgtcaaaaatgagtttgctttgatttattaacacataatatattattaacagatagtaaactatagagatgtatgctttccgtgggagagacataaataaattaaggagagagagagagagagagagctgtgatgagcaattgatgcatgtgagagtgactaataaatatatatagatttgcagtacctgcaatgagtccatggatatgaaattttggtgatattggcatgcaatgcagcctggacatcaggcctattaaaatatgtctctgagtaatccgatgcacatggatcgtatcctgctggcctcttgtgccacccacgctgccaaaatataatacataccatttttcatcataaattaattaatcatttttattgaaaaggtatatatatttatatatataagaacaagtatacatataacgtacttacagattcagaaaacaaatggttagtgcgaaagcgttggaaaactggggaatggtggttattattagcagaagtagtgatgatcttcttagtgttattaatgatgacacatttgggagtgtataagctgtacatgtcaatgatcttatacacatcaaaatacttgttcattagaacactgcactcgttatgatcatcaacttgttgatcatcactgaaattgcatttcctcctaatcccatcgtataaactatctgatatcactgcatggttccatgcatattcgatcattccattctgatctgtttcgtcgtccattagagcattacctatctgcaagtgcaagtacgtacacacgtatatttatttacacaaatatcatgatcttggtaattagtaaaaaaaatatatatatggaacatatatgcctgcaatttcaagcaaattaaattaacgcacgtatttactggccggtgtgtgtatatatatatacatgtatattcatatttgttaacgttaaaatgcaccacaaacgttatacagtgttagtttttacaactaatcaagtttaaccaaattgaaattgggattttgggacctataataggcttagtactaatctatatatttaattgtacttaccatgaaacctttgagatttatgtaatttctctttgccaggcgcttgttttggtcaaaaatgacctcggacaactgtgggacataatgtcctgtggaaaatgtaaattggtttatgatagcccaaggaaacaattgcgatacacacgaacatctacacttaacgatagttgtataatttgccacaaaaaaataaacaattgatagtaagtataattatttttaacagtatatttctgtgttcctagacagagttgcggtcctagaatttaagttacaagtgggcgtaggttttttttttaagggggcgtactttgtttaaaaattgatcgatagaaacttgtatatattataatattataaaaaatgacaataaaagaattgactataattaaaacacaataatagaaaaataaaaagtcttattggttgggaaagggttcaactactacaaccatattattaaaaattaaactttaataatgaaaaaccaattatactccttattggatttagaccttcgacttttattatgtgtaagtagcttaattattaagcaaaactaacattttgttaataaacgttatttctaattacaaatatattgtaatcaattaaaaaatatatattttcttaattttttttagggagggccctttggtaactataggcagacccatatgaaagcaaggagcagaaaaaaaaaaatataaaaataattacatgagacattatcttttttgtaagaaaattacatttttatatttcaagatttttttttacatgtttacggattttcataaaaacaacacgaaaataacaaaaaaattacataaaagtannnngaaaataacatctaaataacatcataacaataacaaaaaataacatacannnnnnnnaaaatcaacaacaaattaacaagactacagtacaaaaagaccgtattttctaaataaaatcaaaaaaattgtaannatatttaaaattctgtgaaaccgtttttttgtaattttttttgttatnnnnnngtatttgtgaaataatcccaaaactatatatgttatatatttagttagtcataacatatatttataattaataaagataatcaaaagttcaaattcctaacaagagtatttttattttaatataggatgcatttagtaacacttttttgatcaattttttattttttacattagaaaaaaaatattttctaaaatcatgttttataaaattattttcacgtttcaatttttcaattgagaatcaaaattagtcactttagatttttttataaacaaattttattttaatcaatattttagattctgactccaatctagactttagaatccgaacctggatcccgaccctggacccaaatcccaactcgtacccaatttaaataaaatcatcaaatgaatataaaataaattttttacatagcgaaaacttttgtgtttttttattttaaaattgaaaagcaaaaatgattataaaatacatttttgttttcaaaagtaataaaatattacttttatttttgtgattaaaaaatctaccaccatatttatacatttacatttaaaaaagatggttctaggatacatgttattattatatttaatactatagaaatataagggtgtgtttactaatatatatttttttaaaattgttttttattttgtgaaaatatctagaaaaaatactcaacaaaactattttactttttaaatttaaaatgaaaattaaattttgaaa

SEQ ID NO: 27722 - DNA, 1319 bp, Cannabis sativa
agagtgtggcagcacactaggtttcctgcctcaatacttgttgatggcattcatttctttgaacagttgaacttcttcttgttctgaatagaaatagaattgtgcattggttagcactacagtttcaataaaagtttcatattgaaccttttggctgttttactgagcactaagaaagtaggctgttcaatatctacaaatattgtttcctgtgttctttttttcatattgtgatattgagtttttattgtcagattatcaacgtttatgaccaaaaatatgaaagtgcagcagccttctggccacaagttcataagcgtgtaattacagggttaattatatctcaacttcttctgatgggattgtttagcactaaaggtgttgcaaagtcaacattgttgcttattgcacagccaattatgacattctggtttcatagattatgtaagggacgttttgaaactgcattcatgaaacttccattacaggttagtgatagatttaccaaagaaatggtctagtttaagacttccattactggtttgtttgatttttttatgatggtttcagatgcatcttacttcactagcctattaaatcactaaagaggaagtaatttacaaaatctactttatggctatattagtaggtatgaagtaaaatgaaaacaatcgagagattctttctagaaaagaaaggagataggaaatgtatctttatcttgtgttcaaaaaggagagaagatttaaatcctatctttagttttgtatggaaactaggatatgttctatttatattataaaataatcattttatcacttaaatatacatttccctcctaaaaccaatccaatttagacagtaatattagctcaaactggaatttggaaactcattacctaatctattccttccttccttccccttctttctcctgtcaaacaggaagatgtgaaaggaaggagatgagtaagagatttattggatgggtttgaggtgaggaaattgtcgtacttgaattgaatatttgagctcagttgacaagaaaatcttacatttcttccacttctgtcttctaggcatgatgattttgatcttctcagataccctctcattccttcctctcttttttcctcaagtattgtgcttctcctttcttccaaccaaacatagcctaaaaacaaagaattttgctctcagaataagaatcattgtatcttgcattatctcatggagtacaattaaaactaatgaaagattttatagggtctcatagaagcttagactacaaatgtatctgtttttctttcataacagga

SEQ ID NO: 27723 - DNA, 3959 bp, Cannabis sativa
tggagaagcggtagcctgttgcttggctctggagttgctaaagatgaaagctggaagtttaatagactctcttggttttttgcttgttttaatttttcgtttgttagcagaacttgtaactttatggcccataatgtggttaagtgagtttttacccataatcggtatggtcgtatgtgtgtgtcttccattctgaacaatatcctctgtaatgaccgtgaagtctaatttcatctatgcacgtttatttaaaaaaaatattacaacttgatatacttctaaaatattatgtgctcgctgccaagaatgatatttaaacaaacaagcaaataggtcatactattataagtagcagccatgttggttttcctttaagctcaaaaaatctaaaaagagttagacctaattaaggttatatttggtcggatgtaataaaatagatagtggatatgattcaagtttcattctattgttttatttggttggattttaaaatattagaatattattctaatacgatatttttttactattttggtagaatgactaattccattttgaaatagaataaaaagccatttcaaataaaaaatttattaattttatttatcaattttttaatgtattttaaaatttactccactccactctattcatattcttattctcattcccattaatattcttatatttttattcccattaatattcttatatttttgttaatcccaacagaaatagtttttttttttttggacttttataaaaatacaagattttgagtaaaagtttactattttattgtcacacgaattttttttacaatttttttttttaaaacaaccataaaacaacaaaacagaacaattaaaacaattatggaacaactaaaaaacaatcgtagaacaaccgtataaacttaatagagtacacagtataaaacttacatagtatttttttaaaaaaaacacaatatttttttaaaaaattaaaaatttcagtatacggtgtaatttttttttttcacatacaccaattaagagtacaaataattggtatgaattaaaaataaaaaatttaaagtcacatcattttttttaagaaatacttatttttcaatataattttaatttttataattacgacggtgtcggtgtttattactgcggattcacattgaacattggtcataaaacaaaataagaagaaaacctcttgctccgtccaataaaagccaacaatttggaggcccaatccattgggcccattacctcagtagctatactctctctcaagcctggccacggagtggagtactgattctcatggtcttagtctattggaccacgtggacgtgcgatatctccaagagagaaatgtgccttgtcaatatcccacacctgtttgttttcacagctataaatagccccttaaacccatttcgctatgcctcctcgtgctctccgtctctacctgcttaactttcattcttattttctctagagaatcttgcaatggctgctgctacaggagcttcaatctcccttagatctggtcctccacagttgcaccagaacttggttcatctctttttctttatttgaatctgattttgttctcaatcgatgaatttcttgtctttttttgcgttcattttttattttcaagcaagtttagataagaagagtttgctttgaattaatagtcatatatcttggtattacatgtttgatctgtgctatattgcttcgatttttataattttagcttgtaatgcgaatcgaagatcataagatctgatttaggagttcttgattgaaatgattttttttttaagctgtgcatgcatgattcaaatcgtgtgtacaatttaaatatctactagtaagggaataattgatttacatttagtgaaatgttgtgcttgaaacttgaaagcaatttgaagaaaaatgagtttttggatttcggctttcaatattgtgagcaggcaagaaatatgtaatattaattaagcttgactatcgaagtctcaagtttgagttttctcttacatgcgaacccatgggagcttatttagtattcataagctcttagggcttgaacttgattgtaacccagctgcccttgcctctgaatttgtaacttttggttaagatattttccgttaaagaagttatcacatagctgtttttttccttacaattctgtaatgcatttctgcttttgctgcgaactgagctatgcaaatgtttagcaataaattgagtaattcttctgtagaagagggctgactcatttttctctatcctaattgttcaacaggcaacatccagtatttacggctcgagattggtttctcttaatgcttccggacgaagctccctctcattcagatcaacaccacaatcagttcgccttcaagtttcatgcgctgtatgtagtcgatgaatattgattttgttatattttctggtcatattatttgagcatactcacatattaatatctccggtaaggtggaagatatttgatagatatgagcacatagatttatctttatagaatgtcaaagaacatcataaatcaactgtaaattttcctaatgtaaaagatgttgtggcccatttgatgtagtgtgtccacaaactcttgtggtgttgagttcaactcattttagcctttatttatggttaaagagtttgtgatggactttgaaggaaccaaatattagtgttttttttcttgtttatcttcttcctgttcttatatttagttttgtggagctgtgaacgctttcaatctgaactagaaatgtttacataagcgcattaatactttgaatgtaattctgttgtttctgattgtttatgtcaacatcagtgggacaaaatttactatacgttgcttcaggtctttgtagcttgtagttgttccattgacatccgttactttgtgtttagcccttatgacacagcatcattgatgtttctgctatcaacccttgtgtaaaggtaatgatttgtttttttacttttattttggagctaattatgtatggcatccttctgcaggccaagaaagaaacagtggagaaggtgtgtggtattgtgaagaaacaattggcactgggagatgaccaggagctttctgccgagtcaaaattttcagaccttggagctgattctcttgatacggtaaatacaataattatttcatagaaaatttaaaggaaaaccgtttagtgcttattctattgcctaagatgactattcaatgcgcttaatggaaaggacaaatttattcttgtagttttctagtcagtagctttctttaagttattataaaccattatgattcctggttttaggttgagatcgttatgggacttgaggaagcttttgacattagtgttgaagaggatagtgctcagagcatcactaccgttcaagaggctgcagatcttattgaggatctgattgagaagaaggcttaaaaggaatgataatttagaggcagagtgagagaggagagtaatcatgtcaaaatcttagctttttaaatttagtattgagcagtttggttatgaaatttgggtttctttctttttttttttttatgttaattttggacatgaacagttagttgttgagtctatttaatcacattgagtactgttttatctttgtgctgtgtttgtattaattcaaatttcaattataattttattaaaggagaacgtcacaatatttgcagtagaagaagaattggataataattatgccaatactttgtttggtccagggaaaggcctggctgataaattcggtcacattctactagatgatgtgattaaagtctactagaattttggctaattggaagttggattttgattttcaaaaggaaaatgtaaaaatgcgagaatatctattctatataaaatgtggtatataata

SEQ ID NO: 27724 - DNA, 2032 bp, Cannabis sativa
catgaaggcctgctttaatgcctccgacatcctagcctcaagatcttatttttcctgagccaatgcttgggtttggttctccagctccaagaccttcttcttggattccttgtgggtatgtttctcttgttccaatgcttgtttagtagagcttaacttagttgcaatatcctctaacatcttaagagcatcatttttagctcgctctgcctattactacaaatgagaatggtgttttatctttttatccatagttgaagcaaaaaaatcttgtcattcaatagttgagtttgcttgtcatactcttgtgacaaaagtgtatgctttctttccagacttttgatttgagtcagagcttgagtataaagatccttgtatttatatctacactctctcttgatcttggtttccttcttctcatgagcaacaactttgtccagagactccttcaccctttgattgatgacagattccattttgaaatttccctctgctagagcttggacaacctcttctgtcctcttctcaacatcggtgcactctgaccttagcaattcaagcttataagctattttattgattaaggcatagtgcctctccaccatcagatgaacctgtaaggagaattatagacacattataaaactaaaattggcatacttcttgtccaatgcaacactagaaaacattaacttacaacattggcttggtcctcatataatttgtcatgtaaatggggtctccactcgccatcatggcaaatttttcaaaaccagtttccagctagtaatagaaccttgatccaacaaatcagaaaagaatggagccaaatcagtcccacactgggatgaagtatttttgctacatccacttaattagaaatatcaggtaagggcttatcccacttgtcataacctgcaaactttgcgtttctcctggtagatatgttagaggccaatttcctcaattcttcatactcaacactttttttagtaaaattgtttgatggattccatctgtcctcttacttcttttaatagcaacatagatctgataggaagattaaagcatggaggaggtagtttaggcagagctatcttttccctagacaattgaatggaggtagtcagaatgctttggagtactaggatttttagaggcaaatcatgagtatcttgctcgatcgggtacttctcctagtacacctttcaccgtcagatatatcagatcccttttgggattgagaatcggaagcttgtcttcttgtggcagccagctgttccaacttttccttggtttccaccttcaccttcttattcacaccatctgaagtccttgatcgcttcatgggaataaggattgtcctatcgcaatcttaagagccggaggtgttgtcttttgagatctactccatgaaacttatgtagttttgcccttgctcttgccatctttggctacttcataaactgcattggctctagagttcacggcgtctataaagttgttaagaatgcccatctagaatgtagcatgttgttctgcaagaagtagacaaagcatataacacatcaaattatattaaatgtaattacaacttcaaattactagacaatatgccataaagatccaaattgtttatcttagcatacttggtttttcctctaacagaatagaaaatttcctcttgacctaaattagtctcatactagaagaaccctgggaaataaggtttgctaagtatggtccactctaatatggtcatgtactggaggaatgaagtggtttgggcttcttactatgtagtcattgttagggtacttatccttgtctaaatttaagaaatattagttgaacctgcccttatcagtatgacttaaatctgctaaggatagagctctaattacgcaaaacagtattttaccactttcgaaggtacttgccctcggagtaccctcgttctggattacatctctgaaatgaatagtgagctcctcattttaaattatttcttctagaaactttcttttccagt

SEQ ID NO: 27725 - DNA, 1145 bp, Cannabis sativa
  modified_base (41)..(46): a, c, t, g, unknown or other
aacccgcccaattaacagattgggtgggttgtaattttttnnnnnnatttcggtttgtaatttttatcgattttttcggttcggtttgggcgattattcaatttgggcggtttataattttttttttgtacagccctaattgtaactactctattttttgtatataaacttctataatatcttttgcataataatatacagaattatctctttctctcccgctctttagctataaaatggtatcagacgcttaatcgttctttctttcatggcgaacaacaatgaacgatcgttgcacacctccctactaggttcatcacagaacactaatcctctttcgaaaacaaatattgtttctttctctcatgctttatctatttttcttgatgaaacaaattatcttccttggaaacaacaagtacttgctgccatcaaaggtaatcttctttaatgattccttgatccaaaccttatgcctccgcaattcatcactaaaaatgatcgacaaactaacacgatcaacccagagtatgaagattgggagcaacaggacagtttccttgtgtcatggctgttataatccatgtcaaaacgttttttaactcgaatggtgggctgtgattctgctgctcagattttggctcactcttcgtgaatactacacagatctcaatcgtgctaatgttggccaataaactcttcttcgaaacactaggatgaaagattctctcagtgattatctccttaagttcaagagtattgttgacactcttgcctctattggtcatcgcacctctcctcaagatcacattgaggaaatctttaatagcctgaccagcgatcacaatatgttcataacctctgttaacactcgtactgatgcatatactattgtagagatcgaagctcttctaatggctcaagaagtgtttatggacaaagcaactaaagaacttgacatcacaaataatgaagtaaatctggctcacaccaaatcctcaaatggtcaaggatctggcccatcaccctctaacctagcatattcccactagtcacgtggtcctccccctagtttttcctactccactaccaactctaacatctctagtgcacgtggcccacctagctttccccttttccctcca

SEQ ID NO: 27726 - DNA, 4206 bp, Cannabis sativa
tagaactggaccagatacttctaccttagccaagtcggctattagtggttgagcaacaccaacagcatgactttgtcaaatgtgggaggatactccaggacttatttcattgcctggcatatcccacaggtccaccatcgattctagagggtgccgacctactcaggctccatccccactctccgaatgagggatagggataattatatcttatccctccctgtaaagaggaggaatatattgaggttagcttacgaggccaacttttggaagtatggtttataccctccaaagtctgttgttcagggagttgagggcccgtctggtagcccatataatgttttagtagcggaggagacttgcccaggaggtgggcatacacctaatatggatgaggacttccctttgtctaggcttgtgaggaccatggagaaaagtgagaaggccctccgccaatgcttagctcgcagaggcattgttggtaacactaattttccaattaggcttagaggcaagggttctgtcccctgactacttttagaggtaagggcaaggctgttgttaatgatagcagttcagatgattcctccttcgaggatgatggtagttgacagtactaactttttgatttttcttgcatttcatattcgtaacttgtattataactttgttactttctttttgcagatatggctttgagattgaggaatcttggtagagagccttccggtggagcttcttcaggttgtcccatggtcaaggtagtctagtgatgccatagattcatcactatctcccccttctttaaagcctactctggctggtccactgaagatcacagatcctccatcgagggggactccacctccacctagatctttgggcaaggggacccaaaattctggttgtggggcctgctcagccacttgatagagaattgctaaggctgctcgtagtaacattggcaggaccttgcccatcattgatgaagagctccaagaggtagaggatgagatattggagtgcctgacgtccagcgacctttaagacttgacttcgacatgttgcatatttgatttttctcaaattgttgcagtgataagggctggatggctaggtatgaaccattgggaggctagccggccagggttacatttatgagaagctggccagctagaagggaccactcaagggatagctggctaggtcttcttctagcactaactcagtttttcttttgatttcaggacacattgaagttcattcttacccatggtagagccaagggctcttctagtgctcactgagagaagcttaaggccaagaagaccaagcttcaggcggagagggatgcacaaacccagacacaggcacttttgtaaaagagtcaggatctgatcaatggtctggagtgcttgcttggtatcaagaactaaaatgtgaccaaccttgctgctgaggcctctaggttggatatggagcttgggaataaggaccaagcatttcaacttgcttttgctggccagtaagccaccaaggacgagtatgttgccttatcctgcgaggtcatatacgagatatatctgcatagccccaaggttcacctctcctacatgggatcttttttcgtgaaagaacacttgctcaagggagggagctctacaagagcaagatgcggatagactaggttgttcagattattgtccagcctgaggagtcatcatcgggccatcttgacgaggttagggctagccagtctgtggaggaggtggctggctaggttgctgatcacatggccggccaacctacagaggctatggtcgactagctctttggggatccaaatatgtagctcacatttgactccccattcacctgcacatgagtagacacattttattagtaccttacatttatgattttatatcatattagcttcagtttcatgttcgtgtatggccagtgaccctttacttttgaacattacttatttttggtctttaggctttcatgttcttgcttttgccctataggcattatgtttttgaacactacttttgtttagccttaaagtcttttagtatgaacatatgaccaaccaggaggtctttatcctgactatcttcttattcttgaacatgtaagtatgcagatttactttttttttatattaagcaaagtatgccaacactgacttagcttttaatttttgtttatactaaactttaaatttctctatgcaagttctttgtgctagatcgatgctttgcatggtgcgggtgcccctaagtgagcatacagacttacagtctcttcgtcgcttgcaattcaccaagtttcatagaccttgcctggaaattttcttagagggctaccagctgtactcatgtggaattggaaagagaataacttcactaagttatgttgttagcaagtggtttagacccaatatttttttaaataagtttttattcatcaattggtctttaaaatgtgttttttctgtgcaacttacattaatcaattctacaagcttacagaatgaaaagtctgcttcttgaagtcaagtggctacccctgctcgacatgccaggtagaggccatagctgaagaacgatgggtacttagttctttctaaataactcttattaatgagttaatagaactagtactgaagagtagcatccatacaagttgatcactggtagtagttttggaggtgctccccattccaatatcttagtaggagaaccaactccatgttcttgttgtacctgccaaacttgtaggctcccttgttatatctgtaacttggtaggggccttcccaattaggtttgaacactcttactatgggatctttggtgtttaggaacactcttcggagcactaggtcttctctgaagaatttactttccttgacttagttttttgaagttccttgcaaccttttactagtaggactgtaactttatcttctttcttctactttatccagggattatgctagcaaggtgtgtttacctcttggtaataggttatcctcctgggagacgctggcagcaaatccacgggcaacatcgcttcatagccataagctgaagcgaatggatttttccctgtggcatcttcttgatggacttgtgcgaccagagtacctctaggaggaattttggccaatttccttttgccccttcaacacactttttcaaagtgtccttaagggtcttgctccagcttcgacctgcccattcatttaaggatgagcaacggtagagatgtttttgatgatgtctgtctattgcagaaatcagtgaacatgtcactgtcaaactgcttcccattgtttgacacaatattctgtggtagtccaaaccgacatatgatgttcttgacaataaagtcgatgacttttttttggatgttattgttgccaggggttcagcttttacacacttagtaaagtagcctgcaaagactacgggatactgcacccctccttttccctttagtatttgaccaatcaggtctattctccatatggcaaagggccaaggagactacatcatcatgagcttgttgggtggagctctcatgattttgagaatatttggcacttgtcacatcttttaacacagtccattgaatcctcgatcatggttggccaaaactacccctgttagagtatcttttgagataggctttgcctcccaacatcaatgccacagaaaccttaatgcaattctattaacaagtgctcgacttctgtctcagtgacacagttttggagcaacatttaaaagcctcatttgtgcattactccatctaggattagatacctagcagcttttcttctcatcttttttgcctcgtttttattttcgggcaaggctccattttagaggtaagctgcaataggtgtcaactaggttggactgtcgtccaacatgtcaacttcttcagggatggcaatgctatgttctttcaaaaactatattggcactaggtttgccttatcgacaatggtgttgcttgtcagacgtgcaagtacatcagctattgcattctcttttttgggaatctaccttattgtaaagcctttgagctgacttagctagtcttagatcttgctcaaataagctatcaatctttcacttcgagctgtgtattcacccaagactctatttacgactagctgagagtcgct

SEQ ID NO: 27727 - DNA, 7126 bp, Cannabis sativa
  modified_base (32)..(74): a, c, t, g, unknown or other
  modified_base (4007)..(4008): a, c, t, g, unknown or other
tgtgtttatttatcgttttaaaaagttcatannnnnnnnnnnnnnnnnnnnnnnnnnnnnnnnnnnnnnnnnnntggtaaaataaattccaacattaaatctgaaggtatcatcttcgaaattcacccccaatagagttataaaaatatgctttcagtaacccgcagcgagacctaccgggcaccaaaaattggccatcaccgccagaagctaattttcacttttagatcatcatcaacggtggaaaaattattatttttattttttccctatttttttgggcctctttcatcaacaaaaagggaattcccttagctcattgtttacattcaaaaaactacccacaaggtcagagcttctctatctagagtttagtttctgacacttgatctattgctgtaaaaaccatcttctgagaaataaaaattcaaagtagatgtatctctattactattgtgatataggggaagaactactataaatttattgtgtctctcttacaaatacttaactacttattgattctcaccaatctaccgagtgggtgtagtttaaaagtctatttaagatttctgagtcaacaaatttagttttaaatttctatttccttaatctagttattgcaacaatcattatgatattttttggagtattaatttaaattaacttttctctttaaaaggattacattatgagttacttttatgaaattaaattttatattttgtgacatatatacttatgccaatacaaaaattatatttattattatttgtttattatttttatttatttttatatttattataaatataatatttatggtatacatcttgttgatagtatttttttaacaaggtaatatctgcaaagatataacatcacatagacacttaaaccatacaatagtgcttatgaataattatcaatatttaagcaattattatgatattatttaataaaaaatcttgcgatttgataggaatagaaaaatatttgatatatgcaattcaaagaacttttacaatgaacttcagattatattcaaaacttactacctcagaatatctataacacatgttttgacaataattagatatagatgtaatcttctactcaaatctattagaaatgttaaaatgcttttttctgaatagattaagggtggaccatctcataactagaaaactagtagaatatatttatttgttcttgatcatgtaaatgttccattatctcctacaagagttatagatgatcccacaacttctgttgtctaacctcacgttgtaacaactaaaggatctataccgctaaagtacctggacatagaattacagtaccttatcatagtgagaggatttcaaggattccaccctattataatttagatgacattagtgatgacttacagtgatatgttcaagaaaattactttaaaataaaactaagaaaaattaatctaaccattcacatggatagttataatttatcaaaattatgacaataggatagaaaatcctggtatgtctatttaagcaaaattcttggtccatatgaattgttattttttcaacaaaaaagtttttgctatgactggtgattacttattcctaagcaactattctacactaatgaaatactaagatgttgtcttaatgacttagtctaaaggaattcattagacttctagtattaggcagaatttaacacttccgaaaaaaataaatgtcataataagatgtccccaagtaccaattgtgagaggttgaatgcgcacttgtgtatgcattaaacaagacacctagtgttgagtaagagccattaatgagtataacccagcaatggaatattgggagttattcaagaaagaatctctttagattaaaagtgatctatatgttagatgataggggtgatgttttgaacccttaaagtctacatcaactcaaatttaatattctatatatgagatggtgattactttgggggtggaaaaattattctggaggactgtaaaaactcatctataatatttaagttccaccaataaaactaaatgactatgttgcttttaagaggcactagaaagttacttaagatatacaaagttcaatactattttatccttatttcattttatggataatgtgaaagttgtatcttctatacattcatatgcacttatcatacaataaagaattcagtatcccaagaggagtgatacatatagaaaatgacatttcaaatgtcttgtgaacaccaaagaaagtaatagtggagaaggttattgcttgttataatcttacagatcctgttacttggataaattcaaacacactgcacttgatatgaacattgagataatgaattaattaaaatgcacttctaattttatattagtgcaagtaggagtttgttaggattttatgtcctaattaaataaaacccattttaatatgatcttatttattattgatagaagattagaaattatatgagtttatatgtagttttcatgattatatttttaatataaaaattctattaaatcccaaatatattgtcattcatgattatagtgttgtctacacagtgaaaaataatcatattatatgcttcaaacttattagtcccatgatttatcactgtattagatttatactgacgtgataattaacgataaagtttacttacacactaatatgtggaatgtcctttccaaggcattagcaaagtatactagtatcaaatgtactggttatacatcatatatcacaaacttaccgtgatatcttttctaagtcactgtcacttagttaatcttaggtcaattgatcttaatcctgagatagttaagttctagcttaattatactatatgggttctttgacttgttcattacagctgaccaataagatcggttcaatacttacatcttgggaacatggtagtgcaattagtgggagtattaatcatagatatagaatctatagcttttgtaactgtttagaagtgaaatgatagttttcttagagcttggcttaacgatataatggaagagcttttactgaaatatcatttataagtagttaagtgctttaaggataaaatacattgaagggtaaaacgataacttgaccataggttgtgtacttgcgttcgtgctgaacacccatattcaacttcttctcatagtttgccttctatttcagcatgtatttttatagggtgtgcataagtctggcaaatgcgtactttccccaaaaatcttgaaaaaaaattcaagatctttaacatatcgaagtatatcttgttgggatttcataccctaaataaaacccacttcaatatgatcttatttattatcaatacaagattataaatcatttaggtttacatgtagttttcatgattagagttttaatatacaaattctataaatcctaaacatattattattcatgattatagtattgtctacatagtggaaaataatcatgattatatgcttcaaattttttagttccatgatttatcaatgcactggattttactagcgtgataattaacgataaagtttactgacacactatcatgtcgaatgtcctttctatggcattagaaaagtgtactagtatcggatgtattggttatacatcagactagagcgatattgataatggaaaagatatgataaacttaccgtaatatcttttctaagtcaatgtcacttagtggacctcagatcaaagatcttaatactaaaatgattagaatctggcttaaatgtattacatgttttctttgacttgttcattacagctaaccatgaggattagcccaatacttacatcttggcaacatggtagtgcaattgtgtgggagcattaatcatagatatggaatctatagcttctattactgtttagaagtgaaacgatagtttctttagagcttggcttaacaaaataaatggaagagctcttatttcagtaattatattnntttactgaaatatcatttataagtagctaattattttaaggataaaatacattcaaatgtaaatgggaaatttgtccctactcgatgtaaatcatctatactggatctttgattgtttgggttgtaaaattggataatttatagcgtatctattcttggtgaatagaacattttatgtaatcaagagtgcaattccgaatctattgtggagttgggaggaattaataagataaagaatttactcggtaaattctagaattacttgtcgagagtttgattatataggcccatggtccccacaatattctagataatattgtcttgtagactccattaattgattttattaatcgattagaggttttagggtttgtttataaattaatagactatgaaaagtctaattaataaatttgataattaattataattattaaatagataaaattgacatttattaacttagaatgaaaaattattattttaaaaaggaagataagttttaataaattggcaaaattgaaaccgatgggcccatatgagtatttcggccaacaagggtttaataaagccatttttatccattttttattccattttaaattctaaacataacctgaaagttacaatataaaaaaatatgtttgctcttatttttcataacacttttgactcactttgtcagacaaatagaaaatcaaagagacctttcatatattttgaattctcttcttcttcttcttaaaatttttgaaccttgagtgattgagtaattgcccatacatttcaaggaaatactcaagatagtgtggaagactatgtagtctttttgttacctgaaggagaatctaggttcaggtcttgatcatactctgcaatagaaaggatctagggttagagatctgaacaaaatgagtcatattattttgttgccatcaatgtaaggtttttgataaattttatatgtttaattcattgtttttaagaaatttatatttaggatgttagattataaaatagtaatctaatgtacatgttagtaaatccagatcttggtaaaatatttccaatatatctgtggtaatacacgtgtttccctcacggtccaataagactatctccataaaaaaaaaatacaacccagcttgtacgtgtcttttggaatctcccaagctagaaacttatttggaagtagctccgtcttcacattatctgaccggttgaaataacagtttatcaaccggtccgacctcgagtaggtatttttctcctcatctattggcccctgtgtgaagttgaggcctataagcagtgcaaacttaacaatgccaaatttcatctcattctgtccaatgtaaaactgcatttcttctgctttctcaacatcaatgttccttttatgaagcatcagttggtgaaatgatactgaaaaaaattatcgaggaccaacctgacaaaattgaccgaaagggctttcctccaccctatcattcaaaccgtatttatcaaataccaatttaattattttcttgaatatatataccacttccttgataggtcacatgacctgtaaaatgctcaaagaatgaaactataaactttagaggcatctacaaaagaaaaaaaaaaaagtcagcaaacctatcgataaacaaccaacaaactatccataaacaatcaataactacttaatctaaaaaataattaagacaaacgcattactaacgacaaaatataaatataatatcatcaaactatcaaaaaataaccatattgacaaataatctaggcaaactacaaaccattgataaaccatagatattgtatcgacaaattcaaaattccttttaaattaaaacacaagaaaaattatcgataacccatagataaacttttaataacctatcgacaaaatcaaaacataagcaaatttattaacaaaattatcgacaagccatagataaagtgtcgatatacaattgaaaaattcaaagttctttaacaaacaaaacctaatcaaaattatcagtaacttttccacaaaatgtcgatatcctattgacaaacatttaaaaaaaattgaaatattagttgaaaggcacaatcctaaccaaaaccatcgacaaacaatagatatcctattgataacctatcccaaacatcaaaatattaaaaagcaatgggtaagctaaaactatcaactgcccccttgatcataatcgatatcttatcgataacactgtaaaaatagaagaccaccataaacaagccacaaaatctacaaaaattaaactaatcttaagaacatatacaaatcaacaatttaatctatgaaaactctaaattttattcaagaaaatttataattcgactctgttgagggattttcattgttcgtggtggtctgatctccatctcgcctatttcttggtgatggtggtgttgttcaacactgcaaatggtggtggtgttgatttttaaacttttatacagagaaaagagcaccaatgaagggttttgagtggggacgatggttgggcgagagaagccgaggaggagttcgagtttggtttttggttgagcgagagaagtcttggttgggttttggaagtttgggttttaaacaacaattttggcagtagtggtaggtggcgaggtacgttggtggaggagagagaagccgagggaggaagagagaagagagaaagtcagtttttcggtaaaagggtatttttggtatcaaataaaattaaagtcatcaattggtaccaattaacttagggtctaaagtttgataatagaccaattttaaagtatgattaacaaaaattccctatatttttccaactcatgcatagatgataaaatgatattcgaatattacgaatgtttttcttttcaaagtaagtaatgaaataaataaatatggttatataggagggtaaatttgactaattatggattcattcgaccaaaattgttcccttaaatgtaagctattcaatattggtaaaataagttatttttttctaaaatctcatcgtagccctcccatttgaacaatcctctctctctctctctctctctctctctctataaacacgcacacggaaaagca

SEQ ID NO: 27728 - DNA, 1701 bp, Cannabis sativa
aataaaaataaataattggtaagttaaaataaaatatttataattaattttcccacgtgatcttgtcttcttttccaatctatatttattttatttttttgaacaatgaacctatctaaatttatctcataaatttatttgtatttccttttccaaagcaataaaactataatatttttattttatttttgtaaagaaaaaactataacatatatttatgagtcacgttaaattatataatttaaatgtctatttcatgatttcataacgtgttattcacaattatctaggcatgcattattgtctattaaccatttttttgtaattaaataataacaataattataataatctcctttcatgataagattttaaatgaatggataataatggttaagtgtgagtttatgcacaataatattagggagaagtgatcattttgagaaaaatattagagacaagtcaacttagaaatataaacggagtgggagtggagattgctctcttactctcatacccatttcttaagttcactcacatatttgttcgaatactagtttaaattaaagcgaggacagcgcagggattactcgatagaagaagaattcttattgagtacccgttacatatatatatattttctttaaaaaaaaaataatatctcaaagataattttttcaaaaaaaaaaatcacaaaaactcaataaagcaaaaatataagtggaaggagttagtaaatataaaattggtaatcgaaaatacgattaagtgttatttttttaaagcacttaattaagtgtgattattaatatgtatcaccgtagacattttcatgaaaagtgaaatgtatcattaatgtaattaaaaaaaacctaaactataaagttattttaaatttaatatagttatgattttaaaacttaaatatataaatatattatatcggggcgggtatctattcccccacccccgctccaatcccgactcgagtatgaacatttaaactcatacccacccctgcccccgaaattcgacccccgccccattaggtgcgagtactcgaacctgcgggtataatttctatccctatctaaactatcttcggagatggttaaaatcaattatgacgtgagtttgtacgtgcattaatgatttggctaaaattggtgctagggtgattatcgtgatgatttagatttagtacttgcttctgagagacatggaatgattatttctctactgttgtacttaaaattttgagtttgtaataaatccaataatttcttttagcaacataacactcaatgatggtaaaaatgtatctttcgtcaatacaaaattcgtatagtgtcttaaacaagacatatgtaagattcaaattctaaatcattaagtttggatggacaaatataattctttttattataatgattgatgtaattttttaattagttgacggtaaaaattaattactttgttttgcaaattactaattaattgaaaattattacatggctaaaatgagacaaaagtccttaaaactaataatctcaatagttcaaagaaaatttttaatgaccaaaaaaattaaaggacataatttagtatatatcaaaagtaaaaatcctgattaattttattattaattttttatttttaattgataatttgttaatagagttataatgttgattaattata

SEQ ID NO: 27729 - DNA, 2962 bp, Cannabis sativa
  modified_base (28)..(42): a, c, t, g, unknown or other
aaaagaggtatgtttcaattaaatatannnnnnnnnnnnnnnttgattaattgattaataaaaatggtatttttcaacttacacctttttcttttgataattcccaaaccaaaaccaagattaagtgggctgactaaaatcgataggtaatgggccagtgatccaaacccagcccatatgaatacccgcccactacataaatactactgagtcgccacttcagaaaaccctaatccataggagcacatatattttctctccctcaagttgaagcagcaactctctctctagacaaaaatggcgtacgcgatgaagccgacgaagcctggtctggaggagtcacaggagcagatccacaagattaggatcaccctttcttccaagaacgttaagaacctcgagaaaggtacagtttgttctttttaagctttcaatttcattcgtttatgctttactttctatattgttcatactggaatgtacgtgtcgtttgtagatagaatttcatcatttattattggtttgttagacttttatttgataacaatatgtaaataaattcaagggtttatactattttggtcgagtgttgtaatgtttctttggctgagaacgtgtttggagatgaatttgttttgattattgccttattgaattgaacttatagattatttatcttatttaatttgacatagaagaatcacaagaaatctagtagttgctaaacaaattttttgagttaactgaatatttttgtaagggaaaatatgatctcttttggttcttacttttaattttaatgctgctttatttctcagtttgtgctgacttggttcgtggtgccaaggacaagagacttagaactaagggaccagtcaggatgcccaccaaggtattgcgtatcactaccaggaagtctccttgtggagaaggtatagtactgttctgttgtggtttttaagctaaaaattagtcttttcagtcaagtttaggactacccatggtttaacatgaattttaaactctcataaacacaagttgtatgtgcaattacatgtttccccttttgcaaattatgtatactttttcattgtttacatcaggtaccaacacatgggacacattcgagcttcgtgtccacaagcgtgttattgacctcttcagctcccctgatgtggtcaagcagatcacttctattaccattgaacctggtgtagaggttgaagtcaccattgcagattcatagatcttcttctacccttttatctagttaatactagatgttttagttttggctctagacttttatgtgatgagggagtttttgtttgttggcagctgtgtcgtaatttcaaatttttggatgctttacttgaaagttgaatacaacaatttatttattaaaataggtttcttctcagtttcttgtttgccttcttcaatttgttgttctgtgtcatttgaacggcttgtgtcttgtttaggattctgtttattaattacttgttcacactcgagcctttttctttgttaacaatggtttgagaagtcttgattaaaaatagattattactatcgttatacaaagaaagagcatatatatgttttaagttttaagaatggcttcagaacacagaattgtgcctggtttatgaagcatgtgataatttgtttgcttaatccattaaatgcttatttgccttagtattattcgtgagtttttatctattttatattattcttgatgcatgttttaagagaagcttttatgtaatttataccaatagctctcggcctagatgatgaaacatttgttcttttcattcatgaatgttttcccgttttgtttccccctttaaatcaataactctcatgtctgtgctggactattacaaatttgttcactttataagttaaaggaagttgcttgcaaacgtttgatgcacaaatttggttgatggaagcatcaaaactaaatgaacatttgacataattcacatataaatgattatcaataaatgattttccaatttaaattagaatataataacctcattatttaaatataaataacagaaataatacaaataatcatattgttgtgatgcttaatcataaaataatttagagcacggaaaaaggggctaatacagatatggaattggagatctctcaaatttgacgaccaaggagagagagcacgatgtccttgacgaaacgatttggaataattgatgagacatctataaactaataagagataacacttgcattttgcaccagttctactaatctagtaaggtggtgaaaagatatcattattataaaagtaaagcaaacatgaaataataataagaaaactaaaaaaatacaccacaaagggcaaaccaaagacgataatttgccagtcaacttcaaactcctaaggatccctccacaccccgaacgcctcacacactacattcgaacaagccacaaagagacacttggtttgaacccaagcccatacccaacttcactctcctccaatacttacaaaccaaacacaagctcttgccctaccagaatcgagaactagcccaacctagaaccaccaaacttcctccaccaggcccttccagatctggatcaattaccccatagcacacgaggctgaaaaacgcacagtgacccgcgggaaaatagagagagagactaggagaataaagaaagaactgaaattaatgtgactatgcactaatgcgccaaataagactagcacctaggtttttttggaaaaccctagcagatcgagagagaatatgtgataatatttgagtaatttcatttagttttcattcccaaaattcatgactgattttttttaaaaaaagactttgaatacgttttacataaatgtataattttattttaatgaaaaataaataaaaaatcaatatgtaagtctttttttttttttttt

SEQ ID NO: 27730 - DNA, 2189 bp, Cannabis sativa
tattttaaatattaaattaaagataaaaatgtcatataaaattttattaaaataataaaaaaacttataaattaaaataattattgagtaatacaaaataatgtaaaaaataattttcttaaaaaaatgaagaattatttcaaaattaattatttttttttttctaaattaagatatacttaaaattttgtgagttataaataaaactttttatatattttgagtatatgtattgagaaagattatgaccattcaaattaaaatagagtgaactctcataactaataagaggaatgaaatgtcgaccacaaaatggagaaattttccatttatatcaacatgaaaatagacccaaaaagaaaacttattgattattatacttttattaattggatgcaagtggaattattttattctatatttttattaaatataatattgcatgaaaattgtaattaaaaggctagttaaactttagactatctatataataactatgcaatttaattttattattattagattactaatcaataaccatagtgattgggggattttaacttattagggtgtttcaaaattatttcgtcaattaaaatactaaagcggagaatataattatttgaaaatttataactatgttggcttatatattaaaatatttaattaaattactggcttatatatctcataatcccaaagtcaaaactatataaatgttttcctaattaagtccggccttaacaaagtagtctctcacaaataattaattaattattattattgagtaaaaatagttgacaaatattgtagacaaataatatactaaaggaggctagtactttatttaatttgactctataagtttttttttttttcaatttaattgtgaaaataataaaaatttaaattcaattcaacacttgagaatgtcaactatatatatatacataatatttgaaatgaattttggggttttttttagtgtgtgtgactctatgaagtgtgaaagggtgttgataattagtccagtaagaattgagtatatagtgataaatattatagtggaaaaataaaataaagcaaaaaaaagcaaaaaaaaggccgtcctcaactatataataaatatatatatataaatcattcacgcatggcataatataaaatcatacaaaaattatttatttaaataaaacaaaaattcctaactatccaatctaatttcaaatcgtaataatttaatttataaatacctaactgccgtagcatgaatattttgtaaaaatgttgacatttgaatatttatttttgtatattttaagtcaacaataatgaataataaaaatgaattttttttatgagttgagtaaataatattttttcactcactttaaaaataaaagagttaattttaaggtagaatttgagtttgactaaatttattattaataataagaaagtaaaaaatgtgcgtaccattaataaattaaatagaagaagaaatgttttaacaattataaattcaataattatagcacaagttatattaaactacatgtgctacatcatcaatttgcataatttttatggataaaaaaatatgtaagttgtgcttgtgcctagttatgtgtgactattagaatctggtgatttttaatgagaaaattgtgtaaattttacaattttacttaatttgtttggaaaatattatgtatgatgattaatcgtgtgtagatatgagaatcaccattaaaaatgaattaaatggattaatgggtattactatgcgaacaagatgtgtcttctttttagtaattcatcttttaaaaatttcaaaattaagcgtgctaaactgtgttagaaagcatcaaagtaacgaaaaaaataattcttaataatttagtaaaaaaattattaaaatttatatctttattatttgtgggtttttttaagataaatcttacactttacttctatttattgtttttctttattgattaacctagttaaagtcgcaacaaagacataagtatgaaactcgattttaagaaactttgcaaataagtgagatgctctaagttatcttagtaactttaacagtggttgtaaggttgtggcaaaccaaatgtcccaagaaataggtgttaaacgtacaccattattccgactcataaaacatccccaaagat

SEQ ID NO: 27731 - DNA, 3559 bp, Cannabis sativa
cgatctcacgagatacagactgaagaatccatgacatgaccatattgttgcaaatgtcccacgcagagcgagatggatcatttggaggtggacgagatatggtgcctttaatgaagggagttttgtttttggtagcaatgttaatagaggctgcacgcttccatgactggaaattttttgactagtcaagagaaatgaagcaatgaggttatttgggtgatctccagttccgagatgatacatagtatgttcatcatgggaaggtcgatcaagaacggcacgagaaaggtcgtggttagcagtaaacacagagttatcattaaaaggcacatggccttgatgtccaagataaggaagattaccaccaagaaaagaggtgttgtggacgggtggagggccgaaggtggtggctgatgttgtggtggtatgccagtggagagggaggccgtctgttgaaccgttgggatgggagcgaaaaaaggcgaaagcggagtgtgaagaggagaagccaaaaaagaggacgtcggggcagagttggaaccgatcagagttgtagatggttgtccaattgttccacaagtggggagatcgacaacgtaaccggagccgaacacaccagaagtgggaggatcggacgtgggaggaggagctctgatcgtgtccgtcaagaatggagcagtcggaggtgaagggggcggagcgacgacgtcggcgacagtggcttcgatagaggagaagtcgttgccggagatggcggtaggaggaggggacgactccgtgacagaggcggcaacaatggagttccttgttctgggagccatggaagaagatgaaggaaaaaggaggctagggtttatacaactgataccataatagaaatgaaaaactcttttattaactgctattgtttcacacgggagtaatgccaaaagaataaaatggtaaatacaaagagtgtatttatagggtaagagggaaggtaaccctagaagaagtgggccgaaaataaggcccagtgggccaaaatctattaccattgataaccaagcgagaggctaacgtcaaatctaggggaggttgatgtcgaggcaattttgtaggatatgaaggaggttgacgttggggtgggtggacgactaagtcgagcgggagggaagacgaacgtggagctttaactcaaggctaggtacctattccctccttcctaatttattttctttcttgtagatttgtttggttgctagaaaaatacaaataataataataataataataatttttgaattttatgaaatgcatggtaaatttgtagttttgtctagccgtctcaaccgtcgtccccagttgctcgttggatcgaagaaggaaaaaattaatagagaacaacttttggagttatattatgagttttgtgcgatatttttttctttcttttttattttttgtgttttagggaagtttttaagttttttgggtaatgatcaatctcaatttattcctttaatttaggttttttttttttttattcttattacttaattaaagtaaatattacaattgagtattaatggtgccaatcactatctagacgtggtaattagttagcgatattctctaaaaaatattacattaaattatatgagacttgatatttaattgcagtaatagtaatatgacactgtaaggtactagatacaactagcaccttttagcatttctcttaaagtaaaactaatttagtaataattattttcaattttagttaacttattggtttctctttttataactatttttctcaaatgatttttattataattttaaataattattgtaggtgaactaatataaatgtgtcacatgaacaaaaatatacacataaacaattcatgttgacatttaacttatataaataaatatgaccttggtctttttaaaaataaataccactttaaatttgctaacggttcaataatttaaaaaaatttacagttaaaatttgagttcagagaattattagtaagtcgaatgacaattagaaaaatttaaccgccaaaaactcaaacaaacatatatatttctacgaagggcagaaaaaaaatttgaaattttgaaaaaaaaaataaaaacaaaaaaacaaataagatcatattgattgtgttttttttttttttgggtcagaatagttgttaataatagaactttttaaaatggaacaaaacgtttaggatgccaaaatcgattttacaatattccatattgagattgtacctggcgcatttgatcaccagagagtaaccaaaattgaaggaggcaattttaataagttactagccagaaaaggtctcactacttgatattgtaataagttactccttttttacacgtttggaatggttttgcttcatccaatctagacattcctctgcggtcccacagggatgggccagttgccatgcaagcagtttttgttgctgcaaccaacaataataataataataattgatttagccttgaaatttttattttattacaaatggcattagtttggtaatgcaaacgacttacccattccctaacttgtggtcctcctgatttaagctccaacacattcattatctcctttccattcactaatggtttgacttcccatactttttcaagatctgcacattcatacacaagatttaagaaaataacatacctagatactattagagaaatgctaaaaggcaacagagcatttatgaaacaaaacagattatttcctggaaaggagagaataaagcaagggttataatgccgtgtaatcagcaaaggaaaatagtctcctatgagacgcaagccaagtatctactctagtcaccatatatatcaaactaccttaagattaatcatatggttgaaaggtgggggaaatgattttcataccaaaaattaaaaagtggggaaaagacagaaattccacatccattattattccgagttaacataaagttgaaaagggaatggatgaaaaagtttcctacctaattcaagaacggtattctcagctgctttaaatatatccttcagcttctcaagttgaaagttctcgttgagaagatcttcactagaatcaatttcatataataacgtagacatcattaatgcaactctccagaaatctttgatttctcgaagcagaaagcctgaaaaagttagtgactatgttaaaacacatatcacatcacagacttggtatgataaaacaatctgacaacaaatatagggacttatcacaaacaaattacattcgaagaggctttgcatctgttaatgatgtcaactaaagataaacctttagttcacataattaaattgttactataacaacaatttcatacctgtcaacactcgtaattttgaagtgatggggatatcaacaagttctgatgcccattcaacttcagttagtttgatgtcttcatttaatgctagagaaggaagcaaagacaagaatttcttcaatgtgcggtacacatttactattggttttttttttttttataaagaaaaa

SEQ ID NO: 27732 - DNA, 1515 bp, Cannabis sativa
attgaaagagaaaagatacctcaagtgttcctcaagcaacactaaacaatttcccctcaaaagacttcaatattcttcaaaagatcaacaaaatcacaaattttggaatatgaaagagagaggaggtcggttgagagaattcagaccaagaaattggttttctattttctatctcagtcaacaaatggcttaatacattttagtaaagttggtcaaaagaccatttttcccctagggcttataaaccacataaataactaccaagggtagttttatcattttatatcacatacttaattcataatttcatatatatatcatgttatagctaattctttttaattagagttactaatctattttactaatctccagatattataattacaaaagtgtttgccaagtttgagaatcatatttcttgccttagcttgtaagaaatgaatcctaaaccctttgcatgaaggattgttgttatatttatattcttagggttctcgtatgtaaacatttttcactgatggggtaacttaaaacaacatattgactttgggtccatctagtgaaacccagctcatgaggcattgatcttctactaatgtggatgccacatcatgttgatagttatcaaaatgtgtcctaccttcatggataataaagacgcataaatacttgattagaaattatcttatttccttatttagaataattaattctcagatatgatttcaaaaataaagtcctaatattgtgggatttaataataaatgagcgagatcgcaagcttgacatctgaaggctcattaatttccattctaggaacacttctttgtgctatccagaagcctgctttgttgggtctttatctctcctagacgaggtgttagtctagcatccggatgtcttgacttagataatgggtttgatccattatcttgattgagcctacatttgggcctgtataagacgaattaatgtcttggagttattccttcttgaaacacaaatagtattagccccccaagcttttgaaactctggggttccagagacttacaatcttccttccggatggcatgaggacatgtggatgcttaaaaggtgaaaaccctttttaattctaagtaaacaagttatggttgacaacttcttgctttttgaaataaaatgacacatgacattatctttgtggtttatgaagattacattcattgaaagagcgcatgtaacgtggatttgcgaaacgataaatgattatgtcaatgagagtctcgaggacaatatcatcatttgaattacctcaattttgtaagagtcatttaatgataacctttctgcttttcaaactgttagatacagttagtgttttcttgaatgtaatttgatccatcaatttaggagcacgcaaatcaccatttttactctataaataaagtgaaaatagtttgcttaccaattttgccgatttttcattctgagcttgaatattctgtgagagtgttggaattattttacc

SEQ ID NO: 27733 - DNA, 3569 bp, Cannabis sativa
aaagttagtgccatattgtttggcgattctgaggtaagaactattaaagcttaattgaacatgatgcttggggtaccaactatcaaacctttgagcgatgcgatctacacaatttcaaatgtaaaaattgtattgactatccttaaatttaactaaggaagtacgctcggccctaagtacggtgggagaccatccacaagtaccaaatttattacctcgggaggcatcatcttcggcctcttgaggggttattttctttaaatagtggttacgagccacgtaatccctgtcttctttgttggcaggaactggaacttgttgccagtctgaatatttcaggatttttgaagtctcaagaagactgtttgctgtcgagaagagcacatgccttcaagttttcctcatgaaacaagaagttagtggcttgcagcccaaaggggagaccaaggacaatcctgtgcctcttttccatttccagagttggaataggtctcctcataaccgctatcaatacaacacaagaaatatttgtcaaaattaacgctcaaaaccaagtttttgagaaaaggcaatacttatgtatgatttgggatgcaattgtgttaataagagccgagacctgatgtctaagagaattcatccttgaattcattcttgttggctagccttacaataatcctttgatcattggtgtgggtcctgagataataaaaacctccatctcctcactgcctttcgggacaggccttcacggaatgaaagtaaagaatttcaagtggggtcatacactcccacttcagaatgtgatataaaacttttaaactggccaatattctgtacgaatttgataccagctggaatggagcaattccaatgtagttacaaaattccttgaaatagtccttgagaggaagtactgctctgcctcttatatgttcaaggccccaagcacctatttgagatggctcgctagtgctacaaccttcttctaaaaccactttttcaggagaaaagcaactgaactctcccttggcaacaaacccaactcagcatccttgttcgtatgcaacagtaggatcttgaggagtctttgattggaggtaaaaaatagtggtctcactaagggaatattagttaaattagaaggttcatgccaagctgcttctcgcaaatagtgatgcttaccctctattttctcttgcaaaaatttcctatagcgactagaagttttatcttagttagtttttacaaggtgatccttaattttctcatcatttacctaaaaatgattttaggtatgttaattctaggtctaaactttatggcagaaatttgaggataaactgattctaagaatcttgagattgtgatttttgggaaaaattaggacataattatgattaataatatcccaatttctagaataacagagcataagtgaaacccataaatttatgaattgtaaaacctaaaattttctagccctagaagttattctgatgaacaaaataaaaattacccaaacatcaaaacaatacagataaggaaaaaccaactaaggaaaagaaattatgaagacataaagataaatctataaaggaaagagagtaatcacttactgttttgatggaaacttctggacagatggaaacttggcgattgaagctttgaaggttgtaaaactaggtttcaatggcctctggagcaagaaatgaaatcaactaaaatgcataggaaatatgtaagagataacgagggcatgcaagtttgaaaaggaacaatagaagtttttggcaaggaagctcaatggtttgaaaaataaaaatggcaaaataagatgcttagtttcaaatttatactcaataaacgatcaccgtttgatcaaagaatatttgatctaacggaggggaactgtgcaaaatgggaacagtcagagcattaaatgttcaatgatatgcctcgaagttctgaaccaccaaaactcaaaagggttaaatacgattatacctctaagatcatttaaaaaaatctttttaattaaaaagcactttttattgggcaattgttatacctaaaattcaactatttattagaagttaacacatgtcctacagaaggaatatgaacaaactcagggaatataataatgacagtgcatcatttaatgcaatttaaataactcatttcaattaattaagttcgatagaaatatttaaactcactatcttatgcaagataagaataataactatttaactaattgacgagacatacgttcgccttgagataaataaagtagtaaaaatagacaaggcaagatatccaaggtcttacaaattgtggactgacgtacatgagcatggtgaaaataaccacactcaaccgtctcgcattctacacgatgtagtagtcatatctcatcatcactataaataagagagtactgcgagatgaaacatgtctatagttatcattttttcctattaagacggataaggatgctaactcatattcgacaagatgcaaccttcttagtcaacataactgtttaaaggataaggcaagagatagttgggtagttattagatattatcccatgttttaataagtgaaatgtttggaatgtccatgtctcatcagtagttgtaaatgaatcagtcccaataaaaataactgccaacatatatacctataaggggcagaatccatggggaaagggatagaaaaaaatagagaggaaattgtattgtttattatactgagatttatactctgtattcaaatacatatgcctaataatacggactcgtggagtatgtaaatttcaactacaaaactacgtaaaatatctagtgtttattatctttattattaaattctgtagtgcacttattaagtaaaaggctagatatttggttagcgaaaatctatgttaacagttgtatattgcctaagggtggtgttgaggacgaggaatgttgcctaatctctatctccttttatctcatgttagcttgagaagataattgtgttgagagtcagctacttcttcatccctctcggccaataatctttaaagttcctggatcttctctttattactaattgctttagttactaatactagcataattttattattgccaatagttagtgcttagagctgagtaatgagatcagctgacagcaaaaggagtgtattctagagaatgttcagatatgcaactccctgcctgaacttttttgaacaaagaggttccctgattcctgaacaaaaattgtacgcattgcatgagctcttaatcaagttacaagtcccgtataggatgtaggattaacatttgaagtacccttgttgatcgatctccctagagaaacatccagtcaccatgttattttgggaacgatttagggtttgctttgggaacccttacattgtcacttctagccttctttgagaaggcaaaaggcatcctacagccctcacctaatcttagatgtaataaagggtattcgttgttctcaacagatgccccctattggccttgacggttgacaatgattataat

SEQ ID NO: 27734 - DNA, 3602 bp, Cannabis sativa
gattcaaaattcacatgcaatttttttgggtgtccctgggctcaaggaatttggactttattagattaccctttcctccacgaggcaaaagaagatttatcttttaagcaagtaataatctatgcttctgagatagtggagaaaaattcttttgaaagattgattattatttcatgggcaatatggacggaaagaaataagatgacgcacgatgatctttaaaaacacccgaaacaaataattggttggatcacaagtttctatgactctgttgatttaacgaaggagctaataaagaaaatttgactatgagtgaggtgggggtttctaactactctcctgctcaaagggatccttacacaatcactggttccactttgttcgtggatgcagctgtcttaaaggaatctaagttatttggtgtgggggccattattatgccaacaaatcttacagtaatggctgcgttaagcaaaccattacgagattagtattgtagattaattttagtgtttattattttcatatagtgaacaatagtatctctaaaatgttgaggagtttgacaattcaattacatcgcactaaaaaactacgactaaccaaaggattcaaagtagagtagtatagtttatgttctgtctcattgctcagtttgtacacaaattataattttatcagttacttatcaaagtgttggactttggttagtatggggtgtttaaagttgtttttcttttattgctttactttaattttaatttggtgttagaggagtttcgttcgattatttagtatctttattgcttttctctagttttgtgaataggatgttcaccagactgtaataatggggttttgtttgtctgttgtttggttctttacaggtagtattattgtttttcaagctgaaacttttgccctactgactgggctaaattgggctcattcgtgtgggattcccctagaagcggttaaatctgattctctcttcgtagttatgactatcaataacaggaaggtgttcgcaaatgagatgggtgtgctgttagaggatatcatagctttattgtctaaattttttagggcagttttgtctcatgtgtcctgcaaagataacaatgcggcccatggtttggctaaacatgcccttaggctagacaatgagttatgctagtatgaagaagttccaacaccgattgttgaagtcttcttggaattgtcctaatgtgatcctgatcacgttttttttttaaaaaaaaaacacacacacacaatttccaccttggtcacgcacataacaattattatgagaaaaatttactatgaaacctcacaaatttgacttatgctaattagataagctttcaatccttcaacaagcaaaacattttctaattttagtaatccaacaacattgagggtaccttttccaagaacagtactgatcatactattaccaaaggttacaacaccacatttcaaaaatttgaaactagtgagtaagctagcatcacctgtcatatgttttgaacatccactatcaaaataccacaaattaacagtatgagatttatgacaagctaaagtaaccagacatttaggatcatttttctttatccaaacctttttggaagaacttctttttctcatactagtttgtttgaaataatttgattcaaagaaattattcatggtaaagcacctaggtcgaatgtgacctttcacaccataaaagtgacaaattggtatgaattttggtgtcctaccaaaaaattggaaagtattacttgaggctggagaaactgttctgccaagaaccttttttgtacctgtaaaaattgcaatgtagggtcagaacagataaatgatgaactttaagccttgacaaactgatttttctagaatgattgagattcagcaaaccccaacccatcatgacttctttgtccaaaattttggacctccttaaaattcaagaacctggattgagcatttttaaattcctctttagactctcaaaatcttttaaaagcctagcattttcttatttttcaaaatcaagatcagtttcaaaatttttgcatttggattcaagatctttatttttctcagtcaaacatttgatagtctttgacatcaacttatttttagaataaacctccaacaacttaccatacattaccttgtaggttttagccaaataatctttgttcgatttggattcaccagattcagattctataacatcgtcaaaacctttattatctgaaatagtgttgtttaagcaaacaaggtttctctttttctgtaaaaaataagatatgctagaaagaacagatgttaaagcaactaattcattatcactattttcataattattgtcactccaagaagcattcaatctattttattctttttcaaagtaatagcacattcagattgtatgtaaccaaaatcatcacattctctacattgaacaaatctctaattgttatgcacaaaattttttgaagatgagttactttctaaaaccttagaaaaattctttttgtatcccaaatttttcatgtattggcaaaaatttcttattaatatgaccaattcattatcttcatcatcatcagaactaacattcttcgaacttttgaaagcaattgattttttttttccatttactttattaggtttctccttttgtcagatttgttgattaagctcaaatattcgaagtgatcccatcaactcctcaactttcatcgtgttgtgttaaaatatttagtttagcctcctccatagccaaaagtttcacattaaacctatcaaaaagaactcaaacaattttcctaactaaaatagattcatcaagtttttcacccaaggataaaaattcattagaaatgtcacataatcttttataatattcagagagagtttcagaaccagatattctaagatcatcaaatctactttgtaacataatgagttgagaacgcttgacatctgaagtttcttcaaactgagtttcaagaattagccaagcttctcgagcagattcacatgaagatattaatttaataaaaccttcaccaacactattaaaaatagcatgcaaagctttattattattactagacaatctttcttccttatttgacctctaatttaagttttaccttagtattaccttcatcatcttcttttactggtggtgaccaaccagttaaaatatatttctaggccttttcattttgagatttgatgaaggtcttcatcctaactttccaataagggtagttagaatcatttagtaacggtagaccacctatagatcttccttctataggaaaacatcacacaaaattaaataataatgatggaagagaaataaaagatctcactaagagtttagtgacccgctctgataccaattcaaattctgtattttaatattaccagtttattattaaattgaattcttaattaaatgcataataataaaattggtaccgaaacagtttttctgtagctacaaaagataactctgtaactccaaaataaactagaaaaacaaatagtgcaaaaaagtaaaaacacacaag

SEQ ID NO: 27735 - DNA, 1434 bp, Cannabis sativa
  modified_base (1396)..(1400): a, c, t, g, unknown or other
tgtgacaaaataattaagaaagtataaaattaacgagattattggtaaaaaattattaaactaaaactaattagcgatgaatggaatagattcattaacatatgatattgaataaaattgatttattttatgttataatttatttcaggaactattttaggtgcactcataaatatgatcaaggatgtcaagcaacaaaacaagttcaaaaaatagaagatgaaatgtataggactacatattatggagaacatacttgttcaagtctcaacaacaacaaattattaggttctcaccatgacctaattttggattgtccaagtagcccaagcaacacttctgttcttctcagcttcaacaacaacaattccaaacaacaacaaattactcatccttttttctctaatcatcattcccttaagcaggaagatgatcggtttactattaatgacgataataatactaacaacaaccaaacatcatcttccgattataataataatcatgatgatcatcattttgatcatgatgatttgatgatgagtatgatcaatgacgatcatcatcgatcatcgcctgctttggaatctgatgatgatcatcatcatcacggccatcaccacattaatggtgatgtcatgattggtatggacttatttgatgatgtattgagttcatttcaattttgactgaagatgatgatgatgagatctctctatgatatatttagggtttttgtttttttatttttgatgtagaaattaataacaataataataagtttgttgaaatgtgtatttgtttattatctggttttactatccaaattttgtctatatgtatgtgtacttgttcacaatgtaagtggtttaagttgatgagaaaacacatagtttaattattaaacataatgaagtatatatatagtgcattcaatttcaaattaatcaaaattcaaatacattacaaaaaagaaatacaaatattattattattattattatgagaatactgactagtaatttagcaatattgatgatctgaaaaggtgtggtgaaaaaatgttatttttttattatttaaacaaaaattaaaaataaattgctttaaaaaatttatttaaatatatatctttgaattataatcatatatatatatatatatcaagcatcatttgtgtgttgttagtgaaaagttactctttagttagttctgagtgtgattaagtaaagttttcatcaactggtattctttcttatgtaacaaaattcaattatactaattaaatatattcaattcaaagctcttgtgatttcacaagctcattcattatttcacttttgcaacttatcaaaactttagtgcatgtttgacatcataactaaaaaactgtttnnnnnttttaaaaacagaaaattgtttttaaaaacaatt

SEQ ID NO: 27736 - DNA, 1956 bp, Cannabis sativa
aacataggtacaaaagcagtaacagcatcaggaacaaaaacaggtaaatgaatacagaatatacaacctagcgatagaacaccttcacgtcaaaaatgctcaaaataaatgaagattagcttcaacatcattacagtataaacaatggcaacacaaccactccgtagatgtctagtggacaacacattttctaattatttcatttttaacacattttctaattatttcatttttaacacattatctaattattgttcatacaaatcacctagtttagcctcttcagttcaggtctccaatatttttccgcatggagaatctcagaagaacgaaagttattagtttgatcatcatcagaggcaaaacaaatttttaaaacatctgaaagcaataaaaatatttaagaaaaaaaaaagtaaatgaagactattcaccctagcaacagaaacacattcaggactaaacgcgaaccaaatagatgaagactttcttcaatgtcatttcacaaaaataatggcaacacaaccacttcctagatgtctagtcataaaaacaccaattatctaagtattggtcaacaaatcaacagtttagcctcttcagttcaggtctccaatatttttccacaacggttaattcagaagaacgaaagttattagtttgatcatcctcagaggcaacacaaaaacttatatagcatcagaaagcatcctaaatttattaagacaaactatttactttcagcaaattacagcacttttcagtactaaatgccccatacttcctatatgtccattgataaacaccctaatattctaagcactggtcttgtaatcaacaaatttagcctcttcagttcaggtctccaatatttttccacaagggtttatttcagaagaacgaaagttattagtttgatcatcctcagaggcaaaacaaaaacatttagaacatcctaaagcatcaaaagtttacaaattttcaggaaaatacagcattttccagtactaaatgccccaaaaacaacagtattgcttcgatattcctagctcactcatcctcatcgccaaattaatgttcatttctaatcctagaaaagaatttgaaaattattaaactaagcttagcctcttcagttcaggtctccaatatttttccgcatggaatatctcggaagaacgaaagttattagtttgatcatccccagaggcactaccataaaaacccattttacacttgaatccccaaataaaattcaaatctgactggcactaaaatcgagctcaagaacaactaagtgaagaaacactctgcaataacccaattccaaaaacaatcagaaaaccaaaagaaacaattcaaatctaaagaaaaccaagaatttgcaaacacatccaacattacaatcgttccaaatcactagagcacacaaatcaacagaaaacccctaaaatcaagaaatgaaaaatacaacaattcaaagagagagaaagagctgtataccttgcggaactcaattcgaagagtctgagctgagttgagttgggtagagatgagatctacaatttgaaaatggttgggagcgaagactacttggctttatagtgtttgaacacaaaaccctaacctttacgatggtgcagtaggggttttccgccgactcctctaaattcgattttgggcctaagagtcggcccattagtgtgtgggctgaaattgcataaagggttgagccctattcgaacaaagtaagagatgtttttcataaatgacaacaattataaaaatatggatatataacagttttctcaacaattttatagatttgaacttttttaaaaaaagaaaaatacattgttgtttttgcgttaatatttaaaatgttatttgcacgttatttcatgttgtttttacttagagagtccataaaaatgtaattaaaagaaattagtaaaa

SEQ ID NO: 27737 - DNA, 1986 bp, Cannabis sativa
aaaaaaaggttcaaaattgtataaaataaaattgtaagggggcaaactgcaaatattatattatatggattggaaaaaatgtaattactttggctttgagtgaagaaatatttgagtgaaagaggagaggaagatgatgattattactaaaaacattttcacttttacacaatgaaaatgatgatgatgaaatagaaatccacttagccattgtttgttattatgattaatataaaatgtgattgtatatatacaaaagtacaatatatttttttctttctatatgtggtaaaagtcaatacaaagtaatgaactaggcccatcttaattgagtatcctacaaaataaataaataggtgagtggaaaatttttatagccaccctattccataatttaatggggatgccaaaagtttgaggaaaatacaaaaaggattatttcacaaatagataaaaacaataaaaataccgttttataaaattttaaatatttttataaattttaaaattttatttacagaaaatatagtatttttatattacacttttgttgatttgttattgatttttcgttatatgtgtgttattttttttttgttttaatgttattttcttgttacttttatatattgttcatgttatttttatagaagatcgtataaatgtataaaaaaatctttaaatgtaaaaattttacaaaaaagtaatattttatataattatttcaaaataaaatacataaaattgaacatagtagaataagaaattgaaagattttattaaaattgttcgtttagaaaatccctgaaaacctaatcatatgttcttctctctatcaaaacaataagattgttatccttattactaaactcgttaaagagataaaaaatttaaaagaaaatattttggaagatttaaattactcctcataatgaggagatccaagtttgaattctcctttcctcctccaaagtcaaaaataaaaataatagttacattattttttttttttttttgcaagaatggttacattagtttaactattggattattattgaagagttataattaatttagaaatgaattaaaaataattaataaattactgtaaccacatactaacctcatttcattttattaattaatatattttgttttcataatttattttaaaattaattttaattataattattaattaatttttgtttaataattgggatggggacggaagagcactccctgccaattccccgccccgtatacatccctaactcaatacgatgtgtcacttgtgaataactaacactattctatatttatttatttattaaatcaaatatgtgagacataatattgaattgcaccaataacatcatgccaccacttgccgtgctcatttctcaaatttataagctctagtttgctaggcttaccaaacattataatactgatctaattgaatcaattatgtacttaattttgactttaaaagttataagttcaaaacaaaaaaaaactaacaagtctatgagccataattaaattttaatgggccctaatgggccataaaatctcgggcctgccctgttaaggaggaaattacatagtatacccactttactttatttaatttaatttttacctttatttttatattcttcaagatatatccacttttatagataatgtccctattagatcccttaggttaatgtaaattatatgctagacttaaatagagagtgggggtataatggacaatctactaaaaaaaggggtatattttaataaaatataatataagagtttttgattaatggatacaaaaaaatagtattttttaacttatccccctgttaagttatcttgtaaaagttaaattccacttttacggttttttaggaaaaaattgtaatttacaataattttttaagagattatttcacaaatacatcaaaacaataaaaaaaaattataaaaata

SEQ ID NO: 27738 - DNA, 1720 bp, Cannabis sativa
aattttaatttaaaacaatgaaaattatttaaatttatattattttttttatacataattaaggccttaaaatttatgaatttgagccttaatcaggtgctaactctttagaagttttgatacaatttgcctacaagaaagagacataattccaactcagttgagatagtaacttattttctttccaagcagccagtggtgttaattttatcataagcaacatccacgaatctatcaaaaaaaagtgaggtggtcaaagctgccaaagctggctgacaacaaccttcttgtattttttttttcttgaccatcaagataaaacttacacaattaactaataatctcagctatataaatttagatttttatttattaataatttcaaaatacaagcacaatagtaagctaattgtatcaacgtacaatattttttaaatgctttcgaatgggttttctctcttcatatctgagtctccgattgacacatcaagaatttagaccggtatgttgaaaagatgtacaagtccaaataattcagcaaaagcagcgttgatagtttccaacttccccaccaattcatatctctttcgcttataacatcatgaatctatatatgttgtgaagcttttcaattgtctttacgacgtagttgcatatttgggttgttattgacttgtgagttaattttaaagccaccagctctctgtaggtaaggagttcagcacaatagttgcctctcctcattctctatcttgatcccttatattatctagattaagaattattttgttgaaatcatctaaatgatcattaactgttttgcctagaatcattttaaaagcatacaatttttattttaagagcaactggttagcaagaaattttaccatgtgtaagttctctaacttcagccgaattccagcaactgtaatctccttcgaaacctccctaagcactcgatcccccaagttgagaattatggcattatgtgccttttcgagtatgtctggtttttttttttcttagactgagtagtaggaggctttaattctcccagtaatgcatcgtgcagaccctgctgaactagtagagcacgcatcttgactcgccataacctaaaattattcttccctgtaaactttttaagatcaaacttcgcattctccattttcttggatcaatctctttgaatcttgaaacctcaatctttgattcttggactccaagctctaataccacctgttggagatcaatgcagttaatcctcttcaacttcaaccaggaaactaaagaacgatcacacagaaactaagaacaataacttgagaactaaaggaatcaaaaactgtaatgactatgcctaagttttttgaacttgtaatgtttgtacattatgagcttaagctttaataaatgagagttaaaggtattaataacttgcataccccttaatatacaacactaggacaaacaaaaataactatcactgttagtaacactaattgaattcttaacagcttcatacaagtaactaactcgaccaattacaaaggcacacaaatttaacaagattattactactcgtaatcgtttctttttaaatgattttagtaccgactctcaagtgcttacaactctccttattggaccacgaattctggtgctccaatttgaaacaacaactcttctctgattgtcggactaagaggtacaccttctt

SEQ ID NO: 27739 - DNA, 1906 bp, Cannabis sativa
ctgttaaacatgagaatataagagagagaatcaatacaaatcaaaacgcgtttaattaactaatcattatacaatttttttattttcatacaaaacaaaataataaagagaacctaaaaacaaggaaagccctcaaattggacgaattttgaggtactcatatcgaaaatttcagacactaaacacaaaagaaagaaagaaaaaaaattattatgaagctctggaaaagagctgtgggggttctgaaggacaagaggagcatctacgtggccggcgtgtctcggcggacatcctatcggaacccccacctggaggccataatcattaaggccaccagtcatgatgattcctttgttgactacaagaattttcaaagagtctaccaatgggcaagaacatctcctctttacatgaagcctttaatatggtctctctcgaatcgaatggacaagacaagaacatgggttgttgcactcaagggtttgatgttaatccacggcgtcatatgttgtaaaatccccgctatccagaggatcggacggttaccgttcgatctctctagtttctcagatggacacaccaagcctagtaaggcttggggtttcaacgcttttattcgcgcttattttgcttatttggaccaaaaatgctttttaactttttccgagattaaggaaaataataatgccaaaaaaagtagtttgggggaagagttgcggcggttggtgacgtggcaatctttgatggatctacttttacaagttaggcctcaaggtgagaatatgaggagagttggattggttttcgaggcgatgatttgtgttgttaccgaggttttcgaggtgtatgagaaaatgcgcagattgattagtcaagctgttgctagggcttatgaagatgatcacatttggcctcggcccggggatgttgaggtcaatttggctaatgggattatgaaaaaggcgacggttcagggcgacgagttgtgcttatttttcgagctttgtagggaaatgggtgttttaaacgcgtcgttttccccaaaagttgagcgaattccggccgaggaagactttagagagcttgtaaggattgttgatagggtttctaatattaacacaagagaggatgaaatattgagtttggattatgaagatcatgatgaccatcaagatgggactattgtaaatattgttgatcataattatgatgatgagcaaagttattcttcaaagactataattacagataaatgggagatttttgatgaagaaaattatgatcagaataaaacattaatgttggtaagtactgatcatcatcatcatcatcatgatcttgattcatcaaatcatgatcatcaactgattatgctttctcctcctcctacaataacagctcttccagacttaattactttctagtggttaatttgtaataataattctttaattgttgaatattatattattacgtgaaaagttaattaattatggctcttaaaatttaatttgcagtatttttattctagctatattatatataaagtacttctttagtttgataggagaaaagaaagatttttggaattttgaatatttttgtttctagctatagtttttcaatatttaatgtctgctaatacacaaaattaattattagcatcaattgattattattctccttcttctttttagaaaattagtgacataaataagttagtctcgcagttagtgtttaatactgtttttttttttttttggaaaatggaaatatgtgtaattaaatttaaaatcagttaataattctatttgaaatttacttaggagatgagatattgcttgtttagttggacttggacggctaattgtcctcatagacaacttctcattagtcataattttta

SEQ ID NO: 27740 - DNA, 1608 bp, Cannabis sativa
catgccaaattgtgtaattacctcaattacagtgtaagaaaatttaacaagtgagacctattttattcaattgattgaattatattgctattggaagcacttgaaaaattacaaatagaaacctaacataatacttgtatctttccaactattaacacttccattttttttttccaaccaccaactaattggtatccaaattctatgaggatagtgggaaacccaaccaaattgtaccagttaatggagaacaaaaacccttgggcctccatcattgaggaagaaagcccaattgtaacctattaatttattaggcccaacaaaagtttaagtccatttgtttcattatggattcaaggtgatttgggtatatttgaaacataccatttagtaaaaatatttacactagtactaatttcattataaatttgtttcagtttgattatgttatattattaatatttttcttttgtttttttgaaaaacattcacgaaattttattaattaaattgcctatccataatgtccttctcagaaaaatgattgaagtcctctctaaaacacaatttaactaatgtatgagccataatatttccctcaccaaaaataaaatgacaagaatcaacattatataaattaagaaaatgttgactatcaccaacaataaagcctcatcccttgtttattgcatggattaagacgatcgctctccatgcaatcaatcttcaacccattagcgtaacactatttaagagcctccaaacaagcatataattcagttgaataaagcgaaaatcttcctgccaccacttttgtgaagacctgaaccacacgacccacttcgtctcgaattaccgcccccaaccctagttaggaggcttccatgggtgggacgtagcatgcaatgcgacaagtgataaaccccctcatttcttaccacacaatcattaccactaataaggttatcatttcgatccatatgctcaaagtgagttaactttctagaaaaagtaagacccacacctttgacgactctttggaactaaaaaaaatggtactcgccttttccttaacaaccaagggttgatcaacctgatccccaaacttccctttacctttattgcgcgcatgccaaatcaaccacatcatcataaagcatgccccgggattcgaagagggattgatgcacataatattaacaatcacattctcatgatgatccttactccaatttcccaccttggctcttgagtaagggcattcgaaaagagcatcgaaaattattttcttgttatttttatgtaatttttcgtgttttttttaaatatcgtaaatatatatatatatatataaaaaaataatcgcaaatatgcaaatattttaccaaaaataagagtttacctaatttttcactatgttcataatatttctttctacatattatcctatggactgatctagagtaattagtgaaggagttgtatgaaaataatatttaagaatagcttaaaacatgggccagcagaatgcccatttctgaaaacatgggctagaaaatggcctgcttgttttacttgaatgggcctgttaaaagaggagttggggat

SEQ ID NO: 27741 - DNA, 5616 bp, Cannabis sativa
  modified_base (1995)..(1998): a, c, t, g, unknown or other
tttttattatttttaggtatttttaaaataaattttttaggttgggaataagttaagaaatacctcttttttgtattcattaataaaaaatactcttatattatatttcattaaattgtactcacttttataagtgggttacctaatataccttcattttcgacttaagtctaacacataatttacattaatttaaagggtataatgggaacatcatttataaaaatgggtataacttaaagaatgtaaaagtaaacgtaaaaattaaaattaaaataagtaaattaaagtgggtatacaagataatttcctcaaaatattttgagttttgggtcatgtagttgtgagcattttgtgtgtaaatattgagtttaagcttgattttgagtgagttttcttaaagctttgatttttgaatcatgtggttagttgagcttgattatatgttatttgagcaagtgttgttttaagatattgtgtatacttgcattcattttgctgtggacttagacatcacatgcataataaaagtaaaatttgggttttctaaacccagccgttgcggtcatgctcttggttattgcgacgcccgtaaccccaacaataggagatcgtctgtaacactttgatattttaccttgctttataaaaataccatttaaatacataaattaaaaagattcaaaattacttgaaataaaatagtaattttagaaatcaaaatgcagcatccttcatttataaaacaaaatacaataagtaaatgattttaaataatatattccaccattatgtttactcacaaaacacaaataattatatatttatttcattcaaaataatgagatagagaaattgagttgtagcttcttatttagatgtaattgcatgcatcctctctaagctaattccatccaaattattgtgttatggccgtgagtccctttcaaacaaaatccaagagaaatctattgtgagaaacaataccttatataatatgcattattactaataattcacaaattatttagattaaataaaaaataggcaaaaaaaaaagacaaaataattaattacactaaacttttcaacttgatgaaataaaaaacttaatctcataacttttatttatattttaagtattttgattgtaatatttcttaatctcataacttgatgaaatctattgtgagaaacaataccttatataacaaatgtaataattttttttggaaaaaaaaagaataaaacaaatacataaaaatttattaagagaaattatgagtaaatttaatttaaattatttaattacattttttataattaattcacattataaaattatatataatgctctaactttttattaaaataattatttagatcaattaaaaaaatccttaaaagacaaataatttaaagccatcaattctcttactataatcaattacataaatttactatttacctgaataaatatttatataaatataaatgcaagtaatagatttatagagatttaaaaaatatacattttatttaataaaagttgctaattcttttaaaatattgactaaatgaataaataaacaaaataaaatatgcactattactaataattcacaaattatttagattaaataaaaaatacataaaaaagaaaataattaattacattacaaaataacttgacgaaatgaaaaactcaatctagctatttaatatattgtatgagtttttagcggttaaactcttttaattattgtttcatttatacataatttttaaagctcaaattttggtgataaaactttctaaactactaaattgttaacaaattaaagatgtacgtcatccgattaattaccaccatggactgcttatgtgtacactcttgtacacataacacgtttatatttgtacacataatatttttatttcataattattttaaaattaaataaaattatataaaaaataaaaaaataaaatatnnnnaaaataaaaaaaaatattataatttttaaataataatattagatgttccaatataaacatgccacgtgtacaagagtgcacatataagtagtccatgttggcagttaattgtaaaaaaatatataaatttgctaacaattcagtaatttggataattttaccgctaaaatttaaacttaaaaaattaagtgcaagtgaaataataattgagaggatgtagccgcaaaaaactctatattgtatagatgtagatatatagatgcaaattaacaagaaaattaattaaatacttacgagtaagtttgcaaagatagtacttttctcctcaacaaagtccattttatgttgatcattacataaagccagtctccaatattatccatccttctaaaataagcaagtctccaagaagtattgatccataaatttccacaaacaccacaaaatccaataacaaatccagcaccaattcccttacaaaaccatggcaaatcaaaccatatttctccaacatttttgtcaccgccttcattgtcccgagttgaatatgaaggatctcccgggcatgaacttgacagaggaggtccacagagtccaagattcattgaatacattgaagcattaaaagtttgcaattgagtaccagttggaattcttcctgacaatcgattatttgataaatccatgtaactcaaagaagttacattagccaagcttatgggaattagaccatctaatttattgtgggacaaatcaagtgaatcaagcttagtcaagctcccaatattttcaggaatctttccgaataaattattccttgatagattcagttgaactaattgagtaaggctaatcaattcaatcggaatctctccattcaacttgttacttgaaaagtcaataattcttaataaaccaagaattttgacatattcatgatcaactcctttccatgtgattgatgcaacattttcatacagaaatgacacatggccaaacatatatctcattatgcttgaagatgtaatggtgacttcttgatcatcatttcgaaccatcgcagttatatttttaatgcaagagggaatcgttctagataaatcgttgattgataaatctagtacttgaatttgaacaagatgacaaagattcaatggtatacttgcatgaaatttatttgacttcaaactaaggaaaaccaatttgcttaatctttctccaatccatgatggtatttttccttctaagttattattggccaaatctagaacttgaagtgaagtgcaatttttcaaggaggaaggcaaatttcctgagaagttattatgcctcaattgtagagtttcaatagttttcatattaattgagcttggaatttggccagacaacatattatatcctaaattcaaaacaatcaacttttggaaaccctcaaagcaatcagaaagttttccaaatagattattatgagaaaggtcaataattgttgttgtcttcaacttttcttttccttcacataacaaccattgtgtaaaattgttgttggagagaaacaatattgttgcattaaaagacattgaaagtggtacaaaaccttggaattggttgaagctcaagtcaactacagccctattgttttctcctattggaaaatttggcaaggtgttactaagaaaatttagggacatatttaaataatttaagttggaagttatatttgtgaaccaaaaagggacaagaccaaagatatcactattggaaatatctaaatggtagatatatttttgggtttggagccaagtagggaattttggacctaacttgcaagacctcaattttatggaactaagttgaaacaaggggacccaattggagttgaatttcaatctcaaggctgagttataagataaatctagtgtttccaatttgggatattgtaggttcaattcagagataaccccaacaagagagtttgaagaaatatctaaagtttcaagataatcaagattattgccaataccattacttgaaataccattgaacttattgttagatgcattaaaaagggtcaaatttggcattgaggaaagatcaggcaataatcctatcaacttgttcccatccaatttgaaaacttgaagatttggaaaaatatttttgaagtcatgatcaagaatcaaccctcctccaagttggttaaaactcaagtctagaatttccaatgaattcttggtggaaccagctgttaaattttgtagcacatcatggattgttccaccaagattgttatgagacaaaactaattttttaaggttgggaaggttgcctaaggattttggtactccactttcaacaacttcattagatgacaaatcaacaaattgaagagattttgtttgttgaaaggaatttggaaaagaaccatttatgatgttatttgagagagaaatttgcatgaggtgagtactagaatttaacaaccatgtaattgttaaaggatcatgtattgaatttccatctagagtaagatcttgcaaagattgaaaggaagcatttgtatgagaaaggaagaaattatctaccttgggaaacaagcaatttgaaatggataagcttgataagaaaggcgctcctttgaatgactgaagttgttccacagtgaaattcactcctgacattgttaaagtgttcaaagaagtgagacgcgaaatccattcataattactcatttgagatgagcttgaaagatcaagactttgcaatttggtgagatttccaagttggggaggaataactccactaataggatttccaacaagattgagatatgtaagctctttaaaagaaccaacaaaagatggaatcatagtaatcttattatgtccaaaaataagatgtgtaagatttttcaaagagcgaatagaatttggaattgcagtaatctcgttatctaaaagatttagatatgtaagctctttgaaagaaccaataaacttgggaattcgactaatgttcatcttcccaagcattaagtggttcaaatgttgcaatttcgccaaagaagaatcaatctcaccaccaattacatttaaaccgccataaagatctatggcggtaacatgattggtttgttggtcacaactgatgccgttccaattacaacaattttgatcattggcccatgaggagagataatcaaaattaggatcaagtaaaaataaattaacaagatcatcatctttcacatggtaagtagttttcttaaagctaagtagagcctctctctcttttggtatgcattgtggttgatcactctctaaactcaccacatttgcaggtgtgacaagcactaagagcataaaccacaacaatatcattctcacaaatcactctaatatgttttagatcaataataatgtaatggggaatttgtggtttgtatttataataggcctttctctaccatgaaattaattttcttttatatataataaattgacaagaatgaaaagtcacgatgactttgataaattaagctataattaatgtatgtatatgcatgaacctactcatttttcttttttgaaagagatatatgaactactccaaactacatat

SEQ ID NO: 27742 - DNA, 1506 bp, Cannabis sativa
  modified_base (49)..(71): a, c, t, g, unknown or other
  modified_base (984)..(984): a, c, t, g, unknown or other
acatgtaacatacatgtaaacatgcttcacttctaaattgataactaannnnnnnnnnnnnnnnnnnnnnnagggcataaaacccaacattggaaccctaatgcctagagggaaattagttatctctaaaggccagattatgtctatgccaattagggtgaaaatagagagttgtgtgttgacttagtagagctagaaccaacagagtttgatatcatacttgggatggattttctgtccaagtattcagtcagtattgactgtaagcaaaaaatagtaatttttcaacctgaggacgaagatccatttgtttatgttagatttgttcagggtctcgaatcccgattatttcaattttaagggctaaagatttatgacactgtggatgtgtaggattcttggcggttgtaattaattctagaaaatctgaaacatttggccccgaggaggtcaaagttgtaaaaaaatttcttgatgtttttccttaggagttaccgggatcaccgccatagtgagtgatagattttgtaattgatctggcacctagggacaaaacctgtttcaaaggcaccatatagaatggctccaacagaacttaaggagctaaaaatacaacttcaagggatggtggatttaaggtttacccaacccagtgtgttgccctggtgagctctgattttgtttgtgagaaagaaggatgggcccctctgaatatgcattgattaccgggaatcaaacaagctgacaataaaaaattagtatgcattgcctaagattgatgatttgttcgatcaactccaggggaagactgtattttcaaagattgacttgcaatttgattatcatcaactgagaattcaagaggaagatatttcaaaaaatacatttcggaccaagtatggtcattatgagtttttggtgatgtcattcggattgactaatgctccaaccacctttatagatctcatgaatagagtattcaangatttcctcgataactgcatcatagtgtttatcgacgacatccttgtgtactcacagatagaagaagaacatgagcaacatctccaaatggtattacatcgactcaacaatcacaagctgtatgcaaaatttaaaatgtgtaaatttatgttgtcggaagtgtccttcctagggcatattgccggaaaagatggaattatggttgatttccgaaagatcaatcagtcaaaaattggccaaggccaagaacagtgactgaagtgcaaagttttctcagattggtagggtattattgatgttttgtcgaaggattttctaagatttgaataccactaacggtttaactaagaaaaactaacgggttgtatggtccaaaaaatgtgaaacaagtttccaagaattaaatcaactgttgatcacaacaccagtgttagctttgtcatcagaccaaaaaaagttcatcgtttactatgatggacccagacagggtctgggatgtgttctgatgcaagctgacagagt

SEQ ID NO: 27743 - DNA, 2926 bp, Cannabis sativa
ataagaatcagagagtggaaaattaatccttattagaatcatgatcatgatcatgaggagcaaaagtagttgttgaagtaattttgttgtgttgaagttgaatagaagaaactaccattacatctgataaaattacttctttgtccttcctctcttccataattttatttgttgacttgtaataaacaccatatagaatcagctgtgctactccaaacactacccctaatccattcggtacctgaaattattattgttattaatttcagatgtaaaattacctatatataatatatacttatatattgagttagggtttataaaaatacccttatagtagaaaaagatcttaatgattacattagttgtagtcataacaaaattgagaaatttcaaacaatttataatgtcgaaattaaatttcaaacaatttataaccaaaatgaatatggtaaatcgattatcgttacttaacataagagcacttaaccaacccgacaattatacatatatattatatatataaagaagaggtgattaataagtttgaggaatattacaaggataaaagggtcaaaacgaataagagcataagtagaccaaacgagacaattgaagaatgcagcaagtgagagtgagaatggcataaactccacactttttgttgatatcaccagcttctgtataattaatataataaaataacaaaatctcttgtcattatttaattattataatacatataatcatatatatacatcactataatatatataattcagctattagaaaaaaattacattattatactatgtgaaatttattgtgtgtatacatacatgcaccactagttcttaattacaacaatatgttatagttataattataattataatgtattataacccatgcaaacatttttcaatatttcatgattaattttttttacaaataacactacttgttttaaaagttagttgaaaaatagtactctcagctgattattttgccacaagaaaccaaatttgagttacaagtgatatttttaatacacaaatattaaaacaaaaatttaaaaatataaacaatattaagaaaaaatttaatgattataattaattaccatgacagacaaaggcgaaaagtacatgacgatgctgaaggaaacaccgacgacaccaacaatcaaagatctcttcttgtatgagtgaaatagagttagagataaagtagcgagaagagctatgatgaagagctcgagaaacaacaatagaagaagtttaagtcgttttttcttgtcagaaaagatcaagaagatgataagtaagatagtctcgatcacaactcctaaaaagcttatggtaaataccaaagtgctcccgggatgcacaataggcagcccgtagagagtccataccatgcaactcattagggttgcaaggtatggcaatgccgagtaatcttcaactgctcctttcttccatattctaacaaatgttggcctatataaatatatacatacacacaaattatttataattaattatcatagaaataatgacaaatatagagaagattattttttaataagcaaaattatctatatatatacataaacttacactggtgacaaatagaaaaaaaggcatatgatgtttcctgaaattaataaattaaagttaaattataagtatactaattttgatgttatatatatgttgagaataatcacacatatatctatactcaaagtatatatataaataataattaagtaaaaaaatagatatacctatgataccaactagagttcgaagagcttcagcagaaaccattgtgacttgtactagtaaatatagtaattgatcacaatatgagattattaaaagaagaaaagctatgtatatattatatgaagatataattaatattgctatatatcaattaatttgattgtgtaatatatataggagtagacatatatagatgtgtgtatcaaaattttattactttttacttttggtatataataatataccaaaagcagtataagggattattttgataggtggtaattaatgatggagaataagagcaaaaaagaaatgctaaaaggtattagttgtatttaatattctcttatttaattaactatcaggtctcatataatttaatgtaataatttttagaaagtatttctagccaatttcaaagtgacatgtttaaaggtactatataagtatcacgggtgtctaataacaatgctcaatataaaaataaaggctatgcgctagtgatgatgatgataatgaaagtgatgaatttaattaattaatattaattagtgtgttaattactctaatttcattgctctatttatatactccaataaggtacaacaaaactagtagtggaagtgtggcttgacttcattaattattatttattactaattaaatagctaatatcatatgacatcatccaaatcaaattagtaattatttgtgcatatatgatgcgattagatatgctataaatgtttagtttgctagattgtataagagtcatataagagatctaaattaggacccgaaatggatatagacccacaccctaatgagatccgaatctaggacccaagaccacccgaatttaggacatggacctggacttgggacatgggaccctattgtttgacctggaatccagaactggtctcggactggactcagatccaaacccaggacctgaacccgaactcaggacctgagactcggaccctaaccaaacccaagacccaaacttggactcacaaacccacttgggatccggacccaaacccgtagtcagtgttagctagggtcgagtttattaaaaatatattataaccttacacaatctattaatacaaatcaatatcaaacat

SEQ ID NO: 27744 - DNA, 2785 bp, Cannabis sativa
  modified_base (765)..(767): a, c, t, g, unknown or other
ttttataaaataccgtaaaattattaaaaagaaaactttaaatgtaaaaatgtaaaatttttataaaaatttgtattttatataattatcccttaaatttccctataaaatatttttttccaaaagaaattatatccttgtaaacatctgccaaaaaaaccttaagaatgaaaatcccctttattttagggatgtaccgtttaaaaatgaattagaataacttaaattggacatagtgaaccgttacacatggaggaaaatatcaatattttacaacatgcacggttatattcaaaaaagatagtggcggcaaaactacctctaaatgattggggatacttaattacataaattaattttttggtggtaaaactcattaaacctcacttatgttagctatttactcattccgttcaaaatactattttaagtgccaaggtggaatgtcttagtgtacacaagtgaacacatgtcaaaattttagtggtccacgtaattttaattatttaaatataataaaaataatttaaaaactataaaataattaaaaaaaataaatcaatttatttttttctcaaaaaattttttttttttctttttcttcttcttttcgcctggaaccatcaagatcgagttccttcttcttcttcccctgcgattggaaccagagtcgttcctccctcccgatgaacccagcaaccctagtaaacatcaagtccgactggtctctatctctcttcaaattgctctctctctctctctctnnntctctctctctctctctcttcacatttagcttagctcaacaccagaggattgcctctagacactattggttgaatggtagtctccaccatgctcagggactctcgaaatcccaaaccccaacatctatgtccctaccgtggttgttgcctctcgatttcactctcgctaaacctaaagttttccagcttcgatttggcccagtccgattgttaaatatgaaagtgaagaggataaagtcgaggaaactcttagtgtatctattttgatgtgtttagatgaagtgtgttaggggaagcattggttgccctgtataactgattgggtagaattcattatatcctggaatctgaggatcaataccacatctcacacgaaagccgttgcctatttcgtatatgagtcctttcaccagtaattatctacccagtgtatttctttccatgttaaagatagggaatgtccaaggtgtgcttccaaaaatgaattttttttttagaagtatttatgtttcagtagtctgctctatagggagtttggcatctcgaaaattctccaggcttgtttaactagcatcgcttgattgaaatcaacaaaagaccgaaagcccatacctccttcaaacttttacttacataataatttctatccttttcaatatatttttgacccatccttgtatgatccccactagaaattagccatcgtgaattcaagttgattgtaaaaaccaatcgacaatcgaaaataattcatagcatatgttggaatagattggaccatagcttttaagaacacttccttacctccaatagagaaaagtttctcattccatgcatgcaatagtttccaaatcctttccttaacattgttgaataatttctctttgtcttagctcgaataagatggcgggccaagataagactcatggcacggacaaatcacatccccaaagtttggctggtaaaagtcttcccatcatctggcggttcgaaagacatgattgacttttgagtgttaaggaattgcctagaagctttatggtaaacgcctaagactcttttgatagccaaagctgaattatttgttgcttgatagaataataggctaccatctgcaaacagtaagtgtgaaactgaaggggcatgtctcatgagtttaaaacctcttagattacccatatcttattcatggttgagtagtcttgatagtccttcagagcatatcaagaaaaggtatggtgatagaaggtctccttgttgtaagcctctctgggagaacatcatctacaacctctccattaagtaggaaagagaaactaatggatgttaagcaccgtataatcatagagttccattgttgatcaaagccaattttttccatgaaagccgataagtaatcacattcaactctgtcaaaggctttactcatatccagtttaagtgctaagaagcccttggcaccttgtgtcttatgcttgaggtgatgaacaagttcaaaggcgaccaaaatattatctgtgatgagacgatttgatagaaaagcactttgtgattctaaaatgatttaaggaagcacatccttgaatcttaaactaacacttttgatatcaacttgtaaatgacattacaaatgctgattggtttaaagtctcccatggccaatggtttcctaatttttggaataagagtaatgattgatttattttaagtactcgtaaccaaactttcattaagaacacctagaactacactagtgacattcgagctgacgtgttcctaattatgctgataaaatattgctgacatcccatcactacccagacttttatctggactcatagagttgtgtgtgcttaacacttcaatttcagtgtattgcttaagcaaagatatattcatctctgttgtgactgtaactgggattgaattagtaaccaaattcaaagcttgtgtatcagtacttgtagcagagaataaattgctaaaataagagcaaataactgttgaaaattatttta

SEQ ID NO: 27745 - DNA, 1545 bp, Cannabis sativa
tgagttgtgaaaggaatatttttgaatttaataaaaagtgacatatctaactaattttaatatatttaagtttagtatactaattttaaccaaatgaatgaatattaattcaaatttcactattagaaattatatatattttgacgaaaaaaaatattatttgagtgtaatatatgaagtatatatatttaatactttttttctttacacatagtatatgtacaatatacttgcacgttagtggaaaatcttgaaattttcgagttctcgtcaaaactaattaagactgttatatacatatggtttaccttacgtaaaaattattattgttaatgtgtgaaaattttgaatgagctactcctttcactcaccttactaaattttaacaaaaatataagagttttattggttccatataaatttcgtatatttttttttgcaactgaattagttttctgttgaattaaatagaccaagcttcgaggaaagaacaatataccgattgtttagaagtaataattaattaaatatagggtatctctcccctcaaaaatcccaattccagccaattatgaatagtatatactcctattatatatatggtctcaattattttttgtctatgtttatatatttcgatatcgctttgttatttaactttctagtctactaattaatcaaacgtatagggataaggttgaaattaataatatgtgaatcatcaaataataagctatgcgaaatgtgttggaccatcgaccaagacgtaggaagagaccaagacttaatttaattaattaatttacttgtttatgcaaatgatcaaaatcagacttgaataatcaaaatctctctagaagaaagaaaagcattttccaatatttttcaaagctttttaattatgatgagtttgcgtccatatgcactcctacttgagttgagctgatcttaatatataagtttgcaatttgcatgaataataaaagtttttggtttctttcattattgacgttgatgaagagaataattagatatataataggtcagaatagttttcaaagtagggagtaagagcatcattgtagactataagtaattcaaaggtaactttaaggcagctacgtacctcctttgcacatatcgtccacttaatgttcactattttccaaattgtccccactactattagtctcctttagatcacatctccaacttgtaccattttactggatttttttcatcaattaattaggtgcaaaatatattgtgtaacaattctaataatttatactaaatattacattaaataaatatattttatttaaaattattaaaagttagtctcatgtagaaataaattgtgatatataagatgaatgagctacttctctcattgccaattagttttgaaatggaacttcattcattttattctcacattttaacaaaaatatctcacgcaatattattttaggacatattttcggtagaaagtgttttaggaagcgccaatattcagtcctacaacttttttttttttttttt

SEQ ID NO: 27746 - DNA, 3359 bp, Cannabis sativa
  modified_base (3319)..(3325): a, c, t, g, unknown or other
aaaatattttgtcaactaacttgccaaaaaaagactttacataaataaaattcgtgggtcgacagactcaataagaaaaacataaacataaacataaacataaaacttgattgtgaccaggcgctcatacacttaatcacgaccatatcctacgtccaatgcgtactagctttggaaagttcgtatgacaaagcctagcatacgtatgttaatatctcagtgcaactctatgtacactttagcaatatcctgatatgttaatatgatagctattgatatgccaaacatatatctattggtatctcggcgcaactctctgtacacctcactaataccttgatatgttattttaacgaaaactgacatgcacactaaacatgtatacatatatgcaactattatatcaatcttatcttaattctaaattaatgagtgctggtcaacctaagtggaaactgttgcttgacgatttaaggcccttagtcataatttacgtaaactggtaagtgacctgctaaattacttttgaagcacttaaactcaaaatttaaattttttctataaataaatagtgtggtaataccctaaatcttgataaaatgacaaaaacaagacttcggaaaaaatactttaaaaaatgacaaatcgtttttcttggtctctccttactaaaaagggtagactgtttctagtaaaacagcctgccgttttctactgcacattttctaaaaatctcattcacaactcaaaactatcccaaattacatacaaagctccaaaacagctaattgagacataaggaacatattccaacagaaaatagcatcatcaacccactgaatacaaatctaccattaaaggaccaagattgagcttgaaagctcaaatcatggtcaatcataactacaaccatcaaaattaacatataacaactcaaacaacataaaatcaattccagaaaacaatctcaactcatcccgattattatagaaacaaaaaacctagcaattgcatgaaacctaaatttttactagaaaaacaaagagaatttcagagagaggctttccttaacattggttagcaaaaacctttgaattttatgctagggacccttgaattcaggtctaaaattgtgaaaacaaactgatttaggttgggattttttttttctttgattttattttagtaaggataaaaatgactaattgcatccttatatcaacttatcatcctccactaacacaaaaaaattacttttctaaaaatttcaaaattccactaaaaataaaaagggtaaattttttatttacccttacttcattaagaagtaacctaactaattaggggtaaaatatttcaaaactataaccctaaataatctcaacattttaaaaggtctagttattttgtgctactaaatctaagatactcacccgtatctatgtgactcaaattgactgaatcattacattccattattacttggtataaaatataaaaaacctaaaatttcatatgtaacatacataataaacttagaattcaaatatatttccaaaattaaaaaataataatctaaagcatatttttgacaataagtcctaattatttactaagaggaatataatgataagtaaattaaatatacccataaagagctaccaattctcataaataaatcaagtggtcattataattatcctcccgttaaaaaaattttgtcctcaaaatctaacctgaataactttggatattgtatcctcatatcggtttctaattcccagatggcttcctccaccttactatttccccagagtacttttaccaataatacagtttttttttttgaagaactttatctttcttatcaaggatctgcattggttgctcctcataagataggttcggttggagctctagagcttcatatttcaagatatgtgttaggtctgaaatgtattttcttaacatagagacatgaaatatattttgtattcttgacaatgttggaggcaaggctagacgttaagctaccaatccaaccttctcgagaatctaaaaaggtccagtaagtctagggcacaactttcccctttttctgaaacattttacccctttcattggggatacatgtaggaagacatgatatcctacctaaaattctatgtatctacgatttggatcttcataacttttttacctgctttgagaagtaagtattctggccttgatcttttctatcgcctcatttgttcgttgaactgattccagatctaggtattttctcttttcggtctcatcccaatgaattagagatttagatttcctgtcatacaacatctcatagcgagtcatccctatcatactttgataactattgttgtatgagaactttattagtggcagatacttactccaagagccttcaaaatccatcacataggctcacaatatatcctccaatatctgaattatactttcagattggccatatgtctgagggtgaaaagcggtactgaactttagcttcatacccatgactcgttggaggctttcccaacacttagaggtgaactttggatccctatttgaaataatggactttgaagccatgaagtcatactatttcttttacatacaacttggcaaattgatctgctgaatatgttgttttcactggtaggaagtgcattgacttggtaaaacgatctattactacccatatggaatcaaacatacccatgattctaggtaatccaaccatgaaatccatggtgaaaacctcccattttcactcaagaagtgtcaaaggttgcaacaatcccacaggtctttgatgttcacccttaatctcctaacaagtcaaaaatctagatacatattctaccaaatccttcttcataccacaccactagttatacaatttcaaatcttggtacatgttggtggtaccgggatgtaattagtggggagtggtatgggcttaatcaaaaatctcctttctaagttcaacattacttgaaacaaaaactcaagttttttgaagtcacatcccattgtctgtcactgagaaatccttagcttggccagctaagacctcttatcgagttttgaccaattttggatccaccagatgatcacttctaattctttctaacaagtctagtttcggtgtcacattattaagtttgccaactacaaactcaatacctactttgaccatgtcgaccaccagccgaggagaaatcaaacttgtgctaaaaatctattcttgagctttcatgcttaaggcatctgctgttggatatattttaccagnnnnnnnatttactaacaagtatgtttcaataacatcctaa

SEQ ID NO: 27747 - DNA, 995 bp, Cannabis sativa
aattaacttattttggtgtaattaatcctaaaaaaactcttatataaagggtgatatctccccaaaaccgtcaaaagaaactgggaaactgggaagagctgcaactgttacaccccattactatataacattaaccgcctcgttctacacattttcatttccaactttccaaaccatctcttcaaccaaacaaaataaaaaaaatgacacaccatgattataaacttttgcagaagatttttcgagaattagaatcccaactcagccaactacttgatgtttcatcacaacatcacgatcttcatcatcgtaatcgctccgtcgacgttgtcaatttcgaacagagattggctttctttaaaacccttttacaagccgaaatgacgtatcatcacgaacccacagacgagccagaccacttgatccacatgtgtaacaaacttaaacaacttgaagccacttatcgagactccaccaacgacgatcgagaggtccaaaacgacgacgaattaaacttacaaagtaaaaatcaagtaactacttcttcattttatacttctactacgttcgatccggaattattatcagttgaggataataatgataataataagttaatgatggtgaaatttgatggagggagtttggtggatcatcacgaaaagaggtcggtggaagtggaacatctgattggggagagcgaaaacgaaggtgatgatgatgatgacagatttgatgtgatggaaatggaaagaagaagaagaagaaggaatagtattggtggggtgtcaggggccttggcatgtggaatggttcttggaatggcgttaatgggttttgctatgttagcgttttctggttgcccctttcattttcagtatggtcacactcaccactatgcaaattttatcactcctacttaggactattgttttttcatatgcttgtcgtttttcttttgtaatttttaatcttatttagaaaaaaaaaaaaaa

SEQ ID NO: 27748 - DNA, 6482 bp, Cannabis sativa
  modified_base (4538)..(4547): a, c, t, g, unknown or other
  modified_base (4738)..(4744): a, c, t, g, unknown or other
agatttaaaatagaagacgatttgaaaaatatcaatagaaaaagataaaagatcgcagaaaaatatcaatgtgaaaaatcggaatccttactagaagaaaaagatattacgtacgagtggaaaaatgggggcattggagcacatgggctgcgacccaacaaatgggcaccggggcctgcccatttaaaagccaacatcccaccagccacacgggccgcgacccagcgaagtgtcgtcgcggcctgcccctctaatgcagcacaatgttatcttttctctcacgtgggcctagggttcactacttcaatgctgaataggattttcagcatgtgcattttctatctttttagtccctcaatgcctatataaggagtaaatttcaattgattttgtcaagcaattcggaaggagatgaacagtataatatagagcacgaatttcagagaccgaagtcaatactggaggcattctttagagagtttttaacattattttcttctcttttcttaagttaataagtgtgattttgcttccatgaatatgcgtagttaaacacttgattaggattttagatggatattgtttgacattactttatggttttaatatgattaatttattttcctccagtttctatgtattctatttcattcgtacttaattacttttaattttctggccatcaattaattgttttatgatttcgatgcgagatttgagaagtgagtttcgattatgctatagtaaaaaagaattgaatttcgatataggacgggagtacatgtatggtttaaatagcttataggatttctgtgtttaatgtctgttacatgtttgatttatcacgatagaaaatttgcatgtaattgagatttatatatttgagaagacaataaattaccttagtaaacatgatatttcatagaaattgataagaggaagataatcatattaagccatattcaatagatacaattgaaatcgaaactctaatttttattaactgttaatttccttacttatttatttgcttaatgatctcttaattttatttaaccatatagaagtaagaatttaattttaaagtacttaactataattcctgtgggatcgacctcactctttgttagtctgttacttgttacatatacttgcgtgttgaaaataccacaacagttacaaaaaaatatgatagggatatatgtgggattatctcatggcttagtcattgacaactatactttccttatatttgaccaagaaactgttatatcattattaggtttattcacaattaatattgcatttactcattaattaactcataaaataattaacatattcaaagaatatttagtctccggctgaccaccaccaatcacaaccacctccgacaccacccaaacatcatataaaatacaaaatgaatatatatatatatatatagtacatataatataaactcttaataaacacactaattaagtttcacacaacaacaactatatactccttcattacaacattttgtggctttgaatttttttcttttcttttctagaattattagaatatttggcttcaatctatataataattatataatttaaaaattataataaccaaaatattactcttgttgttcataaacgttacaatatatatagtagctatagatataacctagcaaatacatataaatataatatatatgaaatgaaatgaaaacggtaaaatggactatatttccttttgaaaacaatgcattaactccaaataaccctacataaaaagagaaccaatgtcacattaatcttcacacacacacacaaaaattaagaattttctctctcactctctcttactagctcatattcatggagaaattaattgctggttcttctgaggatataattatgaaggccatcatgcctcctcctcctcctccttctactcaagatctgaagctctccgtcgaaaaatggttttcatcgggaattggtggcagtgctggtactggtgttgatactagtagtagtactagttcaaataatactagtactactactagagaactcagtctcttcaattcttttctttctgaccaacgagcagaagaaaagaatgaagaaataataattgttgggaggatgtttccatgcaagtattgcaatagacaattcgatacctctcaaggcctaggtggtcaccaaaactgtcacaaaagagagcgtatcatggagaaacaacatcaatacatgatcgatactcataaaggacctcgtcgtggtgggcctcgtgggcgatatggccgctacgcaccatattattatccaaccaactctattcctggctcttgtggtcattgcaagcatagatctatggccaataatatccttaatgatccctatcaatggccacctcctcgtgtttacaaaaaccggtcattttgtgtatgttctggtagaggctgcggtgaaactggtgacggcggctcggggtccaagaaaccctccaaggagactatggagactaatgatgataataccaatggttccagtgataattcttcaggagggattgatttgactcttaaactttaattattatattagttttattgttgttgtttggttttaattatttgtctagacacatatgaaacataatattgatttagatacattaatcaataatcctcaaacatataaagatgtttgttggttgaattagattaatgttcaagagcttattatgttttgtttacttctgttgttttttaatttgggttttttaattataaactttgtttgtactttgaaatgttaatgcaattggtgcattttattttccaatattatcattctagttttcattaattagacaaaagttttcaattagtcatcacaaacaaatattgggtaaatttactcttagatatacaactagacaagtttgtctttataaatattgatacatttaaaattatttagttaattaattaattaagaaatatatagattcgtatttggttaaaactttttccaaattcaattatactttacttctataaattttttttcttgtgtgaggtgctattgcttagcactttttagttcaagcatatttatctaacataaatgtaaatatatgataataaaaattaaatattaaaactcatttgaagatgaactagataatctctacttatattatacataattatgtttataattatagttaattagtacatatacattaatttgttgtatttattaactgcaaggaacattaaaactaaacacgcgcaaaaaatgcacgtgtctttgtttagaatttaaaaattaaaaaccgttaatttaatctatttaaatggaagtcttgtgatcaaattacggcgcaaaaaaaattaatcactacgaatgatatgaatttgtttcctttaacacgatctacattaattttaatatctcgatcacttagatatgtcatgactctctaacttgtttttaaaaatctaataagatttcgtttaaaagtggaaactgatgaaccgttaaagtctggtgatcaaactacaaattatgattcaaatgaattaatcactaaaaatgatataataacctactttggacttatttatttattatacattacgaacgatctacattaattttaatatctcgatctcatatcaaacctaattagtttcccgaaatctaacaagataaggtaacggaaattgctttttgtttctacataaattttaataattgtttaaacatacaagtgtgtgggtgtttgattcagagaataataaaaataaagttacaaaacacataaaattttgtgaacaacaaaaaactttttgccacagtttttgtattttaaatcactttattcaactatttattttcaactttcaaaatatgtctttcttttaatatattattaatttttaattaaatcttttttttaaaaaaaaaaataatgtaaaacctgtttttaaccaaacatttttatgaaaattactaaaaaaaatcttgtgttataattttgttaaaatattatttaaataatataaatttggatactaatgttatacaatagtactaaaaaataaataaaaatttatactatacttatgaaatttcagacccttctaagttgaaacctatacttatgctgaaaggttgggaatatcacataagttttaaagataatttttttttactatctagtgtattatgttgaatataactatactatgttttataagctaaaaaagttagaacaaaaaacaaattaagagataaattagtggtatgtgaaaaaagtaaatatatatatataaaagaaaataaagagaaggaagtaagaagtacaaataaaataatgtgtctatacacaaatttatccttccaaaaaagtgtaaagaaagttaagaagtgtcgagaatcatggggttccatctcaaaatcaattagcaatgagtggagtagctcatgttcttttatatggctcaattctctaccatnnnnnnnnnntgggacaatgtccacaacattcctcctcaagatgatggctatttttttgctcatcaatcttgaaccgtatcagagtggacatggggtatggctctgatacaatgttgagaatcatgagattccatctcaaaaccaattgacaatgagtggagtagcccatgttcttttatatggctcaattctctaccatnnnnnnnatgtgggacaatgtccacaacaagaagaaacaaatatgattacaagagtattctcattaattaattgtaatttttatcttttccttttcaccaaacaaaaaatgcatttttttttcttcttatgttctttcttaatttctactatattaatttatgcttctcttttaatttctttcctcaaatgctaaatatatgggattagtattaagaattggggtttctaaagcatgtctccaataaaggaaaataaaaaggtagatacatgtgagagctaatttgaaattaaaataattaatttatggatatgaataagaaaaataataaagggaaagagaaaaacacagaataggtaggtatgatgtgatttttttttttttttgatttttttgttattattgttgtgataagattaacataataataccatatttcttctcataaaagagcccgagttagaatttcaccaaccctagtatgtaaaaattaactaaaaaataaatagattttaacctcaataaattaagtgtttatctccatattattttatgaatgaatttaattttaacactctaaattttgaaacaaatcacaactaaacatagcatttaatatggtgtctatctctaaatattttttattgtctgttagggtttctcttcctaaatccttagccacttgttgtcgttttttctttggctaggctcgttggccctccttgggcttagacgtggcttggtcagggtctgtgatttttctactacaattaatcttgtctctgtgatatagttttgaggtttgtttagtttactgttagtcttatctctgtgacatggtttggttttattttatttcgttgttggtttatctttttgttcttctattatgtctcgccatcaaatttttattagcggttgggaataacaagttctctaaagttgaagagaattgttagtggtgcaactacatatcttgccaatagttgaatgctcaagctaaagggttgaatgaactttttatagcaaatctattgttttgagtggttgagaaaataaatataagtatttttaaggttaactgtgatgttacaatctttttcgtctgacttaattttgtaaagcgcgatccaggaattaggtggccggttagttggcttatttttctgattttaatcctagttgtgttttcaatgggggagatgtcccgataggattgcagattgctattaataaaattgcatgatttcttcagacaaaaataacaattaatttatttgcgtgctattgtaaaagaagaattttatgtttaatgaaagttaatttttattaaaaaaaaaagcaattaatcgaattcataatggggctatagtagggtttcctttcttccttgttgcaacctcggaggttaggtttcttcttggccagggttgtaccatatcgtgattggggctatgctaaactgtggctctagttgagaggattggcttgtagttccaatctcgtcacatgtgtagttgttatctgggttggcgtcccgttctgacagcaacttaagtcctctgatagcttcctttcatggtttctagaggaatgctcctttgcataaggttcgttgcacgaggttaacaaaggaaggcttcgacgaatcagtatgcattggtgtgggaggctttgcctgcgggtgggggcattggcatgggttttggggactctttgatttttttctttgtttttagttttat

SEQ ID NO: 27749 - DNA, 2629 bp, Cannabis sativa
ccatatatcctagtattggcaattgaggtgggtcactaacattacccagaaagaaacgctaaaaccagaacatcctaattcttctttaactaaattgctaacacaattcttaaattccaggtaatgaacataatactatcataacaaagatgtcacagtgagttttaatctaaacaaaaaagacttttgtacttatgataaactgaaacaacaaccaagaaattaagaaaaccattcgtagtagagattacctgataataatacttgactcctttcttcaaattcttcataaccccgtcatggataaacccaggatctctccatcccacgctggcatttgcaggggagtcacacatgtcctccctctcataccttcccacacgtgccaccgccacgtcaccaagctcaccttctctctccccatacctgactctcctctcgtccccgtcttccgtcacgaacatgacccgcatttcttcctcccggtcagtatacgccaaatggatctgctccggcccacgaccctgctgaaacccgagctcctgtgagctcgccaacaggtgtttcgtccccggaagaggattctggtcatggtcccgcttcttggggttgatctctgactcggtccatcgaaatatccggaacgagtagttggatcggagattgaccaaagggatcgagacgctacctgacccggattgccacgacggagatttggacagaaaaacgtatccgacgaaattgcggtgttcggagcttggtggcgagtagattccgagccaatcgagcttggaggggttgtcgaccccggaccattggattagaacggagtccccggatttggaaagggtggtcgtgttgagagagatcgagacctgttgggttatggagaagaatagggtagagagaaggaagaaaaagacgatgggtttgagagaaagtgtcatggtgttatggaaaatggagaagaagagcatggaacttctcttgcacctgcggtgtagacatgcaaaattttgtccgaagttagctcgaaattggagtcaatttgttctaatatactcaactatttttttttctttcaatcattttttatatgatgacgatagttcatcctacttttccttctaagcaatctatataaaattaaaagaaaatatataatagtaattagcaaagtaaacttgttttcacaatatttataccgacgaaatatatctagttttcacaacatattaattttggtaagggttacaaaggctaatctaaattcttctaaacttatagtgaagtcatataataatcgagctattgggaacactcaaaaaaattgaaacggacgtgggtcgtattggtggtataaggtatggaccaaggccaattgatttagacatattgttctatgaaaagtttaggttcaattctgatattcttaccatcacacatgaaagaatttgggaaaggccatttgtaatagccccagtgttcgatttgttcgaattagctgttgagaacgatacagttgtttgctgacacttcatgctaatgatctttttgaaacttggtggtaattctctaattgggaaagaatgtatgaagagggttttgcccattaataatattttgtgggactgttcacagaaaacctcaatcataggtatccttaatctaatgccagatagttttagtgatggtggaaagtttcaatctattggggatgcaatctctaagtccgcttgatgattaccgaagatgcagatatgattgacatcaatctacccacccaatgactactctgatatgacctgaagaagaaacgtccagattaatccctgttttagagccattcttcaaatgcctaaaatagaaggaaaacttgtctctggatactttctactcagaagttgctttagaagcagttggcaaaggagctcatattgtcaaggatgtatcttttgggctagactccaacatgtttaaggttgttgcagatcttaaggtaccttatattgcaatgcacatgagtggggacccatcaactatggtagtgaaaacttgcaatatgataatgtttataaccaggttgcatctgaactgtacttaaggctaagaaatgctgaagtatctggtataccaacttagaggataatcattgaccctggcattagattcttaaagaatactgaacaaaatttggatattcttatagaactgggaaacatccgaacagaaattgcaaagaaaagcttagccttagtttcgtgaccttctaggaagaagcttttaaggcgaaatatattctcgctctgctgcagttgactgagaacctgcaaacattgtgagagtacataacgtgaaagataacttagatgctgtgaagttatgtgatgcaattttcagaaggaaaaattggttgtgtaagattaggagaagaaagtgcaatttttttctaatgcaaaaaacatgcgtcttattctccacatatttccatatcagatttttggagaggattttgcagtgctgaattataacagggacgtcctattactggactgagacttttttgtcaaagttggcatttgacgatcaaagtgtatttttttgtgtagggctaaacatttttatcggg

SEQ ID NO: 27750 - DNA, 2550 bp, Cannabis sativa
agcataacatcgtccaatctaggactgaccgattgtccatagttaaaagggccaaaataattgaaggcatttgtaacccagggaacaatgcgcccatcatggatcttcctatccttatccaacaacttatgtcgtgcctaggcaaggaattggcaccatttagtgctaacttgctggaggacatggcagtcagtatgattgaattaaccactaaaacgtgagcaataggcagcaacactgatcccatattattggctaactccgcgaggcaacaaaaagctagggtattttgatctctcacttaacttctctttgtcacttgccataagttatcactccttttctgactcttctcttcttatttcagatggcggttcttgcagagcatacatgtaaagaagtgagctatatgacagttcagcttgatctttccttggccattcaatgggcactggaggcccaaatcgagtatatcaagaaaaaggccatggaaaagattgacaagaacatccaagaggttaaaaagtattgcactgaagtggatgccaaggccgacaagaagtatttgcaaaattttaatgattacgagaaggatttcgagaaccaaatagaggataaatttaaggcccaacatgctaagttagaatctgccaattctactatggcccaagagctcaaggaggccaaaggagccaaggagacccttgagaaccagatgtttgtcaaacttcaagaactttaggacaaaaataatatcataaagggtctgtaagctaaagttgactcagctaaggcacttttttggcttcttaaggaccaggttaccgccttgactgcaggcatcagggagaaggacatgctcattgagacaaggaccaagaccatataggatttgcaagacataaagtctcaatttcaacaaggctaggtccaggccttgaaggaaattgtcgccttgtgcaaggaactcatggacaagaaggaggagcgcgagaaagatcaagagtctcatcatcgagccttagtccccttggtagacctagcccatgtcctcgtgttgacgtgcttattggagagtgttcccaacatcttcagctaccttggtgaagatgcagaggaattttctaatatggtctcgatatacaagatagacatcaacaagtacctcaatccttatgacggggccaaggatgaggcttcagaagatggtgaggctaaaaatgaaactaaggatgttgaggacgataaagctggaggggatcaatctgcagaggtcatggaagtttcctccaaggaaggtgaccatttgcagaaggacaaccctgaaggaaaaatccaaaatcaaaaccttatgtccaatgtccctccctagcagtgatcaggccttactcttattcctttatttttaacttactatcctttgcaagacatactttttaatatttgcaaaagtattttttccatgcttggtctgcatggctatttgtaatattgtaaaagactatctttcctagttttaaggcacgggcctttatctttcgtggagtcattttattatgcatggtatgcggggcgttataatagatataggatttttagttttatttgtttccctttaagcttttattctctttcatttgcatgctagaccattttaaggcctattatcttaggttgtttagagatttttggttccaatggcccaaacttcaaaccttagacttttcttaacttttaatccctctgatgatttaggaagtatttgggggccaaacacttgtttcctattttcaggttggattattcttgctatgtccctttatgcagctgcacttttaagttagctaaacaccctgacagtgcaaataagctattaactcactcccaaaccgttgagtggtcgcagagcttagcatcttttaagtgccttgagtatttaactgcttaaacaaaatgttgcatgaaggatgttggtcggggatggttttctcgtggaagggcaagtttttgcattccaagcgtttcctaactactgctctttataaagttgggctttgggagaggtggctgagaaagttatagatttcaggcattgccccttgtttaaggactaggctaaagtcgtggtaacactcaggggaattttcctagcctagactttgtcaaagagaggcctttgccactatggccatgcataaactaggggcaggctacacacactatggaatttaggcactatcctttgaccaagataggcctaaaaacgcataggagttcaggcgaggcttctccgtccactccttgcaaaaaatccaacaaattaaaatttaggcaacacactaaaatttttgagatggaattcgggcgagtttttcctcttgggatatttggctgaaaacacatctcatttcaggacttacactaattgtaatcttaagaaggaatacaggtgagtctttcccttaggaaatttggctgaaagcacatctcctttttgggttaaatgcaagttacactaaaaagttagacatgtataaataaagtaaataa

SEQ ID NO: 27751 - DNA, 2572 bp, Cannabis sativa
  modified_base (2193)..(2195): a, c, t, g, unknown or other
atatataggtgtttctgcatgcaaccacgtccaaaaaacaagcaatgcaactcaagatgaggaacatagagtggtggatgaggaagaggcatttgcctccgggcttcaggcaacgtgttcggaactatgagcgccagcgttgggccgccatgcgcggcgttgatgaatgtgagatgattaggaaccttcctgagggtcttaggagagacatcaagtatcatctctgcttagatttagttagacaggtaaccaataactataggcccctcaagtttttggaaaataccattatatataaatattataaaaatatcaaaagcctacaatactgattgtcagacggcccagtattataaaattgtcatgatcgtcatgttgttgtttacttatgtcaggacttgattttatgtgtaattaattgataatatatgtaggccaagatttgaatacacataattactaattaaatacaaataaattctaactttgtttcattatttttaggtacctctgttccaacacatggatgatctggtccttgagaatatatgcgaccgtgtcaaatccctcattttcaccaagggagaaacggtgagtacttttacttaattccaattaattaagcttgaaaatacatagtgcttaccctatattttaacacatctttggttttttctctacaaaatcctttacttatatcatagatcctggcgattaagaaattgtgagactagatagaagagttttcacatgttagaaatataatattgttacagaattgaatactattagtgttagatgactagttcgagattgatacttcccccaattcttagtagattagttcatcattttcatatgatgtcactttttaagttaactaatgggacttagagaaaggacagggatttgattccactcagcaccacctttttgacccttggcatttactaacaatttttcacactctggtgcatttcactcggtttaactatttctgttccccaaattgttgtagatagaattagaacggaaaaaaaaaattaagaataatgtcttttctatactttggatgtagatacatgtactgttgagaatcataaggttccatttcaaaaccaattgacaatgagtggagtagttcatgttcttatatatgtctcaattctccaccatttattccatgtagtacaatgtccatagtagaaacaaaaaacgaatggttaattcagctcattctttagctatttctcagagtctaaacattgaaatatcatgagaactacttccaaaattctaatattgcttccgtattagcaaataatcatataattgttttataaacatgcggaatatcacttaaaaaatgagcttattgaatgtgtggaaataaaagtgacttgtgatcaaagagagtatcaattaattttgagttactgcagataacaagagaaggcgacccagttcagagaatgctgtttgtagtaagagggcatctccaaagcacccaagtgctccgagacggtctcaaaagtttctgcatgttgggccccggaaacttcagtggcgacgagctcctctcatggtgtctccgccgacctttcatcgaaagactcccaccatcctcctccacactcataactctagaaaccacagaggcctttggcctggaagccgaggacgtcaagtacgtcacccaacacttccgctacacattcgtgaacgagaaagttaagcgcagcgcgaggtactactctcctgggtggcggacatgggcggcggtggccattcagttggcttggagaaggtacaagcataggttgactttgacttcgctgtcgtttattaggcctaggagacctctgtcgaggtgttcgtctttgggggaagaccggcttaggatttatactgctttgttaacttcgccaaagccaaaccaagatgactttgatttttgagatactcaatcgtgtgttactatatatactctgtttttgttcataataaaaagttactatatatttttatttctcgagtttaacaacctttcttacaaaccacccttaaatagttgtttttggtttaacactgttgaaagaatatacgaattggacaaatgaaggtaaaaaatttgtttttaataattttgtttttgaaaacaaaaatagatttgtttttcaattttaaaaacannnaacaaaagtgtgttctgtaaatttcattttaattttaatcttttgattttatttacgttgggtttagtttcggggtcgaaatcgggttcaggtcagaggccgggttcagcgtcagggctgtggggggatttgggtctgggtctgatcgaagtctaaaatattgattaagaaaaaaaaaattgtctaaaaaatattgaatgtgaaaaaaatattgaatgtgataaaaatattgaatgtgattttttttttttaaattttgattctcataaaaaaaaatgaaaagtaaaaacagttttataaaacatacttttgaaaaatattttcatttttttaattttaaaaacagaaaactgattaagaaaatgttaccaaacgcc

SEQ ID NO: 27752 - DNA, 1334 bp, Cannabis sativa
aagaaaatggttatacttttttctttctctctcttttataatataatatataataattaaaaatttgtttagttggtaaagtgggggccaaacgtggataaaaaaatgggaaaaagatcgaggccattttcttcttatatttcgcaacagataaagagcactttgtgaccgtttttccttttaatagttcgtgtttaacatttttttgtggttttttattttgtctgtcgtcgttctcctaactcatctgttatatcttctccttttattgatgaccctacacgtgtcctacacagtaaaatcaaacgtactgtttatgcttaatagtttggtagcctaatgtttagagggagaaaatgaccatgttggggaaaatttcaagtacttttttatttttttgccaatttaagtacttagagcatcttcaggtattatttagttttttcttttattttttctaaaaaaaatactttataagtttataatcaattaattttttgagaaaatatatataattataaagtttaattaaaaaataatatgtgaaaccatagacggtttttaaattagttgcttactattagagtaatttttataagaaaaagtatcaaatttttctaaataaaaaaataataatattttaagatataatatacattttataattactccactaaatatattttagttacttgttcatttaattctggaaatcatgaatcttgggtggatccaatttttgctccttattttacctctcaatgatgaggttttaaggcaattctgtcttcaccaagaaaaagaaaagctaaatccgaacgttgggttttgccagctaggctttttgtttggtagttacataattcttctaaataaaatgtaccaattgtcaaaacacattgataagagcaccacttgtacatatgactcaaaaatttcagttttgatgtttattattgtattaatgatacaagattaagttaggaaaccgcctctaatttgcagggaatacatagtcaggaatcttatatagtactttatatatgtatgttacatacaatttatccgatgattatgtcaacatcataaacacgatttttgtatgaatataataatagattaattggagttataagggtcatggagttcatacttgaaactcttaatgaacaagttttatagttttgattgactaaattgtgaaatcgacacagttgattgattttgatgtatttggatcgttaacggatattattgaattcgttttcccatctgaacataatattgttggattttttggatttataattttcaaacttgttagttaaggaaaa

SEQ ID NO: 27753 - DNA, 3522 bp, Cannabis sativa
aacaatctcaatagttcagagggcatttttaacgaccttaaaagtccaagaggcatgatttggtacatgtcaaagttcaggggcaaaaattctaattaaccattatggataattgtacatgtcaaagttcatgtgacaaaaattctaattagccataaaaataaattaatttaaaataataaatcaatctaattccataaaaaataataaataaattaatttaaaaataaattaatctaaaataaaaaaaaaaatcataaaattaaagaataataataaaaaaagattaaaatttctctcttcttctcgtgctctctcacctccctaaatctaagcagtcgtctaccaccattttcctccgtcccagacatcgcctccatcttatggcccaaacctcaccacctgggcatcgttccttctcatcccttcatcgtgaagttcataccaagctgtcacgagcccagaacaatccatcccagtcgcgagcctaggtcgatccatccccgtcgaagccgccaacacttcatctttcgagtagcgaccaaggtgcaaaaccactggggtttcatcctcgtcgtcgatggtgtaccgtgatcgcagaagccactagagtttcatcctgatttgcccatattgtttttttttttattttaatttgagtttgagattgattataaattttgttgttatttttggtatttttgatctgaaatgtgtagaagatttcaaatgtaagtttgttgttttaggtatgggatagaagaggaggcgttggtggtgctccgtaaggttatcagagcagacgtgagcgagagaggagagtgagtgagggaggagaagaggttttggggccaataggttccatcgatggcaacaagtggtcgaccgtttggttggcttggtagaagtgagtgagggaggatagtgagggagacatgctttgttagggggtttctttttcttttagtttaattttaattttttttaatttatttagtaaaaaagtatatatttttttaagaaaaaattaaaatggtttttaactatttttttatttttaaataattaaagtatgcaaacccataaaattgtgatatgtatacaatgtatctatatgaatatgcttatatggtcgttaacggtcaaaatagatagaaatgactaagtggtaacagaatatgagtttagaagattttactattaaaattttaaaattaaagatttgttgcaataaatcaaatacttatatatagaaattatactccaaattactcttaactttaggagtccttaatgttaacccacgtttaatacggttaacctatctggctccccttatgtaacgactagaaaggaattgtagatataataatcacacacagtccaatccaagtgccattattaattatttaataccaaaatcattttaaagtcaaattgttgcagctattccgattcggaaacatgaaaagaagagaggggtgcagggaatccaatgccttttgtcataatttggacattgtggcattgccagtagaggacaccatgactccgcaatcctacgtggcgtcaatctactgccactttatctgacatggctctgtttgtttgacccttggatgagttggtcatctgaggtggagaatattttttcaacaaagtgagcggtgattggattggacttgagggtcccatcccctattaccatagcaaagcctaatttctttattgacttatacataatttgtatataaaaaaagaaagagacgtaatgtttgggtgtaccaactcaatataaatatcgggttacatatattcaattgtaatttacccaattaaaaattaaaaaaagttcaatccgttcaataatttcatcgatttggtctagataactcgtccaaaccgttctttactttttttttatatataattatcattgttagtttttaattcaaaaaattaaatttaaaaaaaaaataaaaatacatatttatatttcaagttaaaaaatgttatagtctaaattaattttaaaaattttaatataagataaatataattgaataaacatgaaataattgaataatataattaaaaataaaaatattgtatagattttaaacttcaacttcaatatccaaatacaataaaaattgttaactataaagtttagattttaaattaaacactaaaatatctaaactttaaatacaaaatagtttgactaataaatataatttatgtaatatattatatacacttttattaaaaaatatattaatcggtttattcgggtaaattggacagtttagaataatttgtaaaccacccaatatattcattgggcggtttggatttttattgtattatttcaggttgtattttttatcgatttattcggtttagtttgggcggtttattcgggttggccggtttgtaaattttgttgaacacccctatttcttagagatattataaaatcaagatgtattacagttctattgaaatataatacaagaattaacaaagagattaaatgaatattacaacacatattatacaatctatatacactatatatagtatacacataatcccatctaatttttaattactaataataacaatggaggagctgtagaagaccaggctaatggtcacaacaacaacaaccgtagcctgagagactatttgcttcctaacttggcagggaccagatcctgtataaggccacctgttgttgatgccaataattttgaatataagccagccatactgcatatggtccaattttcactccagtttgggggattgccatcagaagacccaaacatgcacctcttcaacttcgaagagctttgccagacattcaagatgaacggagtcagcgatgacgccatcaggcggaggctgttcccattctcactaagggagcgagccaagagttggttggtatctttgccacctaattctatcaaaacttgggaggaattggccctgaaattcctttccaaattctttcctcctacgaagattaccaagctaagagttgacatcaagaacttcacccagcatgataatgaatctctttatgaagcctgtgagagattcaaggatttattgaggaagtgtccgaaccatgggattgaaaggtggttacaagtgcgtatactggattaatgagtaacacccaaccattgatagatgtcgcagctggtggggcttttatgagaaaaagtactaatgaggcctttgagttacttgaagagatggccataaataatcaacaatgatcaacagagagaggtccaattaaaaaggttgtgggaattcatgaagttgatgcaataaccaagttgacagcccaggtagaggcattgacaaagttggtgactacacaagcaaaacaagctctagttgtctgtgagctgtgtggaggatctcatgccactgacacctgccctatagatggcgacagtttgccaatggagcaagcccacgccattggaaactatcagaata

SEQ ID NO: 27754 - DNA, 1326 bp, Cannabis sativa
agctgaaaaataaaccaactcgaatattaaaattaaatacactatttatatcgcctcgaaaaatattagtcacggttataaattgaagtctttccttatgtgactaaggataagtcaaaataatagatcactagtaccagcaggatcaataacagccatctcaagaactacagagtacagaaaaaacaagacaagagactttgttggtcgaacaagacagtataaaagagttcgacccaaggagcataaacgatacaatttgaagagaagcttatataaaaattattcaaaaacttcatcatggatgatcaatgcgagatgaatgtccaaacatgtgtctcccatatgtcatcttagactataaaaatttaacttcaaagccacgtaaaatttctttatatattatttacagttattttctagtattatttaattgttaaataaaacttatttattagttaacgaaaatttgagttaacaatactcttgttagtttgttgttaattttttaatatttatatattatttttttatgtagcttttctattattttcatacaattttcttgttttttttatattatttttataaacaacataaaaatatatataaaaaattaccaaaataaatagtagtttatgtaaattaatttggattttatttttcttagaagcaagaaaaaattggatttattgcatacattaatgaatttattattgcattttatgcatttataaattgtaatgataaggatttatgctttcaaggattttgacagcttccatagtcaatgggtaacaaagtcaaactataagaacaatcaagttcatctaatcactaataactaaatatataatacatattgccatattgttataattaattaatcaaaacatttattacattataacacattgcaaatctaattacattgagagagacaagtgggacactacataaaaatactctatttttatggtcaaataattaggagtaatttgtgacataaatatttaatttaatttacagttataaataaatatttaattttaatttttagcggtgataatctctaattggtcgaagtcattaaatttttattttgaaaaaatagtttaaatataccaataaaaaataacacgtgaataataacttgacatttaactcgcagatacttacaatgttctagaaatataatttagtattattattgtaaaaattgaacttaattagtatttatttacagccgagaactaaaattaaatatttataccgtaaattactcaataattaataataatctaatcatgagtattttaagctatc

SEQ ID NO: 27755 - DNA, 3351 bp, Cannabis sativa
attcaacattcaaacatatatcgaattgttttaacttctattattaaaaaatatatatatctttacagaatttttaaggcataaaacctaacagtgtcaacttgaaatcacacttaaaagctgtcaaccacacctagtgcctaggagcacccaacgcttaggtgagcaatcacctggagtgtgtggttccattcatcaaacattcaattcgtctcgagaaaaatgcttctgtagcatcaagaataagaaagagggcttgtggcaagtcatttgtcaccaagcgctaggcatcctggaccaggtgacataccagccgcccaagtgatcctaatacatcaactggtgcgcaaagagagtttcttcaccaagagtaggtgaacctcttcatgaaatctaatgaactgtcatcaaatcatgctaatttaccatttggaaattttatcattgaaactacacacacagtgtaagaccagcacctagcgcctaggtggtgcatcggacaccactcaagcgaccaccttgtgttctccgaaagatgaagcgcaattcaagcatttaccttcataatacttcaatatcacattggcaatccgaaatatgccaaggatgagtaattgtgaagaattcgtgcccaggtgaatcaaaaatctcacctggtcgctagtttttgctcacctggttgctatgtactaagactgaagcacattgaatagtattttgaacatatctcacttgatacaactcaaactaaagagctttaaagtgcattaaaaaaactctttcagtgctatttctgtggatgtcgcacaagcatatcaaaattcagactctttcctatcaaaaattgagtcgcaagttgaagtacgaatttaaggtattagagctcttacatttgatcaatggaccttcttcaatctcagtgattaacgatcatcattcaaaccatgatgaatgaatcgcaaccactcattcaaatcatgattaatggtcaaaataaaattcgaaagatctacggtcaccattctgatagcatggcatcatttaatagttcagctcaacttgaagagaatattccaagaatttacttttttgttgatttagttattattattttaaaattaaatattcagccatccttccctataaataagaggctcattcaattcatttttcacattctataatttctagagatccaaagctttgaaacttaagctctctctctcactttaaactccacacactaagtcagctttcgtaacactcttgcttgaaatactaagattgagtgcactgagtgtttcatagtcaataaaagataagtagacgttggtctcattactaatgaaactgattacataaaataactaaattaaaaacgaacaaacaaaaaccaattacaaaaaccgagaaacaacataaataaaatacacctacagttactaccatgaatattacagaaactgcttttaaaaaatcccataaaaaaacatataaaatttaattaaaaaataactaccatatttttataacactttttgttaaataaataacattatactttcttagttaaaataataggaattgatcacatccattgtttttaggaagcctaagttagcaaattaggaatggaaggtgcataactataggctaatttctaccactcattttatttgtccaaagcctatataaatccacataggttttatttgtatatatcccaaaacaagagagaaaagttttttgagagaatttttgtgagaaaaattcttgagtataattggggtgtgggttgtgaggtgtgttgtaaaatactatgtatttttgtttcttagtttcagtaaaagatttgcagtagatttagagacgtaccaaaatttgttatcaaatttgtgtgtatgtgtgtgttattttcgctgttattttattctaactaatctgattcataaaaaaaaaattgcgtaattttcttaataactggtatcagagatgtggttagaaattctatccaagaagtcagatttgagtgggagcgatggccacagatgaaggaaaggtgaaacttgagaaattcgatggtgcagaatttggattttggaagatgcagatcgaagactatctataccagaaaaagctttatcaacctctctcagaaaagaagccagggggtatgaaagatgaagaatggaatcttctcgatagacaagccctcggagttattcgattgatgttgtctcgtaatgttgctttcaatattgcaaaagaaaagaccacggctggtcttatggcagcactctttaatatgtatgagaagccatcagcctcaaataaagttcatttgatgaggcaattattcaatttgcggatgatggaaggcgcatcggtagctcaacatctaaatgaattcaatacagtcacaattcagttgagttcagttggaattgagtttgacgaagaagtgtgagcattaatacttttgtcttctctaccagatagctggaatgctacagtcacatctatgagtagctcatcgggaagcaataagttaaaatttaatgatgttaatgatctagttctcagtgaagagattcgacgcagagagtcaggtgaatcatcaaccttttcagtattacatacatggtcaagaggaagaaattccactagagggcctggccatggaagatcaaattatcgaagtaaatctaaagataggaggtccaaatctaggaatccaaataattcctcaagctcgaagaccatcgagtgttggaatttcggtaagattggacactaaaaaaatcagtgcaagagtgcaccaaaaagtcaagatgggaaggcagaagcaaatgttacttctacatcagaaggtgatgatgcgttgatatgctctgtagagagcaaggatgagtcttgggtgttagactctggagcatcattccacgctactttgaagaaataattcttcgagagatatgtccctagaaaccttggaaaggtataccttgatgatgaccaaccttgtcatattgttggtaaaggtgtagtgaagattaagttaaatgggtctgtttgggagctgaaggatgtcaggcatattcccgacctaagaaagaacttgatctcagtagggcaattggctaacgaaggctacactacaaactttcaaggtgataattggaagatttcaaagggtgcaatgacggttgctcgcggcaaaaagaacgacactctttacatgacagcaggtgcgtgctgttcaattacaattgcaataagaaatgaaaattccaatatgtggcaccagagacttggtcacatgagtgagaaagggatgaaacttatgcattc

SEQ ID NO: 27756 - DNA, 1150 bp, Cannabis sativa
tttaaaaaattattatttgtaaaataaggccaatagcccattctcgtccgagtttacttttttatctaacaaaaagaaaaatgactggatcagatagcacaatcttccgaccttatcctttatacttctaaattgtcctttggctctaatttttcccaccaaataataaaccagagaaccaattttaaagaaaataaaaattgaaactttagattagaaatggcaacaacagcctttctttcaactgcaatcaccttcatcccttcacgtctctcctctttagcttcaacttcatcctcttcttccactagtttccttttgagaacacaatcattatcttatcctcacaatgataatgccaagagacttttgattctttccaaggcagccagtgaatcaccaccaccaccctctttacttctgtcaaagagaaacctttcaatcagtttagtaaccagctttttcttcgttttggctggtaataattgcgtctccaattctaatgccgccattctagaggctgatgatgatgaagagcttctggaaagagtaaaaaaggatagaaagaagagaattgagagacaaggagttctcagctcatctaacaaagaaacaggtttggtccaattagtcactgattctgtcaaaatgcaaaacttgattgtacccatttagctattttgtttaaattatatttgatctgcttttatgtttaatcgaaaacccacaaatagattctattccagataacaaattgtacatggttgtcccttcttataatcaatagattagttattaatggtgaaagaatttgctcactatattctcacctactttattatataatctgcagttggtaaaatctgttgtgatttcattttctgcaagttggataaatttattttttgggatcaattgctatcagttagtgttgtatatctataagaaaaagaaaaaagaaaaagtgatttaggaaaatgtcttaattgccactaattgaaccaaaactacaattcattgttcaaaagaaaaaaaaaagaaaaacaccaaactgcaatgctataaggaattcttttaattgagctccaagagcttggcaagtgtaaaatgtatataaaccatgtcattgaaatctgtttagctagctttc

SEQ ID NO: 27757 - DNA, 2281 bp, Cannabis sativa
cgggttcaagagcacaggaataaactgactggcactacaagaaaaataggcaaactcggcacaccaatctcggcgggcccgcgtgtgtccgtcaagattggtctctataacggcaggctcgttgtaaaccgtcaagaaaggtgacccaattattttttttaaaaaaaattataaaagttagacccaatctcgacgggctgaaacaagactgtcaatattgtgtgcccaatctcggcagtcctagttgggcttgccgagataggccacgaaattaaagaaaaaaatcagcccagcccaaatcatcttatatctctctctctcaaaaccctaatctttccatcaatactcagctgtaaccctcttcttttctctcaaccattccttctcttcttctttctcgcatggacggcagggcttgaagattctctctcatcattgaagactcacaaacaaacggaggttcttgttgctctctcgtcgctgatggctctcacctaaccctgacgatagtgttgactcaatcccaatcccaaaagttgatggctctctcacaagtttagtgttttaattttttattttcatttctagaatattttgactttacatctttttttagtcattcatccactaaccctctcttgttctctttgttcgtcaccctcagggattgggatcactctcaaattttctctattattggtataattatttttctccacacacatatatttaatgattgagttggctgtaatttttttcttctattttttgatttcttatttcttttgattatataaagagaaaattttttatttatcaagtttactgttatgggattcatattttgaattcggctaagctaacataagtgtggaattgatgaagtaaataatacgaactgagtgatatcatttctattgtattttcagatatttgataaaaaatgcatataaaaatattgcatgcctggtgtttgatgatatttctcaaagaaactaaacatattatagttttgttgcagtggtctttgttgtgttgttgagcaaatatgctagtctcaaaatctttgcatagactattcaaattcaggtaaattttttgccagaatcaatttttttatgttgttttttttacgataagtacagtgatgagattaataattttattcattcgagtatctatgctttattttgattttttgtatgtatatatactcagttagaagaatatcgtccctataactctataaaagtgaaattgattaaaatggtatctctttgaagggtcacaagttatagagacttaaaattttatcttgtcgaaattgattaaggaacacacttttgtttagtcttgtatacacttttgttccacggtaaacaaattgaattgatttcattatgtgtttagtcttgtatagttttacgtgtgtaaagaaagaaacacacttttatttctagtactagtgtttaatttgtcaaataaaccatacattcaaagggattatttctcttctctacaccttttaatttttattgtcattcttatatgtgtttcagttaatgcaattatactttcactctgtttattactaatttgatttgaagttcaagattaagacttcgcaaagctagataaggttctctcaatgagataaaaggtgatataatttgttcttagacacttggtagagataatgaagagtttttcaataaattgtcaaaaagttacaaacatgtgtgtaaatctatttacatataatatgtatgtatattattgtttatgtatagaattatacgtgctaaaattgctttgaattaaagaatgtatggaaatttattttgaattagttgatgtgattttgaagtaaagtgcccacctatttgtatttgtgaattaggtgatttatacaatgtattttttaagggtcttcagcctacaaatgtatattgttctcaactttgattatatgtcatttttcagggagctattgaaaatggtagtcaaaggaattgtggctcaaatgagacttgttgatgttctataaagtagggccaacaatatatttctgtaactcataaatatttgaattttttttttggttcagattttgtaatgatgtctttaacagtttttgttgaatattatggattggtgttagatatattgtttataatgtattgtaatttattttttatgtatattcttacaattaatatattgtaacaccctaactaacttaggcgaattacgtgatttttttttaaacatgctgtgcagc

SEQ ID NO: 27758 - DNA, 1291 bp, Cannabis sativa
tcacaagatctttaaccacttaccttaatgtattactatcaatagtactcgcatgtatttatacttagtcaatttatttcattaaatgtactaaatatacggggcataaccattaatattgtacaattgattatgttaatgaaatatttaaagttttataattttttcaacaactttttcgcaagtttttatattctaatttatcacaccaagctgtgagtagattcgtgaaaacttttgtgagaaaaaaaaacataattaaaagtgcagcttaaataatgcaagtacccatgtaccgctaaataagtatgcgaaaggaaatatcctcgagtggatatgatgttcgataacaaaagtttgataatttgatcaaagtaccaaagcacgagtacccttgtaccgctaacaaaaaattaaaaggtttgacaatacaaaaagaaacttaagaaaaactaggaggctggaatgctgggatcatctgcaactgataactctatggtatagagtgattttttatgcttttaaactgaaattattgtgagaagagtagtgaaaatgtgtttgtttgcttaattttagttagttttagtttcattttctttttagtgagctaacttttaagtcttttaaaaattgatattgttggtgtgttttttattctaattaaatgtgcttgtttgttgttgaaaaggaagaattaaattgataggaaaaagaaaatgaagcaaggatgaagtggggacaaaagctgaaattggggaaatagctgaagcaatgctgaaacgaattcagcattctggcagtgacgtggaaacacgagatttagttgtcaacgtcagcaggagcatgtttgttacttgaaatcagaccagctgaatgttgtgtaagaggaggactaaacctagtgggccaaggtacaaaaggtttgggcttctaattttagggtgtgatttttgtaccctagggacccaacaacaaaaacaagagaaaagccaagtacaccaccatcacgaatctaacgcgagcagctgcattttttttggaagaagtaaatgcagaaggaaagtacagcagaggaggaagaaatggggaccaagctttagtgttcgatttttcttttaccctctcctaatatttttctttctctttctcttttcttgttgtttgtacttagttattgaaaactttgttgaactgtaaaaccggacagcagccatggaagatagctttttagcttggattttagtttttaatttgaatatgagctagacttttgaggcttgaatggcta

SEQ ID NO: 27759 - DNA, 1621 bp, Cannabis sativa
aatacattgctgcatgtgtattatgagatgattcaacactattttgtattacgaggtgattcattactgactgtgtattgcgaggtgattcatcactaattgtgtattacgaggtgattcatcactactgtgtattacgagatgattcataattgattgtgtattataaggtgattcatcactaactgtatattacgaggtgattcatcactgttgtatattacgagatgattcatcactgactgtgtattatgaggtgattcatcactggctatgtattacgagcagctacaagatctttattgctagatgttgaatgtttatcaacataacatttcgacaatcttgaaatacctcactttatgaaccttgtgatctttatttagatgagatcacctcacaggttgagtcctgagtttttttcgacctgtcccataatgtatttattgtgagaatttattatttatgccacgtggcattcaatttgactttttcattaaatagtccaaaaataggtataacaaatataaatattaaaataataaaaaaaattctcatttgaaaaaaaaatatttaaaaagtagttgaagggtgttgcagcaaaaacaaaatacaaggatgctgccaaacaaagcatagctaattcataattgaagttaaggttataattaaatctcaatcctatgaatctaggtagaaaacccagaaaaacagcctgctatattttgggttacttttctcgaaatctcattttttagcgtttcctcgatatttaaggtttagtcacgctatttatcgagaagaaaacttttagtttcaagtttaagttatcgaaagtaatttagcgaatcactaactagttttacgtagattgtgacttaggaccttaaatcgttgagcagcagtttccacctagagttatcggcacgctgcattcagaattaaggtaagattaatataatagtttcatatatgtgtacatatttagcgtgcatgttagttgccatcagaacaacatattagggtattagtgaggtgtatatatatttgcactgagatgctaacaaatatatgttaagcgaatcagtagccattaggttagcatattaggatattattgaagtgtatatagagttgcactgagatatcaatagatatatgctaggcttccagatagtatgaattaattattaccacatcattacgactagagtactgagtataggctagattcgtaattaatcatacttttattgacattctttacctagttattaggtcgtgataaggtgtatgggcgcctggttatggtctggatatatatttatgtttatgattatgctttttgtactgagtctgtcgactcacaattattacatgtatgtgcaggtaagagctagaactgaactggaatgggtctaaagctaatggtgaagattgtacatatcaagacggacggttagacctgaagtgttcagtcagtgtctttaggataatttaggctcactttgatagtcgctagacgacgacttttagtattataagtattttgcaaacttatgtaacttttaaaatgggatcccaaattatgtaatttataatatatttacgattaaagttt

SEQ ID NO: 27760 - DNA, 1854 bp, Cannabis sativa
ttatgtgattatggctacttcgtcgtttgggaactcgagtatgaaatcaataaggggttgttccttgattgccaaccttggttcgtatctaatgtcgaactcgctcagttctacggaccatttgattaatctccctgatgcttccggtttggcaaaaacttgtcgtaagggatagtttgttaaaacctcaatgttgtgtgcttgaaaataaggtcgcaactttcttaaagcgatcaccagtgcaaatgctagtcgttccatttatggatagctggttttagcatctaagggatgcttgctcacatagtataccggatgttgtctacccatgtcttcgtggattagtaccaaactaatcacttattcagacactggaaggtagattgacaaaacttctctaggcattggcttagatagtatcgggggttgccctaagtgcatttttagggcctgaaaagcctcttcacacttttcagttcattgaaactttttatttccattaagaatctaaaaaaattctttacagttatcagaggaaagtaatataaagcgatttaatgcagctttacctgtaagactctggacttcttttggtttggtaggagatcgcatctccaccacagcttttatttttgcgggattggcttcgattcctcgctgatttaccataaaactgaggaattttcctgaacccactccaaagatacatttgagggggttaagacgcattttaaactgtcgcaggattctaaacatggcctcaaggtgagtgacatggtccttcgcatattgagattttacaagcatatcaacatatacttccatcatcttgccaacaagagccgcgacatcatgttaactagcctctgataagttgctcctgcgtttatcaaaccaaagggcattaccttataccagtccaaatcgcgatctgtattgaaggaggtatgctcctggtctaattcatacataagaatctagttgtatcccgagtatgcatccatgaagctacgaagctcatgacctgcagtagcatcaacaagttggtcaatgcttggtagaggaaaattatccttaaaacatgcttcgtttaaattagtgaaatggacgcatgtgtgccatgagccatttggcataggcactagtacgggatatgctaaaaagtttgggtagaatgactcccttatgaagctacatgacaaaaggcaatccacttcttctttaagcgcttggtacctcgcgaggtccattttgcgatgctttcgtcggacacctcgcacttcagggtcaatgttcaatcgatgacacatgacctttggtgatattccaaccatgtctgaatgtttcccctgaaaaacatccatattttgtttgagaaaagtgacgagattttctcgctgttgaaaggttagtttagaaccaatttttaaaacattattttgatcagaaggatcaatttgtaccccaattgtttcttcttcagcctgtacagtatttgtgtaatcgaggatccttggatctagatccagcttctcaacatgtggtatctcctcaattctaaaaatttcttgtgaaggaggcagtgcttctagtaaatatatcacatttaccgacttcttcttttctgtgagtattagtgtcgtgttatagcactctcttgaatctgattggactcctcgcacggatcccacacccgtgggggtagggaatttcatcataagatggtaaataaaggttactatcttcatctctttcaaaatggggcgaacctatcactgcgttgtatgcggaatactagtcgacttctatgatatcgaccattgacttagcagcgacagaggcagttcctagagt

SEQ ID NO: 27761 - DNA, 3372 bp, Cannabis sativa
  modified_base (3020)..(3021): a, c, t, g, unknown or other
ataaaataaaataaaaaaatcatagacatatttaaaattccgtaaaactgtatttttataattttttttgttgtttttatgtttttgtgaaataatcccttcaattaatatatgtatataaataaaaaaaaaaattatataagcttggaaaatatatttggaccaaattccctcatcaccctaaaataaattaattgtttacttaaaaacacaaaattgagtctaattataaattcaccaaaatccgtatatatacgcgtaaagactatatattttattttgaattttgattttatttttcaaatttagaaatctttagtttgatatattaatttttgtaaactgtgttgatacaaaatcgatgcaatttgattttggaataagaaaattttgatgcaacatcggttaatttgatggtccaagtaaaatttgattgaataaaatgacaatttcagtgcagaatcgatatcaattcaaccgtgcaagtaaaccttaatcatttttggaagtcaatttcggtgcaaaaaatcgacgccaatacaatatatatagttccatcaaattaaacttgtgttaatagctagtcaatatatacatgagtatattaaataagtgagcattgctattgggcattagtagtgtctagtacccttaagacgtgtcgtcttacaatttgccagcgagattccctaaaagctattatattaaactatatgagacccgatactaaattacaccaataacgatattgacacgtagaaaaatacttaacactacgggtaccttttagcatttctctaaataagttattgtatattattcttgctgttcactcaattaaggagcaaataaatgactgatctccccaagactagctggccagtttcagggtgaatattaaataaattactgtgtatacatattaattgttaaggtaagttttttcactctaatcctcactatacttttattcaatctctatatctcaccacttgttttttttccttattctctacctaaacaaattaatgatcaattttggttaccaaatccatctttctaaatccctcttgcctaacatattggtagaaggggcagacatttataatttggaaaaagtgaattccaaactatagtaccaataaactggaaaaagaaaaagttaaatccaaaacatcgtttgtccgtttcacaaataaatatactattggttctccattaatgttgaaaagataacacctagctagctaatacatatgatgaattgaaaaaacaaaataagcccttttttctttagttgacaagtgggctcatgatttaagaagaataaattaatgctccattattatgatcaataatcataagcaaataaaaaataattttatattaataaaaaaataaaataaaataaaaagtaaaacaattggcttatacttggtccccctccccaattgggctttatatatattaaggttatagctatagattgccccaaagaaaagggcaaagccaatcaagattaatcatattacatctcgtgaagaacttttcttcttcttcttcttattatgataatatttatttctctgttgctcttgaagaacataacaaccaaacccttttttctctgattatccctttccaaatattattttccgatatatattgttagtactgtaaaaacatatactagatatgagtaacactatgatgccgagggttaaggtcatggtctatcttgtttacgataggggttagcttaattacctcaattatatatattacttttatatagtttcgatttgatcgatctcttcatatatagttttcaacatacatatatatataataataggaatatggatgtagtgaaagtgaaaaagggcagtttaatcaacaaaacgtgggagcgatgcaagtccttagggcgccgcggccgtgacaagtcaccagctgcagcaaccggtcgaatcatgacgaagaagagtaaatcgtgcccgcgtttgaatctgatcactcccgttacggggtcgccggaggcggaaggaggtgatcagattaatattaataatagtaataattattataagaaagtaaagggctgtttctcggtctatgtgggaccggaaaagcagaggtttgttgtgaaagcagagtacgccaaccaccgcctcttcaagctacttctcgaagaagccgagtcggagttcggctacgataaccaaggccccattatgctcccatgcaacgttgatgtgttttatcgagttttgatggaaatggacgatgatgatggtggtgataataacggcggcagccttggcggcgcagccgattataagattcatcggcctggctgtagcttcgtgattaagcgccacgtcacctcttatcagcttctcagcccttctcgcatggtggctattaatcagttttaattagttattacgtactaccacgtcatcgtcatcacctcggtcattatatagtatattttcctgtgtaataattataattggaattttatgttataaataattatatgatatatgtgtggtgtgttatattacgtgtgtaatagttttgtgtgttttgtaatgaaattttcgagagctgttagatattttattataatagtagatagtcaatatatattattataattctatggttaaataatataaagattaaaataagaaattaattaaatatatattataatatattatatatagtactcacttataatcttaagtgtaaattaatagggatcaccgtaatttaaaaaagatattacacttttgtctaaaagtttattttcccttatctctaagcactaaagaaattatcatggaaatagctttgagaattataaatcattagagttttctagcaatatggttatttctctgataaacgagtattaatagagtttgtataataactatatatacttcataactttgaatggaaagtttggcttagtatgcttaaatgtaaaacatgttgttttaatatannacccaattagaaatagtatatatatacctttgtaataccttaaagtttaataactagattagtaaccccaactaagttgattaagtattaatgagaatatattattatatgatttaatatgtgaaattattatgatttattgcattttaagaccccattggtgtgtgagggacatttttgtaattttgacccgagaatggtaaaaattataattttatggtatattgtgtttatggactatattattatataatatgtttattctgtctttttgcgagtaattttgacaagtcggcacagtatagtcacaatcgggtatttttggctgaactgggttcggggcccaaaata

SEQ ID NO: 27762 - DNA, 940 bp, Cannabis sativa
tttttgtattccattaaagatgttcttatagaaaattttatgatttaccagcagctaataggatcatcactacttatagcaccttacaaatattagtgacaatttatgataattattaaattaaattcatatataagacctaatatttaattacactattaataatatgacagattgtaatgttatcccaaattttgtccacctgacgtggcatatccacataagccaagattgaggacgcgtggaatacagccttgtcaatagcaggataaagtctccttataagacatagcaaaaccgtcaagcaacaagtgaaaggagttaagtaagccgtcaagaagatgcacaaccatgtttggcctgcgaaagggagtacataggccggctaggagaagcttgtatggccggccagggtttgagcacaagctggtcggccaaagggtgatagttagactaaaaaaaggcatgttcgaccaaggaagctagcctttgcgaagatagttgtacaaaggttggccaacacctattaaggttggctaacacatgcaaaggctgactaacacttgtcaaagctggcaggcacttgacttgccagaccttgaaaagcacttgacttgccagaccctagtaggcacttgatcgaccagtccttatcaggcacttggccagctagaccctggcatgcacttggccagtcaaaccccagcctgcacctggtaggcacttagtgtgcagccttcatccgggacaataagccaagatgcgatttgggcttcaacaatccacaaaaataagggagaaatatcagctattctcatattcttggggaataattaacctatttgttatttattatttaattatgtaacaaatattttatatttcctatttttttagggattattggttattaatatcttgtaagctctcatatataaag

SEQ ID NO: 27763 - DNA, 2558 bp, Cannabis sativa
tgcttaaaaagataagcttttgataataaagtaagggaaaaaaaaagtaaagctaagaagacagaatgagttgagttgggaatttgttaaagagaaaataaaaaccacttaacttttgttttagagctgaatttgaaaggtgaatcaaaacttaagttctttccttgatatgattcatatgaacaacaaacaagtttagaagaacaatatagttatggtttttaattaattgatggtaataggatgagatatatagtgacttgttattggttaaagttgtttggtttgtatttcatcttttttgttttgtcacaatgacatatgaagtcactttcattgtatcactaactatatatatatatacttagatttatgataaatgaatggtattgaaatgagttggaaggcatctattggtgactttttcttgtccaatgtccaccaccaatgtgaaaaagaagaaaatatatgatgatatgcttaacttacctagttaaggcagctttgatcatattaagagtaattagtattattttcattttttttagaaatgttaaagtgtacttatagtgtctatcacaactatgaaatgtcatatggctttagtaatacttatagaaagaataacttgtaatataaatatttaattttattttttaacggtaataatacttaagttatatttttaaaattttaataagtacatgttcgttaagtgttaagtcaataactacgtaaaagtacttaacggttatacacttacgataaaaatataatttaaatattattattaaaatgtaaaattaaacttttaatatgttgccactaactatttgtaggttatgatttttatttttgtatggttatgatcattcatacatacccaagttgtaagtttatcataatgccacttaagtgggtcttttttttcctttatcaaattttctaaccatataatgccacgtcacatgtattgtggactgttgatttagtcaaagaattctcattatttgattaaaatcatcttttgaagttaagaagattgttgacatcatccactatccacacacaacacaactatatttgtacttagtaattaagcaatgacataatgatagatatattatatactatatccctttcactctctttcttataataaatcattttttaattttttcttcatttttctgtatctaaattaattcgtaattaaatttattatgattattttatggttagttggctttcatcaaaattccatttcaaattctctatccttaaattaaaattggatgataatggtgcaatgtaatattagatcttacataaaatatattttaatttaataattattataaaaaaaaaaattattaatcattgacaaaatatccattattatctgataaattattctttatttattttgacatttctaaatgaatacaaggattatagactttcacatgcaataaatgtgttttctactaggaacaaacaaataaaatcaataataattaaaattatattcacctaataatagtaataatcacatatatattatacaaaagaatttgttgtgttttatttttagtacaacgtaatgacatatgtgcaatatattaaaagaatttgttgtgggtatattagggcacgatatccttgattagctagttttttgcaccaactgttttgaaagtagctttggtgaatttggttggaaccggtctgatccaatctttgccgccaataaagtcttgggtcaagaatggttcaacttcttcgctcgtaaagttgcgcgcatattggacacgtttactcattcccgatccccttccataacatttgtattgcccataatacaccgtgctacaaatatacgaaataataattagcttttaagctgattcgatatattcagacattcaataattattaataatcatacgatcaatccaactataaagagtaaattcggtccataatatacctatgcgtgttcgagtttccccaatcatcccaaccttggggcaatatggcacttgaaatgtaactaaaagcaaaaacaaccctagagtgtgatccccacggccttccgagcaaggctgttctcacaccggagatgttgcaccctaagaaaacgaaacccgtctcctcggacggtgactcccttcgttgcgccgtgattgatccagttccttcggccaacgaatgaatatggcatttctgcaaattgttaagtaattagtaacttgttactaagaaaacaaaataccaataaaactttgattaattaattaattacaggtgtgtgtatatatatttaaacctcaaatagagaagctgcattgccacaaatgaaatcagtggctccttctatataacaatttttgtaataatgtctaccattatcatctagtaaagtatcttgtactgaaattattctacacccataaaatgctgctttgtctcctgatactctcaatgccactgctttaccacctgacccataagtgttctgtaacatacatacacatatataagctgaaaattcaata

SEQ ID NO: 27764 - DNA, 2587 bp, Cannabis sativa
taggccataaaacccaacattttctccttttataaatcttccaaacatatcgtcaaacatagatattctccatatttcgtatcctcatcaaatacgggcaacacaccaggagagcagccccatcgggacggagaaaagctatatgcttggatatataattgaagtcctttactcaatgcatactggtataagacaaaattacttgccatatttgttgcctcatccgagtaagctgatcctcatgtgttttggggtatttaagaaaaagaaattggctaacaacccatttcaagtaagcatcaccaagaagctttgctctcataacaaaatgtctcttggcatgaagcagctgtcaaagcttccaagatctgtagacagaacaaagaggtgtttacagttcaaaaccatttaaaattagttccttatagccacaaaaggaaaagaaaaaaaagttcatactttcaacccttctcattatggagggcaatctctgtgcaccacgaacaagtgaaccacacagtgagtgcaataaacacaacttatcaccagtctacaataaacatcaccaaatcatatgacctcatcttcctaaattcctcacaccgtaagcttgccaataattttaattatgtgattgttataacttattcgtcatataatttattcaagctctttatttgtttaattatagtattattttatcacacaatttctctcatatacaattttttttttttaaaattaacgtggggtgtgcaaggcaatcattcattgatctcaaaaacgattaaattacgaagtgatatatataaatataaattttataacatatattaattaaaaatatctaaataatttgtatagatttaatataaatcaataatactttacataaatgatacattctatattcatagtacttatattgtaaacaatatttttaaatattctcaataaattaaatattttaaaattttaaatttaagtttgtattttatcattttaaatttttataatattaatttattaataaaaacttgataaatataaaataaagataataaataattaaaaattaaaatatctaaactaccatttgaaaataaatgtttgaaattaccgcatgaagtatccacatatctgacctggcgctttaaaacaagtactgaaaacaggagcttgaggctgataatttttttttaagctaattaggatttttttaggctaattaggatttaaggacttttttcaaatttctaaatcatgctccttagactttgatatctatcaaattagggcaaaaatcttaattagcctttcttttatatatatacacatttttattttatttttataaaatttcttttttcaatttttttttatttggtacaggcatagaatttggtttaaattgagtgagtttgtagcaactcaattaattaacaagtctattttgtatttgacctttaattttttattttacttaaaatgttatatattgttatattacttttttttttattattttttttatattgtacttactctaaaaaatatctaaaatatcttcttttttttttttctcgttaaatttctaatcttgaattaggttaattaggttaaatcatatgaggacaattacgttaatttatttaagtttatataattgatcattaagatggttaaaattaattgattaataattaaataattattaatttattaaaattataaaagtattttaataaagaataaaaaaaacatagatttcatttataattacttacaataacaatatacaaaaacacaacaatatatatactttataaaaaaattaacaatataaaaaaaacatatcataataatttcagatactttaatcaaaaaaccgtacaaagaatgttatataattatttaaaacaatattttttctaatgaattatctaaaagtattagagaaaatataaaaaaaaaattatatgagaaaatttaaaaacaaccgttgcaaagcgcgggttatttactagtatatataaaaggagaagtataagacgttgacatgatgctttagaattactctaaatgcatctatctaatctctccttaagtctctcactttttaattttttaataagtttataaatattaattatttaaaataataataaaaatctatatatataaagctattatgatattattatcacgcatacaattcaatttttttaaaaatattattattattattattataaattagttaaaaaaaatataaaatcatgtatcaatcttctcttaaccgtatatctcaagactaagtatataaacctaaattactttcttctttctaagctataaatgatatgcagtgatgataactttttttgaatttagtagtgattataaatgagatacgcagtaatgacaactttgaatatagtaataactatatacagtggtgataatgactttgaatatagcgataactacaaatgaagtatggtgatagcgattttaatttttttttattctaatttacatagctaaaatatagatttttccttaattatattataatttcattaat

SEQ ID NO: 27765 - DNA, 2040 bp, Cannabis sativa
cttgtcatcttttgtaatcttacatcaatattactattcttgtttcttatattgaaaaatcaatttaaaatacaggttcttgtatagaaactgggaatcttgtgtatgaacctgcaagagatggacccactttatgggaaatcggtatacctgatcgttcagctgcagagttttatgttcctgatcccgatccaaaacatattaataaactttttgtcaatcatccagacaggttggttcctttttttatttatggtgatcataaccatctgttatttatatgcgttgtgtaagttgaatgactcatttatatatttagagtttatggttgttgtaccatgacactcaaaatttggaccattgcattctactggcaggtttaggcaatatggactgtgggacagatacacacaattgtatcccaatgatgatttggtttacactgttggtgttagtgactacaccaaagattggttctttgctcagattcctaggtgtgtttctctcaacattggttgctatggaagctcataattgccagtgccttcctactttctacattcattttcccatgcttaacctcatcttttctgcgagtgctgctgattgaattatcaattaccaggccgtgaaatgtgtaatattgaaatgcgattattttgtttttcttcctttgattgcagaaagaaggatgataacacacttgaagggacaacatggaaaataaatttcaagcttaataatgtggttcgaaatggtacatacaaacttcgagtggcagttgcttctgcaactcttgctgaaatccaggttagttaattagcctaaccttacttctttgtttaattgagttattaaaatagaagtaattcttcttcctcgtgaactctctgctacataaaagagtcatttgtaaattcaattaattaaggcgccttctaaatcattttgtcgacttctctttttcaatgaaggttcgattcaatgatcccaaaacacgacgacccctttttactactggattgatagggagggataactcagttgccagacatggaattcatgggctatactggctgtataacattgatgtacctggggctcagcttgttgaaggggataatactctctttctcactcaaccaagaaacaccagcccttttcaagggatcatgtacgattatatacggttagaagctcccccatcttgttaagtctaaacataatatatcatattatgcgctagcatatatatatatatatatacatgagtggatctcaatacgggtgttttgtatacatgtgtatgaaaatgcactattcataatatgtaatgtcaattttcaataaaagtttcaattacaattgtattgtgttgtattatcatcttttattttggttgaattaggttaattgacactttttgaagctgaactaatgaaggcctaccattctgtacaattttttttttccacttctgatattaccgttctctactaaatttttgtttgcaaatttgcaatttgtaaaagctaaacagagacagatatttagcttggcattcttgctatctcaagaatctcaaccatatctttccaaattctctctctaaattcttccatgtctttccttcattggtaatttgcctccaagaactggcactttaatatatataagtatttatataattaaatttctgctagtcatctcaaaagttgactactcttttgaatgtgagatagaatttactttacatttccacttcttcgttcggttaagtcaaattcctctgcttcttgctctcaacatattaaataggagaaaagtaataaaagaaaaagaatgtgagttagtggagtggctatgattttcattgttattttctagactttaagacatgggaatctattaccaccttagttttattaagtcatatataattagaaagagtgctagttgaactccaaacaatgatgtatatatgtacaaagtggctataagttgctgtaactttgcatctgtgcaacctttttgtaacgt

SEQ ID NO: 27766 - DNA, 1485 bp, Cannabis sativa
  modified_base (1052)..(1052): a, c, t, g, unknown or other
  modified_base (1310)..(1324): a, c, t, g, unknown or other
  modified_base (1412)..(1424): a, c, t, g, unknown or other
gatatcgcgaagagcttcatcattttcacgccgctcacattggctcgagaagtactcgatcttgtcctttgaaaaggctgacagttaaagccagaagccccaccattagccgaccaagacttgtacatggcatcaaaatagtagccctcgtaaaggacgatatcaaatgatgcctttgcctctagggaagccacttggccctcaaggcgacaaacttgaccttccagtccaacaacactcaaggtcttttcgtcaagggacttgcaaaaggactatctactttgaaagatttttcttttcacgtccgcaagctcttttgtcaagctcttttctcggtcctttgaattatttgatacaccttggagatatgagatgctagtttcaagctcattgactatgttctccaagtcagtatacctggtctctgcattagaagttttttgctcagaagatgacaacttctttgcaagttcaacgactttcttctgcttgttttccatagcatatttcaagtgacaagtaaggtcagaaattgacttcgaaaaaaaaagaaaagtgaatgcaagataacatatccaccccaaagatgtcactgaaacccttatgtgtgttgaaatttattttactaggatctagatttactaaaatgtatgtttcattaacactctaaatataaattttataatacgatgaaatgaaacacataagagtttagaaaaccttatattgatggcagcgaaataatatgactccttccgctcatatatctagcccttgttcctttctctcgcataataataacaagatatgagcttgtatctctttctctccttcgggttggttaccactgtcttctgcactatgattgagtacttgacttgctatgtgggcatgatacactatcactatgactcgaattgatgaagaacaatgaataaggtgtgaaatcactatagaaaggagtttctcatctagtagtggtcagagaatgaaaagtagctttagtttggttgaagtaagttggagtaaaatgagagcatcatgttcctttnatagtatttcaactagggtttaagatttaattacatggattaaaaaagaataaaataatgggcaaaaatcacactacgtggccggctatactaatgggcctcactagttacaatttttcaactttatttcaaccacttattcttctttcagtaataccatatttttcaattttaatcctataaatgtcaaaaatatttatttaatacttataattaattatcaaataaaattgccatttatcttatttattaattagnnnnnnnnnnnnnnnttaattaacaaataaactccaaaagcttttttcttcacaataaagccctttcttagtaaaaagtcataaataagacatagtctaattnnnnnnnnnnnnntgattaattaaaaccaataaactgagtgtgcaagcagtattatctcaactaatgtggggac

SEQ ID NO: 27767 - DNA, 2807 bp, Cannabis sativa
aataagatttaaaaccaaagggttcttctaaccattagcatacacatatatatacataagaaatgaaataagataagaataatcacaggagcagatgagatcaaacccaacaaactcgtcctcacaaaacccgaactcttgtatggaagtaccaaccgagccatcaaacgcaaactcctagagtgagctacaaataagactaccatataaaaaggatcaaactttaatgaaataaacgtacccagattaccaaaccaaagataaaccataaaatcagagagacccagaagctgaaaacagagtgagaccagaagatgaaagatatatggataaatcaaattatggacaagaaaattcaataaaaaaaatttatcgcaaaattactacttgaattaaatttataaacacaatctacaaagagtagtaatttttcgagcggccttcttaatatgcttaaaggtttgtgttgggtgcaataatgattgtagtaattgttatacataaagaattcgattatccctggaattggaaatggtcattttttaaaatttcaatgctagatccataaacccagtaagaatataacgtatcaagaaaatagttcagtgataggaatagactaggcaattggtagtttgagacccaaaaccccatacacagtccatgctcattcaaatgaatctactaagagaggcaagaaatagtaatcaaataatagcaaagtaattaatcaaataagttcaagaaatcatctaagaagaagaagatgataaagaaaatactacctacagaagaagattgcggagatagtgttcgaaagaataaaaaaaaacggaacaaagataggaatggacacgagtcggaggttgctgtggcgcctgtgatggatacacggtaacgtaaggtcgtgtaaggaagtgagtcggtttttctttctcgtccagtgtaacgccggagttggccgtacgaaaaagagagaaccagagagtgagaggctcgggatagggaagggaatatgaaaagagaaagatactgtatatataaaatttgagaaatgataaaaccaatatgtcaccatgctatgctgaaattaagtatcaaatttttataatttattataagctaattaggatttttgtcttaaattttaacatgtaacaaattatgtccttgaacgtttttagtccttaataatttccttgaattattgagattgttatatttaaggacttttgtcaaatttcattcaattttactatttcagtgattgtttatgtattaaactatgctccccagactttgatatctactaaatcatgctactcgaactttgacatgtactaaaacatgtccctcaactttcattcacgttagactttttttactaaaattggacaaaagtacttaaatccaacaatctcaataattcatgaggtatttttagcatgaggtcataacttctttgcgcaagacccttaaaattgccctttgtaagtagatcccaatcgctggacttaaaggttcgataatgtcgccagtcgtttgtagcatgtaatgagtagagttgtgaaccttcagtcccagcttcgaggggcaaagggcaggagggctcgagaagaaccatcttcgggcgagaactagagaattttagttgatgtacagacccagtaggttgttcacctgcgctcgccatggtaggtgcagccttctctggagatttcgctagctcaaggtctttttcttgttgatagttgttttaattcttttgggttctttgatagaacccgaggcttcactggtatgagaagctcgttttttggccctttgtagacgagcgggggctgttgaacatattttccaagtctagatccatatatatgagataaaagagatacatcaacacttaatcaaaaataaataaaaggaaaatggggaataaactcccacttaaagaaagttaccataatcatcaaatgatgaagaaggaggactataatagttactaaattccctagatcatgtgatcatgaatatgtcgtaaggattaattggatctaaatcccaattcgaatcttggtggcttgccctatccaagttggtctcatactgctcggcaatcccatagtacaagttagtgaaactaagttggatgaaaaaccttgggtaccaactatcaaacctatgggttatacagtctatgaggaaacggttccaagtataaaaattatatcgactatcttggaatgttactaacaaagtacgttcagcactaaacacagtaggtgaccatccacattgattacctcgggaggctccttagcttctcgaggggctattctctgaagatagtgtgcgcgagccacgtaatcctagctctcttcgtcagttggaactgggaccttctcccacgacaagtactttggaaacttgtaatcacaagtgtactcatctgaggcaaaaaggccaataatttttagattggcttcattcaagaggacgtctgccaatcgcagtctgaacggaagactcagtaggattttacggcgctcgaccatctcaggagtaggaattggtctcttaaaaaccgttgtaaacacaacaagcataataagtaagcaacctcaaaaatataaatcagaaaacaactcaaaactaagtttttgagacaaaggttacttacgtatgatgcgaaatgcggttgtgtcaattggagaaagaccagtcgtccaaaagaaatcctccttccaatcggtcttgtttggtaacctcacgatgatcctacgatatatgtgtttatttatcgtttt

SEQ ID NO: 27768 - DNA, 3153 bp, Cannabis sativa
aacataccaatcacgaagcattggtacattgctccaacaattttcaacccaaatggcatgactttgtaacagtaaagccccatatttattacgaagcttgtatgttcttgatctggaatatgcatcttaatctggttatatccagaatatgcatccatgagagtcattaattcatgtcttgtttttgcatccaccaattggtcaatccttagtagtggaaagcaatcttttaacatgctttatttaagtcagagaagtttgtgcatgtcctccatgttccatttggtttgggataagtaccagattggatattcacgaggataaaatgcttctcgtgtgaatttattggttaataacttatcaacctcttctttgagtgcattttgtctctcggggtccagtggtccctgtttttgacattttgccagatgattaggatcaatattaaggtgatggcatatcacattcaggtttatcctgaccatatcagaatggctccaagggaactgatcttagtttgtcttcaaaaaggtgattagttgctatttcagttcttcccccaaacttttcccaatattaacacatttaatgggattgtttgggtctaaactcacctcctccaactcctcacttggcctaagttggttactctcatcatggatcctagaattagcccttctatttttgagctctaccctgtagcattttcgtgctaacaatcggtcgcctctaacagttcctactccagcatgagtggagaaatttagagataaatgcttaattgagcttattttccccagtcctattaaggttgggcaacccatcaatacgttgtagacagaagggatattgaccactaaaaattcttgcatttgagtcgcggacaatggtggttcccccatggttaaaggaagttcaattatgcgcaattgcgacactgtcgcccgtgaatccacataagtttaccatacaaggtcttaatttttcttcctttaatcccatcttctacaatatttacttataataaatgttgacggaacttccattatccacgagaattctctttatccttttattcgtaagttgtactattatcaccaaaggatttgcatgtgggtatcatacatgtaatgcatcttcatcagaaaagacaatggccagttcatttgatttgaccattttcaaaggttttggagtgaatattgatgcctcattcttaacctcattaatgtaacttttatgtgcactattgttacctacgaggtgtggcactctagaaataactaagatatccttgcccttcacatggtgaggttgtattcttgggttatttgggttattgggatgattatgtttgtttccttgtgtcctcatgtattgcctcaaatattctcgtgagattaggctctcgatttcatctttcaactgacggaattcttcagttgtatgcgtaatgtctctatggaaacgatactacttatttaaatctcgcttgttcctcgcatgcctcattgggtctagtctacgaaatgcgacccaattttcattgaagaggtagatatttttgtgagtctcatttaattcagtatacacttaataaattggaacatatttttcatgtttttttttactttttcttatccttggatgagtctcttgattcatccgtcctcttggcatttaaaccatttagattttccattttagtaatcacgatgctcgatgttgctgtactagtggtggatttatctcctgagcctaactttaaaaacttgatttcattccatgcctcttcttttcatacaaaaatatgtgctctttcattgaactcgttgataattcgcacaggatgtccttgcaaatcatcacataattctcccctcgcagtagataagtcagtcgtaatctcaacctgaagggctttcaattgaatgttctcaatcaaatttctgactttggctgcagctgtactaaaacaacttaagtacgccttaagggattcttctggtttctgcttgacattagtcagtgaagatgcttttggtcgacgatctcttgcagcttggaactgctttttgaaatcttttgacaatctctcctatgaagttatagaatggttggtgaacttgttgaaccaactacttgttgcccctgttaatgaaatcgggaacaatatgcaccacaacttgttcaaaatgtttcttgctcgcattattgtattgaaattattcatgtggccgacaagattggtggtactatcatattgcaagacatgtggatttttaaatccttaaggaaattgtgagtttagaatatcaaggtggaatggttttgtctcttcatctgaatcatactctggtaatttttcatactctccatcctggtattttctaaacttgtctttcaactatattactcacaattttattggatccacatgttgttgatctgcattttgattgaggttgttatgcaaatctggcgcattacagtttaaatgctcacgtaggtttggctgccttcgatttaattgttcaccgaggtcaggttcacgacgtctcttgtcataattacttatggatctagtccttgagtaacttttagattgataactacgagagttacttatactttcttgactagtaaaataatgtcgtgtcctatccccatcttacatttgcctatgagtcctagttgacctatggtgcctgtgggatcttgactcccatgtacttgaactaatttcacgtgactcatcttgcattggccttcttctccaaaaaagatttgatacacgacttttactcaggtatgtgtgtgtatttactcaggttgatttctaggatttctctcatcatgatgagggattttctaatatcctggtcaagactaccttgcatttgcattcatgtgagatgattctggtatatcaggttgttcattcccctagtttgtaaatccatgggaagttcctagaacttcacgtcgatgctcctgatttcttgtattgttagtgttgggtaggttttctctatctattgggatatcttttgcattcctaggttgttcttcctgagtatttgtgggattcccttgattattttcttatctcctggtcctggagccttggggtcttcctcatggtcaccttgc

SEQ ID NO: 27769 - DNA, 1599 bp, Cannabis sativa
atttaacatgtgttatctccttaagtcagttgctgtatcaatcttttaagggtgtacggaaatgataataaaatgacaattgcttcctcaattgagaaagattatgttacatattttctgtatgaaatttagttttattcattttctcttattaaagatttgattagtaaatgttggactttggtagtgatcctataaagaagttataggttaaatggagttctttacaaactttctcagctcatcaatgatttcggttctttgtttattttcctttaagattattttgttgtttgatttaacatgttttgcaacaattcaggaagcttggttggcaacctaaagcgggtgagagccatttagattccatgttaagaggagaagttttgactgccctcgcaatgtatggacatgatttgacactcgatgaagcaagtaggcgtttccatgctttcttagacgacagaaatacaccactcctcccccctgatattagaaaggttgttaaaatcagaattaatatcagttcctagctactttaaacccttacttattatgttcattgttgactatggtatgcaggcagcatatgtgggtgtaatgcggagagttagcgattcgaacagatcagattacgaatcccttctgagagtctatagggagagcgatctgagccaggagaaaacacgcgttttaggtaattatgattcatttggtgcagtgacattaaacacacgactctcatttagtggcatatgatgatattatctattttcatctgtcttgtaggttccttggcatcttgtccagaccctaaaataattttggaagttctaaactttttgctgactgacgaggtataatatagactgaactccatttttaaggctaaagatctttgtgtaggggaagtggagtgtgttttgttttgaatatgattactgatctacattgtatttacctcaatttaatcaaggttcgcaatcaagatgttgttttcggccttgctgttggcatcgaaggacgcgaactagcttggtcatggcttaaggtaataaattaataatcacctttttgggtttacaattaattatattcatgttactaatgtgcataagttataccaaccattctagctactgaattgaaactaaaggaaagaaacaaaatcattgcagtggtgcacataatacctttgatttaatactaattttaagtttcaactttccatttaccataatccttgtttggcaaaatacagtaccttaaatctgaatttgaccaaatatattttcaattttcatgcctcctttatatatttgaccaaatacaaagtccaaggtactgttttattgatagagaagttagaattggtactgaaactctatatggtacccttttcttggaaagagataaataaatatataaattaaaatttaattatgcttctcacttttcatatcatcataagcatgtctccgttatataaatgtaggataattgggagcacatctcagaaacctggggttctggatttttacttactcgctttgtcagtgcaatcgtctcaccggtttgttcttctcactctctctctct

SEQ ID NO: 27770 - DNA, 2892 bp, Cannabis sativa
gattaaaagaggccacgtgtaaatagctttatatcaatgggttgagattagctcctatagagtttgttcctgcatgtgtagctatagatgagggtttgccagtagcattttggattcgagtgaattctaaatttaagcaatggatagattgtgacgaattgttacaccgattgactatataaattgatgacaaaagtcatagctactaaagtaatggggtgtacttcaactaaatccttgtggatatgtcattaaaaaattgtatggagctcacttgagtgctaagatgtatgacctggggactatgctacagaccacacgaaaatgatcaatcttaatggttaaataccttagatagaaaagatactgctcagatcaattggcacttgcaggagatccatatcctgaatcacatttagtggcaaaaatgtcctcaatggactttatgttgagtacatgaccattgtagatttcatagaggcacaaaacaacctcacactagtaaccttgcaagagctcaaagaactcttctgagttttgaaaaccaactcgaaaggatcgatggaaatgaaactacaactatgacttagaatccctcaagctctgcaccaccatctacagatcttgctcacaaatataatccaaaaaacaacaatagcaatgcaagcaagagaccaaattaccgctccataattcaagctacaaaggcagaggttttactccaagcacaacaaaaggaaataatggttgtggaggaagaggcagaggtggtagaagaaattcaaactccaacatgctaagtttgtcttaggtatagacactcatggacatattgatgagtgtacatttgtatactcattcctagtcatttattagatgaattcgtatttatttcttaaaattttgtataaatttgatgtgttttctctaagtgtgtaggtttgtgtttaaaagataattttatgataaacagagatgtttgagccaatttttttttttttacagtattttaatcattttcttgaagagcttatgatatctaaaatgatagagcttgctcccagctttttaatgttaaatcatctcatttggagtcttaatgcaaaaattatgcatgatttactaagcaaggttaaagtagtaaaagaatgacgaaaaatggcctctggcgctgtagcgccataagtgaggcgctacagctccgattatgggaaaaaatggtttttgaacgaaaataaaatcttggggaatattgcatggcgctatagcgcatgtctttggggctatagtgccgcccgtacaaattgatatctatcttatttttaaaacatcatctttttcattgtttcagtcctataaaaagaacattataacttcagcttttgggatgactagagagagacagaaagtaactttgagattaaagaacacattgatgagaaagagagaagaggttccaagcttaagcatcatcaacatttattggtctttttctttttcttctttattcttttgtttagttatttaattataaacatgattattgttgtgattatatttgtcattatgaactaaacactctttctagagtgttgatgaaactattttaaaacatgaattaaagtttttagattattctcatatttgttcttgctatttatttatgcaattttatgctaattatcatcttgttaatgcttgatcaccattaattagtatagatatttcaaccaatgttattcgaagaaactatatgaaacatgggagtgattcaaagacttattaagtctctgcccacaacataattatgagaacttgaatgcaagtcttaattttctacaatagttgaatggtctgacaaggactattattgatgccgttgttggaggagcattattggtgaaacctgcaactcaagccattcatttattggaggagatggccactaatatctataattggcctaacaaaaaaaaaaaaaaaaactctaagaaaggtggttggtgatcctacgaaaaatataacaatctaaaattctactttatctaatcaagtagttgcctttgttgctcaaaagaatacatctattatagataatgttgttgctgcactacatcacaaaggcctgacatgagtagcatagtatatggctaatacaccttataataataactattggggtgctccaatgcttaactactatcatctagagttgagaaatcatgagaacagttcttatggtaacactaaaaatgtcttgcaactgcctcctagatttaatacacaacaacaagaagagaataaacccttagaagacattctaagtactttcatcatataaatgatattttaaaattaaaattgataaataaaaataaatcatattaaaaataaagataaataatttacatttcttgttttttttttttttgaaaaaagattgatcttattctttttcatttatttctttcttttttctttctttctttcttgcctttacttttaagtttcttcttctagtagataccctagccacgcctctaatttcctttccccctaagccacaattttcaaacctcatgtgtccaccattaaaggttctagaggagatcccttggccggtgtcgggtggcccatctggtaccctagtacaattatgatggcagagataagaagatagagggaggatgaatatttgttaaaaactcatgctactcacgcgcgtagaggtacaacaccgtcgaacaagaagacaaaaagagggttcagatttctctaaagaccgacagcgtcaatgcacacacgcactttcacaggtcctctgaaggcttaaggtttgaacaatgttgtcatcaatttgtggaggagaaccacacacacacacacacacac

SEQ ID NO: 27771 - DNA, 3174 bp, Cannabis sativa
aatttaattaaatcaattttagataagatagatatagagatatagttcttacataaatggttggttagttgtgaaatctgaggtcggtgaggttgaaaggccataacccatcatttgcaaggaggacgcggagtcaatattaagaataccgttacttatatgatcatctgtttggaggtgatgaccaagagatttttgatcttgaaaaatgttattacaagagtgatcatcatgaattttagtctcatccccagacgaagaagatgaccttgtcatcttgatgtcaagcaaatcgtggctaataatattattcggccatccaaaacttcccatggaacaaggcaacgcggccgccgccgaaaacacgcttctcgatgggttccaccagttcccgccaccgcaaatccctccctgaatttgaaactcctccgccatagctaataattaactagctatgtatactacttatatgtcaacaataaacaaattcttatatatctatatatatagcttttgttggtagcaagtagtaagtagtgttggatccgtgagctgagcaaaggatgttgtgtttaattgtattgcttctctctactatatattttttgagtcacgtattatatatatagagagatatagatagagatagaatgagtatataagtttgggatttaaaaattatatatgaaggggttcgagtacggagagtgcaaacttcataacaagtatccggttgacaattctatggtgattataatttgacaaatgagaagagaagagagagatattatatattttaatataagacatgtatttggaatcgaattttctttgcctttcgtttttatttttttatttttactttttattattattgcatatttttttattggtttatcccttactttcctcttttatttttgtttttgtataaataattcatcccaatacatatttattatttatgcatttaatcttaattatttatatggtgaaattcttgtttgttctttatgagtaaaagtaaagcaatggtgataatgatggtgtgtgtatatttctaactatattatttgaaataaatgccacgtaagtgtggaagagcgaaatgtatactttttcttataatagtttatttagtggaaatttgaaatcagatcagacggttgaaattgtttgaagtagaaatttgtaaaggcaaggcattcatatatataaattgtaaaatgaggttttgtaaagcttttattataaggacccgttggggttgaagagttgatggtccttacaataatttgattgtagagattacgtttcctaattcccggatgccatactaagcgcgtgacggacacattattaacttctacaatctatagaaataataagagacctgcccttttgtaaggacatccatttaatatttaaaaaaaaaaattcctcattagttaatttctcttagaatatttaatggctctagttgggatactgctaattaataaaccagtagtatatatttaaatgttatgttttaatgcttaagatgattaaaaatgagagggtgggatatatattataagtgatgaattcctaatccgaaccccaccactgcaaagtcgtgtcgataccctagtaacatcacaattaaacaaacatttaactaccaattaaaaggtgttctttttctttaacttttatttttttccagctgaactatttatttaactagaccaagaaaaaagtagtcgaaaattaaactgagatcaaattttagaagtccttcacagagaaaaaagataattaatgacacatattttgtttcgggataaccttcttcttacacacttggcccataggcagggagcattggtatttgactagagtaatcctaacagcttctatattcttatctttaatatatatactattttttattttattttacaacatgcatatttttataatacactatacataacttttttttagaatacatcacttaaatcctaattttttaaaatatttcaaatatgtaatattaatatagacatatatttcatacaaaaaataattatttaaattcaaaataattaataaaatatatttagaacaataaataataaatgtttaaaaaaatttaaaacgaagaaagaatttagagcattctgatgtagtatatttttgatataatttttttaatatttttaaagtttttttattttagaaaaattgttgtaagtgctaaaattgtgtctaatattacacgaatatgatataattaattaataattttttatattatttattaaaaactaaactatgtctaatttaatattgaaatgcaccgtggacacacagcttcatagttattaacagtttaagagtgtttaactgtaggggaacaaaaatgaaaactttttcaagacgtatataattacttaagcaaaccgagaaaacaaccattttcattttgattgatgtttacatggatcaacctttcaaaccttgcatattattatataattaatggggcataacgcgtactgtggtgtacgcatatcgtatccgtatgtatactacaattaatatatactgtaaagagatcatattagtttattttactcttttaatcaaaatattgttaaatattatattcatttggatattttatacatataatataattttaaataattctatataaatactccttcttttcagatgagcaatattcgtttaaatatatataaatataaatatatatacacataaatattagagagggaaaacgaataaaaataaagtaggtttatcaaaaaaataatcacatatatatttatttaatatatatacactttaaattaatttgttttgttgggagggttctaggtgtacaagtgcctccgtcagtagtagtaattacttttaattaagataaatttacacaaattaaatgtcaaaactcacatatttttactttttaaagattttttttatatatttttactgactattatttttttaaaaggaaaataagattgttttcatgttaccataacattatattatatttttacaacgtttaaatattttttttttagaataatcaaaaaacaatagtccataaaaaagtatagaaaacagttataaaaaacattaatttttttttattat

SEQ ID NO: 27772 - DNA, 2402 bp, Cannabis sativa
gtaccttcaggaaagcagaagctacgttgggttcaagctgcagaaatgccaaaaagcattagaaaatgaacattatctgacttagattgccgcatttgctaacaagaaacagccagccttcaagaccttacgtgcagcttagttaaaaataccttatcagattcgttgatgtattctaaagcttggtcaagccgagagagaccaaggtggcagaggcccaaaactctatagcacttggctcgaagtgttctattctctatatcatacggaatgtaaagcattgatttttcaaacatttccgcactcgttacataatctttggaacgaaaattatccgcaccactgcgaaaacacattataaataattggaaatcatcaatcggcttaaaagcacttgtatgttaacatattaatcttcatcttatctttgttcacattcgactccaacactaaattaatatacttctttacattattcaaggagttccatgccaactaaactacaaggttagaacttagaaccaccctttgagccatttcaaagaattaacatagaaactcaccaattccatagcaccgcatgcatcgccgttctctgcttcgcagcttcttcacctgagaagagtgctatgaccctttcatctgacactagctctgaaaccacttttgccctcacctttgacccctcgccgctgcttccgtccttaccaaccactctatgagccaccctaacagccgcaccggcactgatgctgcacctacccattagtcccaagaacacttcctttgccgtctctgctccagctgttcccgcagcctgaaagtaagcctccacagaagatacccaaacgctctccggaatccccttattcaccaccattcccctcagctctttctctgcctcagcaaaccttcgcaaacccaaccacgccttcaaggcaagcacaggcaagctaggatgacggtcctcattgtcaccttctctcaacaccttcacacacttaataacactctcaaactcacccatctgtagatgaacagctgagatgaatcggagcgtcttcgatttcaattcctttagctcgagcatgcattctcgagttctcgctgcgtgtagtcccttctcatacaaatccagagcctcgttcataagcctcaaggcttcgttcaaagcaccggtttcattcttagatagcacgctctttccgaactccgagtactgattcgcaagagctttgtgatgctcaggcgatccgaacaacaatgtcttggcccgatttagcaacgcaatcgcaacatttcgatccgagacttcccatgcagttctagacctcgcgatactaagatccaacaatagctttctctctcctgcattcgttatcaaattggtatcaacctttgatacaatatccgtagctctctcaaaacaggtcgaagcaagttcgaaactccgaagatcatgccaaatgatgccggtcttgtggtaaaaggaagcggtcttaatctccggagaaggaacgcccacgactcctgaagcaatagagagaagatcagcggcgatatgacgaagtttggcatgctcttcttcgaggacggtccccgaagtggtggagcgaaagcgaattgaagcagcattgtaaagatcaacgcaagcgttccagaggcgaaagcttagtttccaaatccggagctttacggagttggggaaaggcgcggattgattcaactgatttaggaaacgtctgagatcgtcagatattgcgatcgacaatggcttctccggcgagagattctccgcttgattgattgaggcttcgatttgggaaagaacaatctgatgttgagataatgatggagatggagatggtgattcacagtgattttgccctaattcttgggtggatatctcatcgattctcatttcgtacggtttagcgggaaatcacaacagaaaatggagaagcgttttgaatgtgattaggctttatataacgtgttcgtccatggaaggaaagtaacaaatgcttaaacgacgtttctgattttgtcgttataacaaaagatattttcaaaagaaattacttcacaaatatacaaaaacaaacaaaaaaaaaataaaaaaattacaaaaatataatttcaaagaattttaaatatttttacaatttttttagttttatttacagaaaatacagtctttttatgttatacgttaatttgttgttaattttttattatttgtatgttattttaatgttatttaaatgttactttaatataaatttttttgttttcgtattgtttttattaaaaattataaaaatataaaaaaaattatttaaacgtaaaaatataaaacaaaacatatataaatttaattttggtttcaaagcttcaattat

SEQ ID NO: 27773 - DNA, 2045 bp, Cannabis sativa
  modified_base (27)..(30): a, c, t, g, unknown or other
  modified_base (972)..(985): a, c, t, g, unknown or other
  modified_base (1250)..(1254): a, c, t, g, unknown or other
acttttaaaaacaaaaaactgattaannnngtgttatcaaacgccaccttaataatctttttaatagtataaacaggatttgatattcttcagtataaactttgataatattttaacaaatgtaagaactatattctaaattagtagatatagatgaaaacatatagtatgggttactttaaaattttcttttaattaatcaaaacaaaaaagaaaattattgaatttgtgtcagctacaaatacaaaactttgagtacttatatcgtaatttactacaataattttatcaatttgcgacaaaccaaattcattgcaaataataacagtattagcggtgaaccctaaattctaccactaatagtctgtttttattttttaaaaaaataataattattagcggcaggggttcgccactattatatgccactaatagtatcagcagcgaactccaccgttaataatctgccgctaataagtaggcagaaaaattctccccctttcagtttgaatattattagcgggaggacattagtattggatcgatcgctaataataataaaaaataaaaacattaaatgcctattagcggcggaccccgccgctaatagttctataaataccccgacacactttccccattttcgcttcaacccttcttttcttctctcgaccatcttcttcttcagcacttctcaccaccacgcaccaccaccatgcaccaccgattatcactaccactgaataccaccaaaacacatttcatgtaagtaattttttttttgttttagatttcggatctgtaattttttatattttaaagatttttggtatatatattatttttaggttttaaatatatatagacaaagtgtatttatatatatcttagttttatatatatatacatatatagaatacttcttaatgagtattacccattgatgagtactaaacaaatttaactataaannnnnnnnnnnnnnatattaaaccattaaattttggtccaatagcgaataataaaaaagaaatttaaatttctatgcttaaattagctacttaattaaaaaaatatcaaaaaatacctctttttacactatatcaaaaatatgtttatatgaaaaatatttaagtcaaactcaactttttcttatcatttttttttgtcgaaaactttttttattatttttttttcagctgatggaacaaccccagcccatataatataaaaatgagaaatttttctannnnnataaaaaaattaatcataaaaactcaattttttctaatattaccaattcatgggtaatacccattaagagtgcacccatataagataaataaatatatggaagaggtttcaatggttacatcaaatatgtaaccatcatggttacatttatttttaaccattagatcattgttaaatagttgtgattaatttaaaaattaaaaaaaaaataaataaatagcttgtaacttgatacattatttccttataaaaacttaattaaacttaattatatttaaaattaaattactaacaattattaattaattttatgcaatttgttaataagtaaagatcttttagcaattattatttttaacttaaataattgaaataattgcaacaaaactccttataatttaaagttattacacacataaccttatttataaaaaatagtatgaatgacctctaattagaggtaattttacactcaatcttattttttaacacttttaagtgccaaattagtgtgtcagtccaagattaaatcaagtaatttattttttttttcttttaaaaaatgaaaaattaagttaaaaaatataataacaactataaaattaatgattgttaattattttcgctcctcgttgaaatcatcttcattaatctaaagattataaaaaaatatttcaaagtagattaccaatttataattaaaattgttgctactttttcacaaataagcgtaacagtaggaaaatagcaagcaaattattaaaaattaaggagaaatctaactgtagctg

SEQ ID NO: 27774 - DNA, 1162 bp, Cannabis sativa
ctcccatataactccatgcacccttagtggtatcattcctaaatgttctcactacaaagaaccttacaccatgaatgatttactctatcaaggtgaaccacctgctgtccctactgtttctaatactgtgcttgatcatgttccattgcatgctgaccgtgaccaaaatgttttaattgacaatacctttgtgcctaactctacaactaacaatctgcctccagaacagtgtttatttgttgatccaggtacaagttctgcagcatgtattgattcttctggtgtcagcactgatactgatctgtcccgaggccaaggtccttctttttctacatctcccagccctggcattccccacactcaggaggctgctgttcaaactggtgtgcctatcattccttcatcaacaacaactactcttcctactgtcatagcagataccagatctcctcctgcttgttcttcaccagcagctttgcctcttgttgctggttgtctaaatgctcctggtaaacacaatattcacaagatgacaacaaggtccaagcttggtatttacaaacccaaggcctttttaacttctcgagaaccagcctctctcaaagaagctcttcaacaggagcattggaataatgcaatgagtgatgaaatccttgctttggctaggaataagacatggattttggtgaaacttcctgaagggagacaagctataggttgcaaatgggtatataagatcaaagagaacccagatggtagtgttttcaagcacaaggcacggcttgttgcaaaaggttttcaccaacaagctgggtttgacttcactgaaacttttagtccagtggtcaaaccagtcacaatacgagttgttctcactctagccttgtctcatggatggaacataaggcaacttgatgtcaataatgcctttctcaatggagaattgcaagaagaagtttatatgcaacaaccccccggttttgagattcctggccaagagcaccttgtttgcaagttgaacaaagccctttatggacttaaacaagctcctcgagcttggtttgataagttgcatcaatgtctgctgtcatttggttttgtttcatccaaatccgatcattccttattcattaatcattctgaaacatcaacaacacttgtg

SEQ ID NO: 27775 - DNA, 1845 bp, Cannabis sativa
taatatattatcaatttttttaatctaattcaaaatgaagccacatatgatatgtaaaattattaaaacaagaagtgaaattaatactctaatcaataaaacaaactaatggaaagtattaaaatgtagatcaagaagaattattggtgaaaatctcatttgtcgtcagagagaaatatttcatggagattgaatattagtattggtggccataacttctaacaatcaagttactcgacaaaataaattgaagcatagagataatagagattaaatgattattattgaaaagatcgagcctttggatggaaccagcaggtcgggcaagatgtcgagaccgtatataaaactcaaaacacagtaggactaaattagttaccttagaaaactcacatcccgcaaaatttatgtccaagaaaggtattttgttgttggtgttctagttatggataatggagggtctttaagaatgtacttgaatgaaagtaacaaaatgagggaacaattcaaccaatttagagggtgtttgtcatccgtacggattcgtactgtctgatgttgatagctgaacttgcactgtcgatcatgaatagtaggtgagtagtggacgttggacaaaaggtaatttgcttttttagttgtgcgcctttcttaagacagacatagtgaacaaaacccttattcttcaggatttggtgtcagaagcaatcgagccacgccaaatggtaccggacggtcaacgctccacaacaccctttcgattactctttcgggatgacccgtattgagggcatcccactatattcttttgagcattcatttatttgagaaagtaccattattcatgttatatcaatttttcaaacaataaaagagcatttctaattacatgacacgtatccaacaaaggataataaatttacttagttgatgagaaaattgagacataatgacctcctcgaaatgtgaaggtcatatattgtctcctaagggtaaatgttatgggcaatattggatttaagaagattatggtacatacacgatagacacctcgagaaccaaatatccaattgagggtgctaaacttgtgaagacattcagaggcattcctagtgccgatattttttatgttgagatgcttaagttgcttaagcttggttctgtttatcacctcagaaaaatataattaaagtcaagatgtttactaaggagcataccacccgaaacacacattcgggtattagtgaatttatgaaggactacacttcaacaatcaagtgtctcgtcgataacatgccacaaaacacaaagatcaagtcaaaaataacaattgtttttatttttgaatagaaagcggttgcatgctattttccacctatttaactaaatgaaacgtgaggaatatccacgtttcataaatattatgtaaataagatcaaaaataattgctatcctaatcttaaatagtagtgaaaatgctgtagaaggcacgacataatttatgaattaaaaaaactctgtcaaattgtaatatcaacccaaaaatactcagaaataatatagacttgtgaagtatgtagattttaattacaaaataacataaaaatatttgttttcttcattgttatttacagctaaatatatataatttatcacataattaatttcaagcattaattataaaagtcttattaatgttaacgaaattctgagttaatacttttggatctcagaagttcgacttcgtaatggtagagtaatagttaaatctggagccacattccaactgtgctcgcgatggactccaaatcccattttgaatgttcacgattgggctgtcaatcc

SEQ ID NO: 27776 - DNA, 3633 bp, Cannabis sativa
  modified_base (844)..(853): a, c, t, g, unknown or other
  modified_base (1018)..(1021): a, c, t, g, unknown or other
atactcatgaggtgtgtactacctcagtatgtgtcctggtaattatgcccttgggacgagggactttagtttccccatgttgatcccattttgtagttggatgtggggaccaacagccttggttgcatattaactttggtgatgtctttatttgatactcatagtcgagtggggtctgaatgggtatggacggtttttgagtacatgggatgtcttttggaatttgggcatgtggtctaacacccatgcttgattaagaatgggacatggtatcaaaggcaggtgaggacaagaccatagatgacatcctcgaggtatgtccaccttgggtcgtaaactctaggagtacgcccatcttgggtatatctgccctgggtcgcataccctaggagtacgctagccttgagtatgttcgccctaggttgtatagttaaggagtacgcttaccttgggtatgttcaccctgagtaatttggagttgttttctttagcttttgactatgttaagcatctacttcttgtaggaggtgactttctatcttcctcaaaaatttgttctccttcaactttgggccatcatactttccacgtctaattatgggtgaacaataaatcattattcaaaaagtgtcatgtagtaattaaattgacttaaatttttctaaatgctcatatatatttatatgatttggtcaaaagagaaagactaatgctttttaattataggctaattagtaatttttcccctttaactttgacatgtagtaattcgtgcccctaaatttttttggccgttaaaaattcccctcgaaatattgggattgttaaatttaaggatttttgnnnnnnnnnnttcaattttactgtttcagtaattgtttaggtactaaaccatgctccacagactttgatatctaccaaatcatgtctctcaaattttgatatgtacaaaatcatgccccttgaactttcatccatattagaattttttattaaaattagacaaaaatccttaaannnnacaatctcaatagttcgaggggaatttttaacggccaaaaaaattcaggggcacgatttagtacttgtcaaagttcagaggaaaaattactaattagccttaattatattgtaggcttgtagccaagctcgaagcagctgaaaaattcttaactttatcatattttgtttgggacttgaaaaaaaatgaatcatacaaaaataactcctacttatcaaaaaaaaaaaaaaaaaatagctctatataatagataacgactctattttattttttttaagttattttaactaaaaaaaatagagaagaatactagagagatgctgactatgtataatattggtagtcagtgggaaatagccatttactttgggagctttcacctttcagcgtctaaacatatgggtttgccggttttgcattgacacattccttctaatctctgcttattttaaattaaggttttcttcttcttcttctttcttttcttttctttatacatattgattatatatctttggcgtaaatatgtctgcagtaaaccttgtctagtttacttttcttagtcccttgtaatcataatggaactaaaacaaattgattatcaacgtcattcttcccttaacctcagttacattgataaactcgacgaatatagctttgaggcttttccttcttttcaaatagaggaccctttattcgtggcagatgttatcaaagatggagttgtagcttatacccatgagtccatggatagattggtccaaattgaagctggtctaatggaaatcgacacaatcaaccaggatatcgatgtattgggccttgatagtcatatagaaaatgaattcggctcctatttggataaaaaagtagaggaaattgcacctgtagttttgaataaagaaggctccacttttgaagacagtcaagtagaaatcagggaggagagtagcttgggtgatctcttactgaacggagcagaagctattgaagtgaaaaattggcttcttgctacaaaaataatatccaggcttaattgtgttttacttgatagacaacatggagatacctcatttggcaggttagctatgttttttactcaaggcctgcataaaaagtgttacaagactcctgatcatatggctctttatagtcatcaacctgattttgagcagagtaatagtcagtactctgcctttcagatcatccaagaactttctccttatgtaaagttctcgcatttcacagcaaaccaagccatcatcgagtccactcaaggcgacaaggatgttcatgtcattgattttgacattatggaagggatccaatggccacctttgatggttgaccttggtaagaggcaagaggcttctcttagagtaactgccattatatgggataaacaaaatgcagtttttgtgcaacaaacaggtagaagacttaaggagtttgctgattcgatcaacttaaggtttgtgtttgatcagttggaaatttcaagtgagaaagattttgataaacttgaagttggtcaaactctcatagggaactgcatgatccaccagcttcacctgccaagtaaaagtttttcattggtgaagtcattcttggtttggatgaccaaattatcacccaagattcttgttcttgtgcaagaggagttgtttaacttttccaaaattctatctatgtcctttgttgaattcttctgtgaggctctccaccattacactgctttgtctgactcacttctgcttagtcctaatggtggacataaaaagggattgagaagattgatagaaaatgatattttgggaataaggattttggatagtttgagtcaattcccatgtgagaaggaggagaaaatgttgtggaaagatgggttagactgcttaaaaggattcaagccaattccaataagttataataacatttcccaagccaagttcctggtgagcttattcagtggagggtattgggttcagcatgagaaatgcaagttgaacttgtgctggaagtcaaaacctttgactacagcttccatttgggtgccaataagaaaataatgtaattatgtaagcaaagtcaactctactctctctctctctctcttcgaatatatgaagcagtgtgtggtaggttttcagtgcgtcattacattttaaataaggtagttaaggcttctatattgtgtttatatcttcatatatttttgtcgatgtagaagtgtatatgccatcattttgataaaatgattcttcttgttctatttctacttgtcatttgatttcagtaagattcaagtgttctgagatacgctaataaataatatcccccaaattatatctacattaatatcataatgattcatgaatatagttggtactaccaaagtgaaaatcgaaagagcaaggcatcataaaggatactgctaaaaactcgtcttaaggtctctgatgatatatatttgacatgtagtttaccagtgattagtaaatggagcagtatcaactatagtacttataattgtcccaatctacctatatatgtagttttgactgagtcacttatgatgtataaggcatcataattagtaaaatacaattaga

SEQ ID NO: 27777 - DNA, 3557 bp, Cannabis sativa
gaattaaaaatgaattattaaagtataaatacaaatactttccactaatcaaatgataccaaataaaaaaaaaaatagtagacattagaactataatttaactcaatgaattaacaaattaaaactatttaaaaaaaaaaaatattacttctccaaatattttcagcatatatatatataattttttttatataattttttgtttgtgattattaatggatagtgtactggtattgataagccagcacacaaaagccagctaataaaatatatatgaaataaataaataaataaataaataaaaacaaaagaagattattgttggttattcttgagcatatgcttttctgcaaatataatgtgaaacaaaagttgggccacatggaatgtcaattttatttatttatatatattttaattaatattatgattattattatatttatttatatataaagttatatatatttacactctcactcaactcaactagcactattttttttcttctttatttctattattgattattgatttgcatgagttatattacctataccacatggcacaaggattcccttactttattaatcctcacattatattgtaatttactctatttttttatgcaattaaaagaaacaaatttttattttatttaaacttattaataaatttatctacattacatatcatcattcatcattgtagaaaaggaaaaaaagtttttggttttttaaacaatcaacatcaaattaccattgaaatataaagtctgaaaatatagatcaattttttgttctttagccatatatgtagtattaatttgtacctcaaaatttccactaatttaattgaattcaaactcttatatacatctcttataaaaaaatatatatatatatatataaatatacaaaaatagaaattttaattgtattattaataatttagtgttgcattagaagaaactaaatcaaaattaggcaaaaaaagagctcaattaatagaaagaggttgaagttaaaatattgaaaattactaattttaattcaaatacttttatttccttatttatatatatagtttttttaatttatctcctaagtatttatttaaatatatatatatatatattaaattttattgtgtcatcacacactataataacagcaggtgttaataataataataatagttaaaaaaaaactaaaaatattaaatttatatatattattaatattttaggaatattttttatttatttttatatgggatgtatagtattttaattaaataatattaaaaatgaaaaagaaaagatctcaattgaattttatatatcttttattatcagtaaataaaagactaaaaatattaaatttaatacgtaaattaataaatattttaaaaattattatattatattttaacaattcaatgtgtaattttaggcacaatccaataatactacaagctaaaattctttcccaatgtaaaaaaaaaaaaaaaaaatccatcaaaatgttatgtcataaacattaattgctatatgttaaaaattaagtgtatgagtattatatatatatatatatatagagatatattattgtttatacctagaagaaaaaaatagaggtgtaataagataacaaacactcagtatggtcggttgccctaataacaatacattagctaatactgttttctcattcaggatagcccattaaataatttagtatttataggtaaaaatatatatatatatatattataaatattaaataatgcttggtatatgtaattattataggaaatttcaggttgttctagtaaattttttatctcatttaatatttagtatttatgagagtttttgttgtgatgtccttgtttcgaagcgtatgttattttagctgttttttagattgacgattgatcttacagaccactacaaatatttccggcgtgttctttcgaggtggactactaaaaaaataagatgtactttattggtggtagtatcaatcaatccatttaagccctcttcaattatgtagtcttatacctacagagtctcaaaatcatcacacttgacattttccaggcagtgtgaaattgtacagcttacggatatttctccttacggatcacaaagccactaactgtcacatttttagtctaattttttctttttcatttgattgcatacgttgtagctatttaagaccactagtaaattttcagaaacttctgaatattttacagtgccaaaaataaaatttgaacaattatttagcatgtaatgaaatatgtaaattttatttttaaaattataaactatttgaaattttctaaaaatttatagatgatcctaaatatgtataacatatacaattatatataaaaaaataattgaattattttttttaaatgccaaaataaataaaaaatctaccaaaatatccaattttggaaatttactctagactttaccattactatatattattattaataaaataaaaaagctgtgaacttaactaataataacattatactaacttgtactactaattaaagctgttgtgaatcagcattacctttatgtaattagaagttaaagtttatatatatatattatgattggtaatgtacttaattactatacatatcttaatatatatgacaatattgtaaaaaaagctatcagacaaaagtatataaaagattttgtatatttcatcaattattatgtaataatcatacataaaaaaaatttgttaattaaaagaaaaaaaaagttggtgtttataatattcagggttagttggttcatggttcaccaatttatcatatatatatatttatttaagacaacactcaaaattaaataaactaaaacactatctagctagtgttattataggtaccacttggaaaattatagatgtgtggctgcttcttttatttatttaatttctttttatatatttttaatatccaatttattataattctattttttatatataaaagtgtaaatcaaagatatttaggagattttatgaaattttaaaaaaatcagaatggtgttcaaacaatatgctgttataagtgttttatttatatatatatatatatataattatttggagtttttaaaaatttataactcattatattgttatataaaaaattaaaacaatatatcaatgcacttttttattggttaattagtatatttattcttgaaagtttgacatataaattatgcttcttaattttttaaaatttttctaatcgttaaaaattcgctttaaattattgagattgttgaattttagaatttttatctaattttagtaagaaaagtctaacataagcatgatgatttgatacatgttaaagtttgagagacataattttaaaaaatatcaaaatttagggagtataatttaatacatacacaatctttgaaatagtaaaactgaatgaaatttgacaaaagtccttaaatccaacaattttaatagttcagggggcatgatttggta

SEQ ID NO: 27778 - DNA, 5967 bp, Cannabis sativa
tattccttacctttacccttttaaaaacaaacataaataaaattttccttttaatacccattattccttaaatattcaaaatattatatactaattctttaatgtatttcttaaaagtattacttatttttagactaaaacatgtcaaaatccttaatcagtcaaattgtttattattttatttatagcgtaaaacatggtatctgtaatctttattcaacctaaattaaaccaaaattgtattaatatccttaaacatggtatctataatctttattcaacctatattacaaacaatttgaatcaacttcatttcaatataacaatattagttgatgcaataaaaatcttccctttattatcttcatgtagatttttttttctttttctttaatcttttttgttggctaatggacatccctaaaagacagttaaaaggcctattacgatatatagttggtagttgttgggtgtgtggaagccattgaaatctactagtggattagatttttttatataaatataatagatatttatatgccttttttaacaaaaaagatatatatcttatttattatgagacaaataatttaccaaaatagtttgaaaagtaatagagataagcacccactatagccacgatctgaacaaacgacaattgccaactaattgactgttctgttcgcagattgtttaataaaagcataaatattaatgtacgacaatcaaaaataactaaactaataggagacaataaaggagtcgaactatcataacatcaatgatgcttttacaatccaactgaacaacgacttgatctaggccccgttctttggtccagctcaaagtttccttcaatctaattgtctccaccaaaagaggagagatacggtcatgcaattatttagaccaatgataaaggacagttctatgatgatcacatgccaatcctccaatctcaaaataaaaagccccgaaagtgaaagaggcatctacattgactttaatcatatcaatactgagaaccaaccagtactgctccacacgaacacaaagactgaaatctattgtgtttgcataattttgtaagcaatcttctattgattaaagtaagacaacgcaacagccaccaccccatttgcaacagaatttttattttttcaaacaagcctgtttcttgctttccaaagagaccaacaaattatcgcaacatgacaaactaaagtcttcgaaaatcctatgacgaattgataaaaccatcctgaaaaatcagtggccgaaaagatgcaaatagtcccatcatcccattgccaacaagctttggctaaagaacacttaaccaaaatgtggaggattgattcattcataccttgacacaccgggcaaatgacgaccacatcaacatgcctaccttttaactgggtcagtgttggtaaacacccagaacaggcctccaaagtgactctttaaccttagaaggaatttgagttgccataatgccctctaaaggcccaaattattatcttccaaccatctaccatggcacacttggagaagcttgtaagcactcttcactaaataaacagtgaagtctctataaaccaataccaatgatccgacccaagattatcattcaacacaatacacaagattatatgcccttttttgaatggaaatatggtaattttatttaaatagaatcaaccattacaatgtttgataactccaaaagagagttattatgattaaaagtgtaaactggcaagtaacaagcactacgcgcaacaaaatggggagccttgttagcagaatgtttaacaaactttaaagaaatattacccaactcagccatagtttcttacagtcccaagcaactgtcccgaatgcagatgacatttgtatatcactgctgatgccttgtactgccaccaaataatctgtttcaaccaacacactatgctaggattcgccttttatccagctaagggcttccttaataccacaaatctcatcaatctcaagagagacatggtcgattctgcactttgagacaccttcaaggattcttgctccacagtctctagctatgaaaccaaccccaaaagagtcaattgctgcaaatatagctcaccgtgttaatgacaggtttagtccaatgctcaatatttaatccttgatcatttttaacaagaataggttccccacgattatggtttaaatgaaaattttttttaacccaacacgttatataggtggcgccccacgaatggttagcaatattctgtaaaatttattttcttaagatatatgagactcgatacttaatttcactaagcggtatgtcactgaagagggtgtcttttaacaattctcttttttgaattcattttatttcattgtatttttgggttaaaatgtatgagttattgatataggattaaaatgtaattgattgactatctattgaattctaattttttctttagaccatctattgaaaatgatttaacattattgaaagaatatatgatatagttaatcctataaagttctatatttaacaagtctaatttcattatcaattaattaattagtttttgctctatattttattttatttaggaaattttttttagaaaacacaaccaattaattcaaacaaaaatacttaaaaagagagagacgaaggagcactcttgccaatgaacatcttatctgatatctcacttatcaaaaataaaaatattaacatataccttagaatgttaaacactacaaaacgtgatatataaatgtctagcatattgaaaattaaaagaataagatggattagagtagactaaaccattaagtgccgccaccactacatccaccaccgccatgacatagtgactatggaaagagttgccatagtagtgatgtaatcattattagaagaccactactctctcttgattagtaattacagctggtctcgattgcactgaattattactcatactatctattagtactagctagtgttagtattcaagttattcttctttctttctttcttcttctcttccttttggctccaaacacaacccataatgccttcacttttcttaaatattgtgctaagaagaaaaataaaaatcttcacatttttataatttccaatatttcctatattattaattttattgagtataatacgtttattaatatatatatatatatttatatatataaaatccatcatcgtgcaagatatttttgatatatatatattgaatataatgagctaaattagcaacaaacttaccaagaataccgatctcatttatagataatcgagaaataaattaattaaatgattttttaaataatgaaatgatttataatgtttttataatcaaaataaaagaattttaataaataaataaatttaatcccaaacgaataaatagattaaaaaggaaaatagaatattaatagctgtattaatatatatacatatatattagccttttaatataaattaatatattatacaatcatcattaggattatagtgaagtctgaaaatttaaccatttttaccgaagaagcaaacaaattaatagggaagaaagaatctaaaataaaattataaccaaccatgctagtagtacgcgtacgtacgtactagaggttaactagtttcactattaataattgttctttattattaatatatttatctttatttcatcattaatattaactcattattttttttaatagaaaaataattattcactaaacaaacttaaaccttggccgggtgtacatggagaaaacattgaaacaaccatactaattatgtaaaaaggctcattttgattaccacattataaatcaaaaagtaaaaaattcttttacaatgactaaaataataaacgtcaaactattaaaagagtttataattaacccaaggacacagttattgagattagtagtggcagtttgttaattataacatgcaaacgtgtgtatatattatggtacaatttcattataaattgttatgatgatgatgatcatcatataatggatcaatatacctatttccatcccacatattttaatataataaataatataaaatagttactaaaaataatttgcagtataagtatcacttagtgaaagaggtccatgaaaaacacctaaaatgagttattttttttactcattatataaatatatattattttctcagtattatatatatatttgttagaggtggctatttttacctacaccggatggagtttctatatatggtggtcgtaatattaataaggtaagatcgatatatagatcgtagactaccagtaccaactaggcgagcaataatcctaataagttatgtcatttgatgttatatatatatggaaattaaaatgaattacaaattacttatatattggagaaatattaacgtcgttccaattaatataatcactaccattagggattttggggatgtgttggaaggacttatagctcttgatcatggaatataccataattaattaaccatataatataaagttatataatttcccaaccaattttcatgcatatatataataaatctcatttcataaacatgtctaattaattaaccattaaaagttgttactgtatagcaaaatttttaccatattcaaaattaaaacaataaaatagactagccaccaccacagccaccgccacagacacagccacagccaacgccacagccaccgccccaacaaaaaccgccacaaccacagccacagccaccgccaatggcatcgacacaagtgatattatttgccgtggagactacagagacagctgccatagtagtgatgaaatcattattattagtatttttgttattcttgtttccttttttctccttcttttctttgctttggctccaaacacaacccataatgcccaaacacactctctctctcactcctcttcaatattctgttatactttcaattttacaacatccattttctatattataaattttctttagttataaatatacgtttattaatatataaatataatcatgtaagaattttttattttttttttttgaattgatgagctaaactatagcaacaatcttactaacgatatctcaacttactataattaatcgggaataatttttttttattaatgaaatgatttactaataatatggtgatattatattgatattttttttttgataaaataacaccataatttgatctgattactaaaattctatcataaaattataacttgtaggtgaattatattgttatgctaaacaaaacttcttcaatctgaaaaaaaaaaagatacaattaatttataacatatttactaataaataatgacaattaattgtaaagactcattctcttacatttgtttatttaatttattaaatttagaaaatagagaccttgattaattaaggaagaaaagaaaaagagaacttctcttccatgaataatgccattaagggtatgaattttatttattttttaatattaaatttataataacaattttatcctttaaagtatatcttacaaaataattatcatatactatagttttactcaaaaagataatttactcaatgtaagcattccgattatattcctgataaagtaaataagataaatcgctatcattccatttctaagcagttttagtaaacaacacattacaatattgatttcgattattttttatttattccgttacatttctccattactttattccgattctgaatactgtgtaatgtcctttcaaaaaaaaaaaaaaatactgtgtaataaacgtgtcattaggttttacacacctttgttttggtttgtatctatccatgcctaaagcggctcatgggtgggataataggaaacctttgttata

SEQ ID NO: 27779 - DNA, 2796 bp, Cannabis sativa
gtgaacaacttgaataggagctgaagcgattatgaaaaattagttcctctttgttgttatttttttaattataaagatattgtgacatactaagtcgatcatggttggtttgattttcattccaatgatcaacgaaaagaattaatcccagaacattgcattatctcttttcttttctttttgtttggatctatcaccaaaaatcattacaagaacagaatcctttcctaaaatgatgaaatctattggcatccctcacaacaagttcacgctcaaagaattttgatactagttttctgaaagtatgacaatcactacaaacacgaagactctttataattctaataggagttccattgggagtactaatcaaaccatatgcaatagctagtctttcactatgtccatgaagaatctcaactttctcttcttcctactaacttggtttgagccacataacctgattccctttgcaaagtcttaatctaattttctgtgtatcttaacagactctggatgtgacttcaatccaattacatcaggatttttcttcaacccacttcctttcattctcattctcaattcatgtacatctttccactttccattggctgtaagaacattagatattagcacatattttcctggattcgtggggtccaattctaagagcttcatggctgaaatttctcctaattctttgttggagtaaaccctgcaagccctgagtagagcacaccacacctcggcagaaggtttaccttcaatgctatttacaaactcgtaggccgcttccaagtggttggcacggcaaagaagatcgacaaagcaagcataatgctctggccatggctctaaatgataatcccttctcatggaatcaaaatatcttcaaccttcttcgataaaacccgaatgactacatgcgtgtagaagtgccagaaaggtgatatgttcttgccatgaccatacattccatatgcattaatcatggtagtccatatacatctctactaatgggcgagaaacatgcccctctgggaaaaaatcctttttaacaaagaagccatggatttcttttcctttatttaaggcagacaaactagctgctgctgaaagtatgctcgctagtgctatcgtatcaagtgccatattggttcatttcatcacgtctagaagttcaaatgcctcatttgcaagcccattatgaacataacaagatagcatgcttgtccaagacacgatatctttagattctatcagttcaaacattcgattcgcatactttatgtagccacactctccatatacattgacaattgcattttaaagcacttgatcatacaatccccttctcataatataaccatgagtttcttttaccaagtatttttcaaccctttacatgccagcaaaatactttcaatcatcattgaatctataaccactccttccgtttgttctttcttgctcaattctaagaccctcacgtgaaaattgttctgaccataaccaacaatgattgtcgtccatgaaattaaatccttgacaaccatcctatcaaaagcgcagcccatgaagttcaaacaacaacacttagcatacatatctacaagtgtgtttccaatgtgtaaattagaatctaatccctcttttactgcataagcatgagcttcctttccgtacaataagtttcctaatcgaccagtttgtccaaagaccaatatgctcttaaggcccatatttcacatataacacaattaggggcaactcaataatttcaaatatacataaatattcacatattccatatatattatgttataacataatcacataataaaataattttggacctcgaacttggtctgagctaaaatatctggttgtaactataccgtgcctacttgtcaaaaatcacatgtggtaagacaatataaacatattgtacaataatatagttcactcgcataataaatatcaaaattataattttacccttctcaagtcaaaattacgagaatacccctaactcataaatggggtcatgcaataaatctcaaataacttcgtataattaattatataataatataattactcaattacaattaattcattttaattagggttgttaatcaatgtactaattctcgggataacacacgctcagtattagtttacttctttttcttagttaattttcttatgggtttctaaattcttttattattaaggtggacaataaaacttagtgtatttaattaaatatatttttattttgattctcaatataatatatgcttataatttttgcttctttaaataatttctttcatctttagtattatgtattttttatagttaaaacttattaatgcttggttttatattttattaaaaataatattctttgatttaatgtatttacattaaattgtttcacatttaatgcttagaagttataattttaaagtgaaagaaaatctatttttattaaaaaataattagtttgattactaattataatatgagaatcaatataatcataaataattttatttacacttagatggattctgaaatattaacaatttctccaaataccgttaaaaatatttgttacttgttatttatactgttaaacactttattttattttgttattaaaagcctcaccattttcgggattaggttagaattttaataatttagattaataagtattttctttgatctcacgcaattcacatgggtttgatctcgttcttcacaaactctacactacaataaaga

SEQ ID NO: 27780 - DNA, 1992 bp, Cannabis sativa
ctcagccaaaaccaagtctctcttttgcaagatctggataacgcgttgacaatctgattcaacctctacgttgttaaaaccaaggcgcgaacagagtaggccatgaacaattgtcatagcttcttccactggcgaggaaagggatcccctagctggaacagttgtagaagccaaacaattgccccactaatccctcaccacagccccataccccatgtgtcgatcagtacctcgaagtcccacatcaacatttagtttcaatttactactatcaggcggcacccaatgaggaacaatcgggcatggaataggtgggaagagacacgcaatagaatgacacttctttgcattggccgcctgaaaatttttagtgtactcaaaagcccactccagaacccctttagtgtcaatcaatctcttattatgaacccattgatttctacgaaactaatttctccaaagtaggactaataaaaactccatctcaactttagtaaaaatcacctcaagtttatgaagcaaagtataaagattggtgggggtatagaggaaggattactcacaaactgaactttattagtaatatcacgaagacccgagcatccccaaagggcatgaaaagaagacgtactcctcctctaaatgacacacaagacaccataaagcaatgggaaccttatgcatagcgaagttacattttgttgggaaccaatctaaacaagccttccatataaacactttaatcttcagagggatggtgagactccaaatgtatttccaccaagaacatggctcggaataagagtcaaattgaccccttcacaaaagtctaatagcattctaataaccacttttcacagtatactcacctgaggagttatagtgccaaatgagatgatcctgagaatagtgactctgaggaatggataaaatctgcctagcttaatcattagagaataagtcatcaaacaactgacccttccactttccattctcatgatgagatcactaaccaaggtgatcataggatggccaccaaaagaataagcaagagaagcaaactctttaggaatccatacctaagattttatgctaacatttataccataatctatgagccaacaagttccatcttctaaaagttcacgaccccaaatggtacttttccaaatgtacgaagcttttgaagtttcaactgcattgagaaaatccaaattagaaaaataaattcctttcatcacttttgctgccacggaatttggaacagaataaagcctccacgcctgcttagccaaaagagctttattaaacacaaataaatcgcagaaacccatcccaccatcgaacttgtgccaacataatctctgccaggtacaccaatgcatcttctaattatcatcatccccaccccaccagaaacgagcacaaagtcggtgaagttcctaaactaatttcacaggaagatgaaaaaggttcacggaataattagggatggcttgaatgacagacttgagaagtacctatcttccaccagtaaagaaagatttagatttccaaccaaagaacttattccaattctgtcacgaattgattggaataaactagacttactgtgacttgcaaaacaaggaagtcccaaatactttccatgataaggaatatgataaaccctagcaaagctgccaagtgattttccatacctcgagagacacccaaagaaaagcaaacagaagacttggaaagattgaccaactgccctgaagcacgttcataccaacccataatttctctgaatctagcactagaagcttcgaggaagaagaaactatcatcagcaaataacaagtgagaaactatcaggccccatctcccataaggcaacccatgaagcctacccaaattaattattttttatattagctgaaagtccgaagagatgtaggaaatattttactaggatctagatttactaccatgtatgttttattaaca

SEQ ID NO: 27781 - DNA, 1953 bp, Cannabis sativa
aaaatcaatgatagatcttttttgtcacaaaggcaataaaaaacacaatcctatcttaatatttttttgtactctttttttggatattaaatggtagaacattattattaagctcctaaaagtgtccaaatctatattatatgtatatagatgttaacgccaatttttattacgagcctaggttttataaatatattttaaaaaatcaatagtaataataattagtatatagtctaccagtctattatattaccagaattttacaagtttgattcttgatttttttaccctttatgaatatgagaattctttccctatttataagtgcttgaggtgataattattctattctgatcttattttttttgatctttcattacacgtggacaattctcgcgtttcatattataacacatggaataaataaataattgtcttttgtcattacccaaaacgattgtgctgctgactaagtttctatgtctcccaacatatattgataactgtttattgtgcttattttgaaggcagcttctttgttgaggtattacgtctaagatgctcctcgcactcttccgtaatgttagtactgactaagtgtattttactttttatgaatattttgaggtaaattgacttttgctcatatatcttagtctttcaatatacttacgggtatgtgggttaatgagttacaagctcttaaagactcattatctacctttcctaaccgacttgttgcttcatagtttactcttgtcttgtttatcctttactttgtgtatcccgagatgaattttttctgctaattgttcatctcactggtcttactaattagtaattgttcttgttgaaagaatttagacaactacaaaaaagggctagtattcgagtaaagcaaaaacattcacccatagctatgcgagtattcaactagaatagtgagtactcaaagtttaggctacagaatagactaaaactagagcagaaatataaaggagacaatataattatagtggttcattcagagcttagtctacttagtctacttttggtaatatttgcagcttagtttattagatttggttcatccctttatatagaatgcaggtgttcgttgggattacacaactggtcagacgtgactgttattacaataattacacaatttaatgaatagaaatattagagaataaatgtaagaacagtttcgtcagttcttgtcttaactgcagcaacgtgtgcgacttattaatttatagtttgttcggtcatatttaaacgcacgagctcacaggctctatggtgctatactcgcataatagtccttcggacctattcagtttaattcatgaatgtgtgtgaccactattgatcgtgtatttagacattttatgtgttggtttgtaagcagcataaacttaattatttttttagcaacataagtactcaatgtttattaaactgtaatttttctccatccgctttgaatttattaaaagaaaatttgtaagtaactaatacaacatattttcatcgagaccaataatctagaatctaagtcttctctcgatttaaatgtaagaaatatcaaacgtcatttaatgggattttgatttttgaaaggggtgtctacacttttggtacaatgtgttttatctaaatataggtttggtaccctgtatttttaataatgcttaacatttcaaaatcattcatatttggtaccctaaactcaaatttatttgataaaattttatcaatacaatcaaattatcttcaattttataaaaactgaaaacaaatttaattattttattacatataactgagaatcgtttggtcaaattggttaaattttattttagagtactagatatgtacaattttaaaataaaagataccaaataaatattattaaacacataatactaaatataatttccaaaaaaa

SEQ ID NO: 27782 - DNA, 1734 bp, Cannabis sativa
gagagagagagagagagcttactctaatggtgtagacattgtaagaggctgtgaagacagatgaatagagtgaataatgtttatggaaaccaattgtgtaagtaagagtataggttggtttatagtcaagtgtttgttttcgaaatataatgggactgcaattccaaagaaagactaattatttaattttacattttgtaatcaatacagacaattctctagctctccctataattatttcaggacaattgttaggggtatttgatgggagaaatgttaaaaagtactagtggtataagtatttttttatatattaatatcgggttttatataagttaaagtattgctagctaatagcaacacgacacatttaaaaattgctaagcactattaatgtccaatagcaatgctcattttatagtattcaatataacatattgttattatttttatttaatattgagtctcatatttttgtttcaacattcgatttaaattgtatgccacgtgttgttggatgtatagtctttttttttttacaatttagttatcaaaatatttttttttaatttattataaatatttaatgtaaattaaatattatttttttgattctgtcttttattatttatgaaagtttttataagaaaaaaatgaattctctttatgaaaaatttatttaaataatttttatatataatataattgatttgatggtaattaatttttttattttactatgaatataatagattttataatctttttatagcaaaaaataaaggcaagatcgtgatcttaatatatggaaaatatgttgattttatctaaggttgcagagtgtgtatgttgttgcaaattagagtttattttaagaaaattttgtacaacggtaaaattatgtgtatgacggtctttagggtttctatttgttataaataggacctagagagcagtcaaacgaattcatctcttcaagtctcattattttatattttcatatttgtgtgaagagtgtttttaatttgtgagaaaatctagagttctactaagtattgctattgggcactagtgctgcttaacacctctagatatgtcgtcttgcaattagctagcgatactctctaaaagttattacatcaaactatatgggacccgatacttagtttgagtaatagcaatattaacaaataggagggtgctagacaccactggtacattttagtatttctcactaggttttagtttatgttttattgttctttcactgtttttagaatagggtaaagagcttcattgaacaagaaaaaaaagtgtttgagataagacttgtcgaagacttacttcaggagaaaaaaagcacactcacatcaaaagttgaagggagttcactgtttagtgtgttcaaaagtcacattagcaaagaaaattacgaatgattgcagcaaaattttagagggatcgtctaaacttatttaagtcaactgtatgtgttatttttgtgacttcactatttgattttactttctgggtgtgatcctgtagactaattgtgtttgaaagaatattgatagcacgtgtaattctcttatatcgagttttaaattttacaaaatttatttttatttttgttctagtttggtacgcaggattggactgaaaaggattggactagattggacaatattgcattatgctgaaagtaatcatgtgtttggtttaagaatagactgg

SEQ ID NO: 27783 - DNA, 2614 bp, Cannabis sativa
aagaaaattaaaacacttattggtttccctcttaattgaaaaacaatacaaaagagaaaagattagcatttgatgtttaataatattttagttagtataaagatacataaacaaaggtctccttcttcctctctcttacacatgcacataacttgaaattttgataagacaaacccatctttttatatatgtaataaatttaaattagaatttttgtctcataaaattaaattatagtcttgaatttaattaggtcgttaaatattttacttgaactatattaaaattgttaaatttaaaaatttttataaaataaaacaaactattagagtttctgcagttaaagcaaatgggatgcttagtgtatataaaatatatatatttattatattaattccaaaaatgttaccttcttttattaatatatttattgggatataattttgtttagttattgtattttcacggattgtaatctgtgatgtacgacagccgtcagataagggagttatttgatctgacggctgagattgatctaggagtaattatggttaaaaagtagaaacgtaccctgacactcatttaatggactctgaaacccatctaatgtaccacgaaatacattccgtaaaagtaggtcacgggccaaaatcatatccctatatttattatgataggtttgtttagtttttcatatataaataatagaagcaaatctttgtgtttgatttgggtctcttaacttttctcccaatagaccattaattgaataattaacaatgacttagtttgaaaaactaagacactttcatcatcatcataatccatgctatacacctatatattatattttcttcatatatgattgtgtttgaaatcatgtttttctactttttgaccattacttttccacattcctgatattaatttaatatatattttggtagtggtgagaggtgttctctttttctttttccgttttagccttaagctagctgatataaaagtacatcgtgatttatacgtatgtatgtgaacacattatttttagtcataatattaatgaaattccatttcatttaacttggataggttatttgatacttaattaggatgaatataactttttgatccaagaatttcgatgggatattatattactctcaaatttatgtatatgtacatgtattatgtatataaggctaagaaacaatacaacaaacattaagcttgtaaattaaaagcagcgaaaagacttgacttcgtaacaaaaactgatttcgttcttcctcaattctttgttattatattggttagttttagtaacatttatgcttttagctagctagtgatatttttttaaaaatataagatatatcggtgtgagtaaaaagacaaacatggtacaggtaaaagaattgttgaagcaatattatataggtgctgagtttaataactttcagtattctattgctgccatgtttagtaaatatgagcaaactcttaatgaaaacttgaattttgcttttatttgggacagattttgtgttccaaaatataaattcattgcttggttggctttgatggcaaagagatatcttctgatccttttatgcttgattggataaggaaaaggaaaatcacaaaatggaagaagtgagtggtgtggtgccttataacagcaattgtgacaacttatggaatattagattagtttagttttggttaagtcggttatattagttactttttactgtgccagtatatatatgtacctcccctaatattcaatcagttgtaacaaacattttcacattcaatttgttcaataaagaaatatgttctgtttccactaatatggtatcagaagactcctcctccttcaagcttcaaaaaatcgtttgaagcttctttcctcttcaacaatggtgcgtactagggccaccatctcagctacctccactgctcagaatcctccagtggtcgatgctaccaacgccccaccaccaacaatcgaattcgctaacgatttacatcccaatcttgaacctgtttctcgacctaatccagtcgaacagaacaatcaacaccagaatcctgtctcaagatccaatcctgttgattaatcctcacgggaaccaaatcctcttcctcgatccactccaatcgagagacctccctatgaagatattcagtctccatactacctcagtaacgcagaccatccagggctggttcttgctactccaattctcacagaccgcaattttcagtcatggaaaagagacttcaagatctccatataggagcgattatatggcctatgattattaccctagtgattattgatctttaaatgctatgtcatgctttatatattgatttaacaaattatgcattcaatgcataatttggttagaatcggtaactagaatcgagatcaaccgttctaaggccttattgtaaataaacatgtgagcgtaacacgtgggtctatgccacatagacacaaataagcgtgtgagcgtaacacgcatgtctatatcaaatagacaataagtatgatggcattattattatatatgtgaaatgtatattgtgattattgatattt

SEQ ID NO: 27784 - DNA, 2266 bp, Cannabis sativa
aaaattttacttttattttgtaataaaaaatttagaaaacaaaagtattaccaaaagtcactataatttaggaaaattatttttttatgatcgtgtatattataattatttaagacattttgtaaaatttaaaaaaatttaacatgctaaaaatagggtttaaaatatctatattgcacgtatgattttttttattatatacgcgtgtaaaaaaaaactatttgaacattattttctatattataaaattattctgatttttttaaaattttacagaatatcttaaataactataatatactataaaaaaattaaatttaattttatttctcaaataaaattgcatcacttattttaaggtatacattatagaactactttataacttaaatgtaagaaataaatataaaagagattatatttacctaaataaatatttaaaaaaattgaggtgggacaattgcatccaatcaaatgcctccctttattgaaagcatttcatttaaaagcccattttttttctaatttatttatttattttgctaaaatatcttatatcacaatataaatgacattccaaattatggagcaccacataaatagtgaaatatttttattaagcatcagttgcttagtattttttagatgtatctacttgcgattagttagcgatattctttaatagttattatattaaattatataggagaaatactaaaagacactaatggtgtctagcaaataacttttaaagagtatcgctagtcaatcgcaagacaacatgcctaaatgtgctagacattactgatgcccaataacaatgctcattatatgaggcttaatatttcattataccaataacaatataacacttaaccatctttaacaattgatctgaaagaacaaaatagcatagtcttatttttggtgtcattatatttatttttaaaaataggaattgaattcgaacacatatttaattctttcttaaaagaaagcatattcaattttttataagaaaataggatatatttaatatattgcataacactaaccatacaaaatgttccattcaaaaaaaaaaaaaaaaaacatacaaaatgtaatatagttatgaatataatctaatatggaaattctatatattttaattaaatacgtgatattaagaaagagtttttacatggcatactaaaatttttaatttttttattttttattgtggggtagaatttttttaaaaaatacatgcaagttttatactatacactgtgttaagttttcactgttgttccacgataattttttaattattcctgttgttttaattgttctgttttattattttacggttatttttataaaaaaattccgtataacaaaattataaacttttaccaaaactttaatatttttgtaaaactcccattaaaaattgttaacttgtatagtctaataactatggataatatgtgtatagaatattcaatatttttaatcacttaccaataatatattttgaagtacattttgattataatttttgcaagttaagggaacactttatttttcataataatatgtattatgattatttttcatagtaatgaatgaagaaataatacatatatttttgtatctttctctacataacaatttttttttttttttggaaataacattttgataccgcaatatgttgagtttgtttgcaatcaaatgtcaaacgtaagcaagtcattttattatgataataattaaaaatatttattttcaacttcagtattttcaacttaccaaaaccttcataatttacagcttctttaaacaatatatatatatatattcagagttttattttttatttttttaaaatatatttattatggagctggtgagctaagatattattattcagaccataaatgatgttctctttggggtgatatcaagtggactatcaagatatctcgatcatcgaacacctaatggtaagcattgtcaatttttgaagttgatgttaattatcccaatatatcattttttttttaatttcaatttgtgttacttaaaaataaagtttaaacttcatatgtaatatagttataaataagattacatgccccttatgctaacatttttaattgaggactataaaaatattataatgctatattttacccttttttaaaaaatgaatctccactcattttttactaattaatgatttttactaattaaaagtttttaatattttatttattta

SEQ ID NO: 27785 - DNA, 3542 bp, Cannabis sativa
ttagggcataaaatccaacactctgccctcaattctgattgacacggatctaacccattttttgaagataatcaattctccattaggtagcagggttctgaaccccatttcaaagatataactaggccacacaactggctaagcattcttgatgctacatatgaaagtgtagccctaaagtcaaacaaaacaatataagtgaggttgttgataagaagctgacttgtaaatacagaagggctggctgcagcgtcagcttgggtgatagcaaatacccttgctagagtaggcttagctttttacttaggttcctctttgttcagctgaggacaatctttcttgaggttcccgactaatccacactaaaaataagctctccaattacatgccccaggatgatgctttttgcagcacggacactcacggtaggagtaagtctgacgtccccttttgccctaattttgacgaaacttcttactttgacccaaacttctagtagttgggaaaattcttttcttatgctcaatggtagaatcaccaccctccttaccaggaccagaaatagggagggtagtggtcccaccagcactaggggcctctcgggtctcttgtagaaactttactgcaccttctgcctgaagagccttgtcaaccatcttagcataagttgtggtatcattagctgtgataaccaaatcatgcctaattttggcattcaatcttgccaaatacttttccatcttgctgaaatccgtaggtactatcccagaagccaacttggccaaacgatcaaatttggttgtatattcagttactgacatatttttgcccttaactaaatctacaaactctttttgttttgcactatgaattgcctcattctagtacttggcgttaaatagatcctgaaattcttcccaggacaatctggtgaattcccgagtgagagacaccatctcccaccacacaagggtgtgatcctgaaactgaaacgtggcacacaccaccctgtcgtttccatacggttaccaataataggttgttctgttggcaccgcgagaaccaatacagttggtagttgcagtggaggcaccacaggagcatcccactgcctaagcctctgaatctcttcctcttgttgagtgattcaggcttgcatctctgcaaacctatgctcccagtcaaaaggagcctgaggtagattttcttggccacctctttgagcttgaccgcgacctctgccgcgtccatgggggttttggggtttctacctcccagaccacctccagtctcagccattttaccctgccctctaacgtttcgatgggcatccataatctaggacttagcctgcgaacccacaaggcatgtaggttagatcgtagtcaaaacattcccaagactgcatattacagattttgaacaacttacaacacatttattaaagtatagcttaaataattttctaataggtaaaagcttatggaactgtgagtttagctcatctctaaccttgattgtacatatcttgacggtcttcagtgaacaaccaggtgactttgatactaaaattgtaacactcaaacgtgaaaacatttctatttggatgtagacttatttatataaccatttataactttatatagacatatacatgaaaatataagtcgggatcccgagtgttaaaaaccacatatggaaaatacaaaatatacttataatgtcaattttttttaacatagggtgatatcataaactaaatccaaaacacaacatgatcgaaatcctccaggttgcactgttgcgatatgcacaatcattgtcgaccctccaactcactaatcctcctctttagcctttcctttacctaaaggtagcaaactgatgagtcaatggactcagtaagatatgcataaaatatatataaaaaattcaatatcgacttgtacttaggccctactaagccttagcacaaggcttaccaaatggtcaagaacattcttaacagaagtaggatcgctgtaccacatgcactgaagtaccatctccgtactagtgttggtagggccaaattgtacttctgggtgctactgggtgttgaaccacatgcactccgtacccacttatactcgtgctagtaacacaataacttagccttaaacacgatacactgtactaacacactcagtactacaattattctagtgttagtagtgtaaacaatataaacatgcataaattcacacatatacatactttatgctaatcttaccttgtttccaaatttaggtgtgccggtcaacttgagtggaatagcatctcgacaccttacacggacctatatcaaaatattcataaatatgatgagagacacgctaacatactttttggggacttaaaatcaaaactagaagtttccctatcgattggtaacatggaaatatcctaactatagggttcgcaaaattgcttcgaccagcagaccggttctgtggggttttttaaggtctaaccgaaattttggttcctacaggttccactgaaccagtcgaccggttcagtgtaggaaacaccaaaaacactcccaacacctcaaatcgaccccaaatttgctcaaaaacttccggaatacctacttataccacaataaactcaattcaagcaatgacactcaataattagctcaaaaatgcaaaaaactattagacagaaaaacttgagttcttaaacataaaatttgctcaaacaccacaataatcaataaacttagctcaattcaactcaaacaaccttaatttaacctcagatcataaattcaaacatcaataaacaacacagaaccctgactctaaaaattcatacactaaagcctaacttgaacctaggaaatcaaagggaaagagactaagaggttataccttgaactgcaacacccaaatcctactagaattctctgaaatgcagcagaaaaatccacacccctatttggttcttgaagattcgagagaaagggagagagagtgtgttctttgttttttataagtgataccttgtaaaagattaatatcaattatcaacctattttaataaaactagaatactaatgtccacaaaagacaaaaatgtcccatagcaaaaagaccaatatggccccctaacacagccaaaaacatatttgctttctaggggtaaattggtcatttcaaaaaatttggctagttccgacacttccaatgcctaaccatgttgccccactattattaaaattataaactatatgaaaacgtgactctctaatgcccaacgtcgcgttccactgttacagaacattaacacagaaaataagaaattcacatatatcataaataacacattcagaattcaaataaatctctataaatgggtaaatcatagttaataatctaatttcataatttaaccccaattgttaatccatcacataaaaattaagcggtctttacagctaccacttgattatccttgagttggtaaacacaaggttcatcttcattttggtgaaa

SEQ ID NO: 27786 - DNA, 4321 bp, Cannabis sativa
ctagcttcaccagaacacaaaaaactgcatgagtgatttcaatatatcacttagacttcaaaaaatacaccctagacactattttcccttggcccaacgtctaagttgatgtcacatgtcaacctgggtgtgggttgtcaacttcggcgctgaatgccaacctgggagctaagagtagaagaaccttcagtaaatgaccataactcactcaatattgatctaatttatgcaattcaacttgagttttgaagctatttcaattccctatcaagttatgtagcacaatccaattgaaattttgaagttatcaactccaaattttaccctcaagagagttaagaatttaagctacaacttacccgaagtggtcctacggacacaacccaagctttagaaattgaagactgaccttcagagtcaatttcactattagatcattatctacggtcaaaaatattctaatgtattttaccatattttttgaaatattttattattattttaataggacattcttccccataaaagaagagctcctctagctcattttcacattcagaaaagtacacataaggtcagagtctttgtctctagtttttctctctagaaattacagtttcatcacagttgtcttaaagttgacttcttctttcccttatggccgtcaaagttgaatttttttaagcaaagacaccttcgacctcttcttcactggatgacgaccacctttggctacaggggagcaaaatcggagtcatcatcgtcgatgactgggcatttccctttagccttgttagcaactgatttatgacctatttttgaagtttttttggcaatatagatggagaagtagaggaacgggtaacaaccattatatacacgaaatggaagatataaaaaaattgaatgaaaatagtggcagttggagatggatatggctgaatgggctttgatcataggttaatcgtgagggaagaatgtgattttttgaatgaaaatattgaaagagaattggaaagagaaactgaacactaacttagaaacagaaaataaaaataaaaatgataagaaaaagaaaaaaaaaaagaaaaaagatgtgtaagtgagatgacgtgcatatagcgtgtgtgagtgatagagtgtgttagtgatagtgtaagaggtattttggtaattaaaaacatattgaaggtaaaaatgttgtccacaccttatggagttatttttgtaaatataatatcattttgtatttttcatgtaatttttttatatatttagagagtattatttaatattagcttcctaatattttattaagacaccttatttattttattattttgacttaatatttttttagcttatgttaatcttttatttattttattctttcattttcacattctaaaaataatttttactttttaagataaaatacttaaaaaaatattagttcgtgtgggtaatcgggcttccaagccctctccactctcttttgatagaatttattgttttcatagaatgagtgaagaactcggagatcggtaccctatatttataggtgagatactatatcagtatttttttcacattaattattatttcgacaattgattcataaaattaaatcaagaaatgacttaattggtgaattgaaagctgaccatatataagatatttatatttattaaataatattttttgaacaagaggaaaatgttttattcaaaaaataaagccaatacaaaggacagctgaggtaaacccacaacaacaaacaagcagctgagctgcaccaaagagcagcagctgaagcaagctaccaactcaaaattacatcgagtaaataattgttctttttacaatctttaaagggacctttactcaacactgtcaacttcatatttttctcacttcgttgcttaaactgcttggagtagcgctagtcagatcatagagacaatcacttctattttttcaaatctgatacaaagttgctgcaatcacagcattgatcacccgattttggagaccatgctgaggtaagatcagagagcgaagttggccaatagatttgaccaagccaatctttgattctatcaggcacctgtttggagaaagaacattcagacaaaacatgattttgagtttcctccatttgatcacaaacatgacagttagtattatgaactggcaagaatctacttagtttgtctcgggtaagcagctgggaatttgtaatttgccaatagataaacttgtgttttggtatcacaagtttaacccaaaccaagcctgcactgtcaactttgttctccatcacctggaggttataaaattttgtttcactaaatttgtttcatttgttgacagcaaggttcagatttgtttcatttgttgacaccctaagcttcaacagtttcttgaagtaccaacttgtatctggctttgaggggtaattccaaatagattgaccttttagataaaccgagttaatccatttcacccacagattgtcttgtttactagagatagcccgaagaaacttagccatcaaggccttatttcatttcttgccttctcgaaaaccaactccacctaactttttgggaagacatactttctcctaggaagctagatgaaacttgctcctattctccttcttgccccaaaggaaatttcgacaattcttgtctatggcagcaactatcttgtgaggaattatgaaaatactcatccagtaattttgaattccaagcaagaccaagtgaattaattgagctctcccagaaaacaacagatccttgctagccgcgcagttaagattcttattaattttatctagaatcacaccacaatctgaggccttccattttgtagtacgaaggttaacccctaaatacattaggggaaaggagccctcttcaatttgaaccaaatcaagaatcttcaattttatatcatctttaaccccaccaaaaaagatctatgacttagctttgttagcagataaacttgtagcattacagaatttagtgaaggcttcttgaataattttgaccgaattcaagttgcctttactagacaggacaaggtcatctacaaaacaagggttagtcaaactaaggtgtttgcataaaggatgatacccaaagccctctgtccgagtagaagctaagaagtctagagagttactccattatcagaacaaacagaagaggcgacattggatctccttgtaggagaccttttttaaccctaaagttgccttgaattctgccattcattagaagatggtagttgcttccattcagacatgtcattatccaattgataaaccgagatgggaaataacgatgattaagtagagcttccataaaatgctgatggtgtagcaacacactataggtctataatctttggcggtgtttggatcagacactttaggaattaaagaaattacagtgtcattcaattcctttggcatgtaaccattagcaaagaagtccaaaacaactctagaaacttcattacctatctcatcccacatgtctttgaagaatccagatgcaaaaccatccaaaccagggcttttggaggagtggatactgaatatatctttcttaacactccccatagagaaaagccttattagtctaacttgctgctccaagttcaagcaatttccctatctaatacatccttcttctatgttggaagttgcagagcttttacttcccatgagcatctcaaaatgattgacaaagtgattcacaacttcctcaaagtcgtcaacgatagagtcatcctttaagtaggttgtaattctgttttcaaatttccttttcctcatggccgcatgaaaatagctagagttctcatcattaaactttatccatcttagcttactttgctgtctaataaactgagtatagctattctgggcaataagatactcctgctacttaagatcagcaacatattgcaagcttatatcagttggcttagtagcagcttctccttgtaattctacaatactcttccttaacctgcttgtactccttagaaatatcaccgatttcatgtttgctcaacttttttagagtgtgtttgaccctgaacaacttcttcactaacctgtccaggctgctacctactgctggtttattccagcaagcagaaataatctttttaaagttaggatatgaagcccaatgattacagtatctaaaaggcttgtatccaactttgttcgcctcatgattccgaattaaacacaagctatgtaaagcccgcttagttaatttgaaaattagcagtt

SEQ ID NO: 27787 - DNA, 3197 bp, Cannabis sativa
aattcttatcgatatctttgtatacactatcatcctaatttaattgagtgttttattttttcatttttttttatttaagcgtttatatattacaatcatattttaaccttcaagacacacacacccacctatggccacttgagctagcctcagttatgatttatgattttagttatgatttataaaaataatttttgttttgtatggtaaaaactttttttctttgaataatatagtgtagattaacgaatattctttcatgattcctcgtatctctagtcagtgttattttcaattgagtatagtgcttgtttttcaataatatgagctaacacatttattgtcgtaatattctttctattttttggtaattaatttcttattttttccttattagagaaaagagaaaagcctaagataaacccaaagtgttatatttgtagtatgcaatttgaaaataacggttattgtgtaaattctttcacccattttgataatttataataaattcccatccattcaatactgataatagttctacatgagagtagcgtgagcctgaagtacagagagattaggcttatggttagagctcacttagtctaaggattaaaaatagatttgtgtttttaaatacacattattttttttaataattttgaatttttttctaaataagagtctattttttttcttcttatgactcattaaatttcaacatcgacattgtatgtacaagaatttattttgatatttattaaacaaaaataattacaaatattaattttaaaaatatattttttttaaaaaaaaagtcattagattttaatttaatggtccaaaaagtttctgtttttatactatatcaaaaaatatttatatcatgattaactcaaatttaaccttttttttttatctctcaacaaatgaatatgcaatcaaatgagagtattttttttaattacataacaaaattaagtataaaaacttaaaattttctaataatactaattaaccatagtgcatctatattaatataagttttcatcaattttttttttttttgaataatttcatgataaatatttataatgcatttcttaagtaattaacttcacaaacatgttaaccatcacgcaatggcttgtaatagttattcttacaagttgcttctgtaaaaatcttagtaaatagttgtttaatttacaaaccatgagacagtgattccatgaaaatctagcctacctatggttgtactactgcaacacaccttataccttatatcataattaattttcttgccaattttccctatcataaccataaaataagacacacacatatatatatatatatatacaaaattatgaacatataatatgttataattaacaggcaccatcatctacatacgaaaggagttccaattagagactaacatggaagggctagtaatagccatagctctaattgggggtatactaagcacaagcatctccggtagtgcctctgaccgaatcggccgacgacccatgctcttaatttcgtcggcattgtaccttttgagtggtctaataatgatgaggtctccaaatgtttatgttcttctcttagctagactactcaatgggtttggtaccggtttcatcgttacacttgttcccatttacatctccgaaacgtcgccctcagatatcagaggatcacttaatacgttgccacagtttatggggtccagcgggatgtgtgtgtcttcttccatagtgtttgcggtgtcattgaccgatactttcagctggagattgatgttgggaattctttgtcttccttctcttctctatttttctttgattttgttttgcttgcctgaatctccaagatggcttggaagcaagggcagaatagctgaggccaaacaagtcttgaagacaattcgtggcaccacagatgataatggtaagtagtacttacattaattcatcccttggttatatcttttgaatacgtgttatatattatacatcattctttctaatttaaagtaattgaatttataatataatagtgattaaaggggagctggccttgctgattgagggtcttgaaactggagaaaaatcatccatggaggaatacttaatatccccagctaatgatatattgaatcctaataatcggccggaaacaccaaacaataataatagcaataataatgaagaaataaatgatcaaataagaatctacgggcatgatagtggtcaatcatgggtggccaaaccagctggcacaggacgaagtgtgatgttggcttctcgtcaaagcagcctggctcttgaggttgatcctttagtcactctattcggcagcgttcatgagaaactccccgagagtaccctaggaagcaacttcttctccggaattgatcatcatcctcatgatcatcaccactgggatgaggaaaatcaacacatgtattcttatgtttatgaccctatatatgtataaactctcctttaattaattaagatatagtataaacttcacacacatgcactgttttgttttgttcaatttgttggttgtgcagagatgatagtgatgactatgaagtagacacagaaggaatagaggaagagcatttgatgaatttgagaagcccattgctgtcccatgatctaagtagatcaaccccacgagcaggtgaagcagtgagacggagcagtagtctttgtatagaagggaatagtccaagtgaagtagtgagccagggtgcgaatataggaggagggtggcaaatagcatggaagtggattgagcgagtaggcgaagatgggaacaaggaaggagagcttcaaagaatctttattcatcaggaggctataactgcgccgtcccgaaccggatccataatctcagttccagctgctgcagcaattgcagaagagagtagtgaagcagtgctaatggttcctgtagctgctttggttagtcattcggcttttggtcccgagggaccaatcaaaatgtgtactcaagaagacggtgggatagaaccggttatcaatatggatcaaccagtacagaatgatgttgctaaaccggtgagttggagtgatcttatggaaccaggagttaggcgagctttggccgttggagttggacttcaggtttttcagcaggtaattataattattaat

SEQ ID NO: 27788 - DNA, 2579 bp, Cannabis sativa
taaaataatttccaacagttagacacgttgccagaggggcgtgtgtcacccttagtgaaaaaacattcgcaagctgaagttgcaggcactgttgcgtgatgtacaagccatgatccgaacttggatacgacaaaaaaatcttaccacgcagtgccttcaactaatccccacattgtcaaattaatggcaaggggtagagccgctcaggcaggctatattgaaaggcatgtagagccagaggaaagagaggcctgcccggatgcaaggattgtgatgtcatcccgggcaatcccttggggtcctataacgagtctagggtatctctcaatgaagaaggtcaaccttcccacgccggggttgaccatgtagaggaggaggacaaggccctagttcctttatcgcatggtgagggagtgttaggcgatttttagcttaaatttcgagtcactttttatagttattttttcttctttgttattatttttggaataaaattgtaaagtcatttttttggaaatttaggtatcaaaatattttttatttattgtgtgattttttgagcaattaaactgatttggtctccttaatattgtgtctttattgctcttttccttcaaaagaaaaaattatttttcagctttccattttcttattttggaaactttttgtaagagaagagattctctcattgaaagttttatttggaaactttgaccattgctctttctctttaatgtgttcgattatgtcttgataagatcagatcaaacacattatttttggcaggtatgaagtccatgttcatgatcgagcacctatttggaaagtttcctttctggtttaatttgctgctgtagaaacctaattctaatgttgcaaatcaggatttttttaggaaagtttgtacagctgtggaaacaattttatggctgtatttagggttttttatgttctataaatagaacctagagagcagccaatccgttcaactcttctagctttcatttttgcatatttttcttttgtgaggagagagttctttttgtgagaacctagtggttcagctaggttttagtgcttatgtatttgttcaaatactggttttatggtcggtttgaataacttgattgaacaagagaaatgtcttcgggagaagacttgtatgagccttactttgggaggaagtaagcactcacacttcaaagacgaagggagttcgctgtttgatggtggtttagaaatcagattcgtgaagtgaattataaaggattgcggtaaagttttagagggagtctaaacttgattaagtcaactgtctttgtaagtatttaagacattactaattgatttcattctttcggcgtgacccagtagactaggagtgttcaaaagaacagtgataccacgtacaattctattgtatcaagtgattttattttctactagtattttaatttttggtattttatttttggttctggtttatttatgcaaaactgtgttttgtagtgacagaattacattctactgctgtagactgttacaattgtatttttactgtcattgtgtaaaaattaattggcttttgctaaaacacaatttttcaattggtattagagagggacactaaactcttagtgtggtcctttaacattttcatgtgtttttgtgcaatatgttattttttgcagaaggaagttctatttctcgtccactattgctcaatgattctaattattcttattaaaaagttaaaatgagggcttttatcaagtctcaagatgagaaagcaaggaggacagttctttcaggatgttctcctcctgttgtggtagattccaaaggtaattttgaattaaaatctgaactagaatggtctacttaatatgataaattgtctgcttacaatagcaaagctttacatgctatatctaatggagtaggtgaaagttatattaagcttatatcttcttgtgaatctgctaaggatgcttggcagatctttcaagtgttctagatttattatgcttcagaccacatttgatgatcttaggatgtctaaaaatgaaactctgactgagttttataaaagattgtttgatatagctaatgaatgctttgctcttggtgaaaatctttatgaatatgttcttgttagaaaaattgttagagttcttccaaacgggttcgatactaaacttttggccatagaggaagctaaagattttagcacaatgaaggtggaagagttaataggttctttgcatacttttgaattgaatcaacaaatcaaacaaaaggacaaacccaagtccatcggcgataaaggtaaaagtatcgctttaaaagttgctaaaaaagaaagttttgataatgaatgtgattatgaaattgctttattaaccaagagtttttagaaatatatgaaaaagatgggtaataaaaagaataacctgaaattttcaaaaagaaatacaccttttaaaccttctgtgactaataaaaaggaaattcaatgtaggaaatgtgaaggctttgggcatattcaatttgagtgtgcaaacactttgaaaaagaat

SEQ ID NO: 27789 - DNA, 1797 bp, Cannabis sativa
gccccgaacccagttcagcccaaattactcaattgtgactataccgtgccaacttgttcgaaaatacttgcagaaggacaatacaagtacactatataataatatagtccataagcacgcaattatattcaattcacagttttaccattctcgggtcaaaattatgaaaatgccactggctcaccaatggggtcttaacatgtcatttatcaaattaattcacatataataaattatataataatatattctcataataatacatattcaactagttagggttcactaatccgttttttaaatcttaggatattacattacgacatacaataagagggagtctatttatgcataagtcaattactttatatttttgagatctatctatgaatcttatctttaggtgtggcctcatggactagtaataatctaaaaagattgttgaaaccacgtacaaaaaccttgtgtgtttttacttatctgcattatttattttttcggtttattctgaagttacaaagttgccttttgttagctacagaaaagctgtttcagtatcagttatattatttcgcatttaattaagaaattaattaaataataaactggtaactttaaaatacgaaatttcaaacttaaaaaccaaaacataagtaaagtgtagatggtatcaccgtaccaataactaaagttgggtagtattgccacaaatatttaaaaatcaaaatattgtgaaaaaaaaaaattgcttccattgagaggcttttggcacaattgttattattagtctcatcttctcttctctctactagtgtttttttttctttaacgctgcgaatggttgttttattttcttgattggggatgttggcgttgtttctatgtgtttggttagacctagtcgaaggggtttttttttttctctaggtgtgtgttgtgtagagcttctcgggatctcctcttgtttttgttttgttctttttccgttgagaggtatcagctctggtttgagggttgttggaggggtctttgatcgtggacaacgaggctgtttttctctaggatggtagtttatttctagtggtcgaagacatggggggtgctggaaaagacctttggctcaattgatttttatggggcttgttgttggcgctttagaggagcaaccttgccatgggtttgtgggaggatcccgacatgtttgatcttggtggtaaaccttcgattgggcacaatgatggtggtgtgacggtaacagggtgcagtgtgttagtagtgactaaccagtcacgttttattttattttgttttgttttcaataacgtcccattgttttgggtttagattgtccacatttgtgtggattttttactgtctatctttgatatatactatgatgtttttttttgctttgtcacaattgattcatgtcactgtttctagtggtccattaatatgatataagttgatacttattggacaatattgttccacacagatcaaatgtaaaaatattgaaccatgcataagaacatggtctactccactcattactaattggttttgagagaagaccgcatgattctcaacaatactcattatacttttcctttgagttttttgttttttatttaaatatttatctattacaatgaataactaagcctcaagtggttactttgcatattttgagcgaaaatacaaaatgtatgttgcttaaccttttgggttgaggtttcaccacttcattaatgaaagtattctccatatgattaaaacaaaaaataaaaaataaaa

SEQ ID NO: 27790 - DNA, 2027 bp, Cannabis sativa
cataaccgtgtttagataaagcaagagcagttatagcaattatttgttttatttcatgtgttgcaaatatgaaatgtgagaattattcatgtttgatgaacagttacgaggataagatcctaagagaataactgttaccccaaaacacttataaatagaggaggatctcccaaaatgcgacacgaccaaattgagaattatagagaacaatttaaatattgtatcatgtattctataaaaaaaaaaaaaaactcatcaaatcctaataataagatgaactcgtgaatatgaagaattatcttcaaaactacgtaaaaaaaccttcttgttttcatatatatatgtatattattgctattactatttattattattattcttatgtttatttactaaattaaggctcatttattggttaacaaaaattagcgttaacagtttggtgctttcattaagagtctcgtaaaaaactcaaaaaacgcaccttccttgagtaatatttaaacttttccttttttctccattcatgtctgaggattcccctcaaaatgatgacactcagtcgagaaaacaactcaatgtcctcagaaagaacaccagaattcccagagaacaaatacgactaagatcccgcgctcgggaaggggaaataatgaaggaggttttgaacaaacgagagatgaaatccttgaaagacatagtcaggatgcgtacgatcctacaagatatatatgtgctattggtggagttagaaaacagccaactccgatagagattgatagaatcaatcagagaaatattaagttggaatgcagactagggttggaagagcagcacacagtgatgcaccccctaaccaatccactaagcgaccacgaggaagatttagaggatcgagaaccgggaggaatgaggaagcttctagagataataaccacaaaattcccacaaatcctcaggatgatcaaccagagaatatgaggaatatcctagtggacacaggaggtccccaaaatccaagaaacactaacaatagggaaactcaaccaaatgatctaggaacttcacgtggtaacattaatcatgggaatgtacaacctgacaatctagaggtatcccgtatgaatggagataccagacaaacacgacatggcaactgaggattcacccaacataatgcgaggaatccaaggggacatcccaggtcagggcatccaccgagacactggcaaaggccaaaacaaaacaaataagatagcatgtatacctactttgagtagggaccatgtatcaaatctctttcaaagacgaaggcctacacgagaagatcctcaagaaacggaatcaagtactggcccaagtgggtcaaggacacgtggtcaaagtagatacactaggtcgcatgcacgagaaaggcaaacacgaagagaggaaagtatttgttgccattatcatgatgaacaagagaacatgagtaattcgtaaagttttcaatctaaaagtctcccaacaacaagattagttagtaattatgattgaaaggatggaaggcgacgtgatcttgatcttcatgaacacttaaatcgtacacaacccgacttatgtgagcatctgaaccacaatgttctagatctatgggatcgattgaattagaacacaacaaatcaacaacaacaagtcgagcaattggtcatgaattgaaggaaagaagggtaacccaccagctaatggtaaccatagaagaaaaaaatgcggtatgcaagatgaaagacttggatcctaggattcaagatgaacacaatcaactcaagtcaattgaagagttataagaagtgaatttagacccaaacgatccaaccaagtatgttaacattggaaagggtttagggaagaacttaaataataattaatcgtattcttgaaggcaaactaggaccaatttgcttggagccattcagatatggttaggatcagtatcgacccaaatgtgatttgtcaccatctcaacatagatatctcatacccac

SEQ ID NO: 27791 - DNA, 1636 bp, Cannabis sativa
  modified_base (566)..(575): a, c, t, g, unknown or other
cattgatgttttcttatcaccattaatatatgctagaccttaccattagttggagacccaattgatcacttaaagcatgtttaatttagaattgatttataattttttttaaaggtaaatggaattacatgtaaatactgttagtttagtgatcagcataatcaacacaaatggactaactaaacaaaaataatttataattaattattgcatgccatctacatataatatataagggtttaattattttagaaatatttacccaaaaattataaaaaatttacttttcaaatatttttttataatcttatttagatcgtgatttttaaattatttttaaattgctaaaacataatataacattgggataaaacataaaaataacattgttttctccttagtaaatatatatatatactagatgaaagttacgtgacgagccacgtaaatattagttttattttagttctagtggtttttgcttaaaaattcggtaattaattgtaaattattttataaacgatatatgttatgaaagtaaacttgttaaaaatgtcataattgtnnnnnnnnnnctataatatacacattgttattcaaatgttataatgggaatttcaactcatcccgctatacatctctcacacactcacacacccaaccacttgagctataccaaagtggctacacattattgtgctcaaaagtcatgtaatcataaagttggacattataattaaagagagaagacaaagggagaaaataccatatacaaatagatatagcttattaatgctaatcaagattgataaaaaagaatcatgcaatcgtaacaagtgctcctattagtaaagcctcattctttccactaaactaaaccggattttccacataatattgcgaacaaagacaaatatacaatgaagtaagtaaatgtgaagtaaaatgggctcactatcactgcacaaaaaaagtcacaaacccatacattctcttctgtttgtctgaatttctttcggattatatatgatatgtatatatacttcatggtcatagtttgtgtgtttgcaaggaaatgggaatctcatcttaacccttctaaaattgaaatttctatcgatcaagtagcatccatctatgtttattaacatcatatatggtgtcccatcagctttccgtacattgcacagtaatacctttgcctcagcatttgcaacttattgctatatagtagtcatattaatgttacaacaatatataataaacaatttcaaagtaaggtaaaggtagtaatttaacaagaaaacaagggagtataaaaactggttctaaatgtgattagtaaggccaggaggtccactttgctgtgtcattagtagtacctaatcacaatttaaaaattagttcagattaaactctattcataattaaagtaattatagtctagcagattgagcaaactatgcaccttcattggagggtatcttgagaaatgagctctattgcaagtacccacaacatgatttttccacaacttcactcggcaaatcacaaaatctcaccatctctgccatgaattatcaaactaagcttttaatcagcatataattaaaacaatagtactaaacttgtttct

SEQ ID NO: 27792 - DNA, 3046 bp, Cannabis sativa
  modified_base (2924)..(2947): a, c, t, g, unknown or other
aaaaaaaaaagaaactgatcatgtgggtaatcaggcttccaagctctctctgctctatttagataaatttactgtgtttcacagaatgagtagtgagctcgggaacaaagaccctatatttatataggtgagatctttcatcaaagtatctggcataattaattgtcagaatattttaaaaattaaatcgagtaactgaaatattaagtatttaaaatgaccataattagaatattttaattaattattaaataattaattatattttctaaatcaaatcaaatcaaatatttgatttgttattatataaaaatattctaccattgactcctgaaaatagacaactattttgtcaatttgttaaaagaatcaagtttctcgatggcttctattcaaatttaaagagcaaagtttttacagatgagtcaaatattcttgggtaaaaatcccaaaattgtcatgtcatgctcgctttaacatctgactcagattatttagcaaccttttacaaaggttgtatagtaaatggtatttaatttattacggtcgaaagagatgaaaagcaaaacacacaaaatagaggagttagtgttgctagaactaaagggttttatcattatggcaaacttgaaaatgtattaaccatgtcttatattggtacatataaaatgacattgattgaatgtaggtactataacactaatccaataacaaagaaaaaaatcactgaatataatataaccagtataaatatacgagaatttcagtatcaagatgagtcgtatatacttgctaaccaagctaagcaagttttctattttcaagatccacttagagatcacgattggaatgttgttgaagatgttaaccatcgaaaaatttaggacattaatgacaatgaagacgagacagatgttaatgttgtacatgattcaaactcattaaattttatgttgacggttgatctcaaagagttgattttacaatcggatgaactagctgtaattgttgaacctaacaaccaagcagtggatgttgaggaaaaaaaaacaatgaaactggatgaagattacgttgataaagaaattgatgacttactagttgaacttgttgaggatgaaaacaaaaatttggtgaatggtggaaatgatagtgattcctctttgtagctttaattttacttttgtttgtagtaagactctaatgattgaataacactttgtttctaatttgtatttatgcttgtgtcatcttttatttgtctgattttcatttcctggatttttatttatgtaaaattattttcacatttatatattgttcttctacaaattaaagtataatattagcttatatagagatgtaccacagtggagatggtggtggtatggacccctgatccttctagagtgccgttgtcctggcaatcaggtttcatatttttcatctcaatattattcttactctaaatacataattattttctaatgtactaatagaataattttttccttgaaaaataaagcccaaccaacaattagaaaagggtcgtgatcctgcttcaaacaatgaacttgaaaaaggaagaagggaagctgataaaccattagacgttcaggtggaactcagtacggacatagtatttgagactgaagccaacacttatgttcaatttatgggccagcaagtaactattttgtgtccaggttatcattacaattttttcgatgtaccccaataatataataatcaagtgattaatcgaataagagtgagtgattttcaattatctatggtttcaattattttataaagtcatttaagaattaaataaatccttatttactttatcatgcagttttattttgatatagataagaattcacatcgagacctactaatgggaactctttatacgaaaatggcagagagatataatgagagaaagaccaccagacataagtagtttaagcaatattactcaaaaccagaagattgagagaaagttcttgacctgtgccctgaccacttgaataagaagagttagagcctatttacgaactgtacattagcgtattttttaaagcgcttaaaaaaataaaacaaatatacaactgatgaaatatccaacagcactagtcacaagattattggcttctataagttacacatttgtaagtaataatatttattatttattttaaaaatataatgtatctttaaacacattataaactcttttatttatttattattttttatataggaaggtccaccaaaagagcatgtggtcgatgcatggagggtgactcatacgaaaaaactatctggtggttttgtacacgaagctgctgcagaagattttgtaagtaaataaaatattctattgttaaatttcaaatattatatcaattatatgttctaataatgtttatttaaatagggagaactgcgtaaggagcttgataggaaacgactcgaaagacaatctcagagtgatacatctggtactgaatctgatagtagttatcaattcgaggtacttaaaaagttcttggagaaagacctgactatcaaagaggtgtgggttataggatcaaagacaaaggaaagaactcatacaatcaaagtcagttagctgcgcatcctctgtcccctaatgaaatgtacaacactatggcagatatttttgcaactatacatgacacattaggtagcagtttgatacctgaacaacctgccaatttatataacccatattttgacaattttatccaaatgtacagtcaatcacaatctcttggtagttcgtcttcttagagttatgtcgctccaccacaacctcaacaccagcattccccgtaggaccaacactagtctggtcaacagcagggaaatcaacttgttgttggaattattttacnnnnnnnnnnnnnnnnnnnnnnnntatgttgattaacaacctaaaaataaacttctaaaacgaatataattaaacacatataaagtatgagaaaccttatattggttgcagcggaataatatg

SEQ ID NO: 27793 - DNA, 2948 bp, Cannabis sativa
aaaaaaaaaaaaaaacttcattttgtttctttattattttgttaagttccatgttgaaaaatgcacaaaaggttctttaaaattatttaacatgtttcaaatcatgtcatccgaacttacattcatatgatggaattagagaagaatcacaggaggggccaaacaaatatttttatatatttatttttacggtatatatacaattatcatttaacatttaaaataattaaaaaatgtacaaaatgcttctacacaacttagattatctctaatagatagtgtaaaaattatgttctaaatttagctaaaaaaagttcatgttatatttactgcaaattttacaccattaattattagaattttattttataaacatgagcaacaaaaaatacatatacaccacacttatatattacttgattagagatgcacctatatgaaaataaacatcacacaaacaaattctcaattcaatactggatctgggctttttcttgtgtatttttcttaaaaaaaattcatagacttttattataacaaatcaattgttctttttagtagcaaaaagtttaattaactacttaatgtaaattatataaattacatattaaaaataaaatttccaaaagattaagggggacatatatggctaccacattgtaattattagtaaaattggaaagaatcaaatttaagtccttgaacacaatctactgcaaaatttgttgagaaaaatggagaaatacaatttaatatcaaattagctcgaaagaggaagaaagaatctaaataattaattaactactacatagagatttcgttgctattatctaaaaattaagttattgacaaacttgagaatgtaaagtgggaaaccgtgtaaagtaaatttaataagatgtgtacagacccgcatctaattatatttattatatataaatgtaattatgtaacagaattatttagggtttagaatttaagtttctatgttaactttaaatattattgatattattaatcttatttttaaatttattagtttaattttaaattaaaataaaataaaaaattatgtaaatattttatataaagaaatttaaatttaacatattataaatatttttaatcatatttttaactttattgttatttattttatattttaaattgaatccacacaccacataaagtttgaaataaaaactttatatcaaatttacgaatttaatacatgtatagacacactcaaatttaataaaaaataattgagatataatattagtgactcatttaaaggatttttgaaagagagaacgcaatatatatgtaatattagctaggttgtaaggattcgtttctagggtgtagagatatggacagtcttgacacaaactaacacacacttccattaattggtcatgttggatttattctttctttgacaaaggtatcatgtaccacgcgcaccctaaagtgaaaatataacgattttggtgaaaagtttattaatatatagtagaaagctatttaagtttggagaaaaaaaaaagtaaatgccatctgtaaaaaggaatgatacagctgcatgacaaaatagagaggtatatatgcgtactttgtactatatacactaactggtccctactccccaaccaaacctaatcttaacttggacaaaataatcatgcatgtgtacgcacacgtttatgttatgttgttggattaatatttaactatatacaattgataaggatgatatagatttttcagaagtctatgcatcaactatattaacatacaaacttatatgatgagtgaaaaaaaatgaacgtacgattagtcatacctatatagctataaatagttatatatgattttggtttacttttactcctcattcattattaacagtatgggccggtttttgctttagagcactctcaatagttgagttaaaattgttcaatctttaaattatagagaaaaaattacaaaattgagcttccaacaagtgaggtaaaacttagttattttacatgttttttagcttaatgaatagtgtttagctaaatgtataaataagtattcattaaactaaacatattttaatattattttctttaatttttctatatgtgtaatagtatatgagttatgaatataaaatgaataaaatatactaaaaatataatatttaaatgatagagaaaaaatagagaagttgatgtatgatataatgtaaaagtttgaggtaaaatagataaaaaaataaagttttggtgttatattttaaagaatagaatagaaaaatattgggagtgcttatatatgattttggttttatataaatttgatagtcttctcattgttttatatggaggagaattatctaaattttgtaattaaatagtgtgtttttggctaaattcaagaaaaacaatatcattattcttagtgaattcaagaaaaataatagaatcaattaattaagaatcaattatatttatatgaactattaggtattagtggggtctagcacattatagacgtgtcacgttgcgattgattagtaatacactttaaaagttattatattaaattatataggacctgatatttgattgcaccaatagtaatattgatacgtagaagtagaagggtgttagccaccactctatttatatgtatatatcgttgaagagtcattatggactctaactccaagcagatttttctatttacccaccaattatttagaagttgctacaaacacttagcattaatagagaaagaaattgactagacttttctagctttgggtctaaactcaagttaaccacaaataaatctaaaaatttctagtcttgcatgtaaataactagaattttctactcttcataatatagcaagtgccaccgacttttggcatgtatatataggggattatt

SEQ ID NO: 27794 - DNA, 3358 bp, Cannabis sativa
tttttttttttttttttttttttttttttttttcaatttaagttaattttatgaatttatatttccatatttcaaaatgtttcaaaaattattccaattttaaaaaacttattacaaagacttagaaaaaaaaaactcaaataaataaaagagctcgtactatctctcagtgacggacccaaaatttttaattcttgggagcttaattattataaaaatatttattatttactttatattaaaattataattattttatgggagctttttactattttgttatataattatttaattaaatagaagatatttaattttttttaacactaatatttttttactgggggctataaaccccacactttcattactgcatccgtctatcctctctctacgatttaagttttctacgttacatatattagattgcctttttacatagtcaagttattttatgaagcataacatgcatattaagttatttttttttcatgtaaataaatacataattttgtaagaaaaaaatacataaattaaaagataatttatgcaatgtctatgcctttatcaggctgtttaaaaccgaaagtcatggaagctttggctttaatgtacgctcttcaatggcttaacgatcaccatttaccactgcactacattgaaacactctttgcttgtggttaaggggctgcaatcttctcaagcctacatatctgacttctatagtttgttagttaatatttctcatttagcgtccaatttccctggaggaaatgcctcatctcctaatgcctattgtattttaactatggttttaatataatagtattttgtcccctcgaggacatccgataatataatagtatttttatctaaaaataaaataaaattgatggtatagattattttataaaacagaatagaatgctataatatagacattaggttatctttctacataatcagtgtaagaaatttagttctaatatataagaattaacctttataattctagcttcaagatcatatttaaacaaacaaatgttaaatcaaaacaaacaaatcatcatattattaaagaatcaaataaaattttataaaaacacttaaaaatttaatataactatatgtccaaccacaaattctaaaaagaagtataataaactttgctaatgcatatgccacatcattggtaacacagttttataattttatgacgtactcgttattaatattacagatttagtattgacctcgctatgtctgttttgcaatgcagcttagattattttattaattaactacaaaaattataatttttatacgtacatataaatcatgtatctataataggatgcttttttggtcttcatgttaaggacactttattacacatttattaatgatctaatggtggcaagaacataaggagtataatagtgaatatggaatttattacaggattacatacctcttcaaattttttaatgaaattttaatacttattctttttttttttactttatgcaactttttctcctaatttatttatttattttttaatttttcctttttaattaaaaaataatcagtaaaatttatttttattttcaaatggttaattcagacttttttttttcttttaaaagaaaaatattttcatgatggtttagaaaaagataagttgatctaataaaaattagtgcacctctctcggtagatcccttattttggcatccaaaaaatatttctaattttttcagtgaaccacttgtaaatttttagaaaatttcaaatagtttataatgttgaattaaggttcaaatattttgttgcacgcgcgactattttttcttataaacgcggtaatcaactgtttgaattttattttcgactctctaaactaatcagaattttatgaaaatttacaggtggtcctaagtactacaatgtacacgatcaagaaaaaaaataatttaaaaactctcatagatgccaaaacatagaagagggtctatcgaaacaacccgaggtacgattatttctaaaatatttttctttttctaaattaatttgttatgatgaattctattgaaatcttctgtagtacacctttaaaagagtgttctggtagaccctatatctgttttggcattcaaaaaagatttttagtctaatttttttatcatgatcgtgtatgttatatttatgtaggattacctgtaaatttttagaaaattccgaatagtttataatgttgaaaataaagttcaaatagttacttaatatgtgtgtacattatatcaaatagttacttaatatgatcgtgtatgttatatcaaatagttacttaatatgtacgtacaataaaatatttaaatcttatttttgacattataaactacatgaaattttttgaaaatttataggtggtcttaaaatatacaacgtacacgatcacgatcatgaaaaacaaatagattaaaaaactctcttggataccgaaccagattgtgagtttaacaagataatccttccaaatgattatgaaatatcgctaaatatttgtaaagcacctcataaaaatagatttttttaattagttatttaatttatctgttatatttgacataaaatttattgatacttatatacttgttttgatttattggaaactaaaaacaaaaatctgtagatactacatttttttttttcaaataattatcttttattataatatttatatttaattagaaaaaattatgaatattactgttttttactttttatttgttatgtagtctttttttacaagaaaaaagacataattaggaaaaataatttatttaaataattaatagtatgatttttttctaaaacttttttttttaagtaagaaacttactttttaattgcaacaaattaattataaaaaggaaaattggagaaaaaaatcatgttccaataaaaaaacattgtttatgtatgttaaaaattattacttatgtaataataaataaataaattaataaaattcttttaaaataataaaaaaaatataaataaaatatgtaaataattactttttagtgaaatttttatatataaaactttcaataaaattaaataaaataataacaaaaaaaatacaagaacatttatttttatatttcttaacttattgtcaataattaaaattttaaaaatataaattattgtgattttattggattccgtaattttttttatatttgtaaaatatttttagtatcaaaatatttaatttaatgcattgagttatacaatatttattttgtactttcaaaattcatcttttattaatagttacaaaaagtca

SEQ ID NO: 27795 - DNA, 5368 bp, Cannabis sativa
ggtcgtggtaaaatatattcccaagacatctatcatacactggatgtatttcttcaagctttctccttatttttgcttgacgcttgtcaaggagctagcttctaagtcataaggcttggctactataaactgtttctagaacatcacctgtagatctttccagttatggatcaatcccgtagataatctcttccaccagtccttcacgaacttgctcaatgttaataaaaaacacatacacttaacatcatcactttccttggcaacctacatgatgcaattgtaattggacagaaggtccctggggtctatccgtccctcatacagttccatttggggcatcctaaaatgctctggcagtggtgcatcaataattcttttcacacaagccttcgtgtcctcttcctcagaatcagatgcgacaccactttgcctcgtagagatcttctcagtgatatttcttcatcaagtcctcaactttacgctcgagacattgagttttattactagaagattctcttatgcaaacacgatcgttgatgtggttcctcaaatcatttttacggggtcttgcttgtcgaccttagccttttccttttttgcatctagctttcttcgaagatcattggtcaatagacttccgccactgtcctcggatacctgatacacttcttcaacctcttcatcatggtaactggactcactaagaggaggcgtcttctttcaagactttggcttctaggttccagcatctgccttgtccttttacatgaccttgcctctaaaattgggttggtctccacgccctaaaggcgcagtttttgttcctcttttatagaggttggtcagcagctttagacttcttaggtcgttgcgtggaaggagtcttttttggctcctcgataacgacccttgcctttatctttatgtacacccaaagttccaggttccttcaggtctaccttcttaggttcattcatcgttggtggagctaccacgtcgagagtcgtcttagtcaacgtagtcattacagcctccattctagtcatctttccaagaaatatctggttgaattgatcttgttgagataacctttgtttgatcagttttagctgtcgcgccattatgaccacaggatccaactcgtcaggctagctttttcctccagtagcagtctcgggggctctatcttgtgggacgtcttcctgcctattctctggcataccatcattgtttacatccacatcctcggaactactatcctctatgttgtccataataggagcatcatcatccagtcttcattctgacgaccctactggtgactggtgacttctggaggatcactcgtatctcttgttctagtgtcagggactgcataacaaaggccagactaggttctggtgagggccataacttcgtgaacgtaactagtgagtggtccatactgcttccttcagctctcaatgaaagcaccaaaaggtttcccgagatttttggaagcagaataaaaataataagaactaaagaaataataactgacagagaaagtataataaggaacacacaggtttttacgtggttggagtattaacgagccttagtccacaagtcacttctattcggtaatgtattacttacaataatctcccaagtacacagagtgtatattcgtacattcgcctggacaaaagtacgtaagagaattcaacccctaatccatgaaattaattaggtatttatagtggctaaagaattacattaggattttcccttttccctttattggagagttttacaactgaacaatgtccatgggctcactcatgatgtccagcccatgaaggatacgatttgctgactaagcgaatcgggcttgagttgatcaggtcaaaactgtatccgattataatgggagaatattctgaaataactgtcctgtgcttgttatgggaagtttcctctttaatcgcgatgtgatattatttcccaatctgacaactcttatgtccttatttataggaggaaacaaatagaaaaataggaaaagtctttcgggaatgatctatcttcccccttcggcttcatgactccaaaattgtcttatggactcgatttgtagaaggcaaaaggtatcttaagcacgaaactaaggtaactctcgaaaggacacgtctggatgggcttgacccactttgccattaatgagtgtaccactaatgggtatgaaaagctgatatggaattcacgtgtcccattccggaaacacggatgatatattttataatagtgaacaataaattaataacacatgcaataataataaaaaaataaaaagatgattatataaaattgaataaaaaaaattcaaaaaaaatacataatttaaaaaagtatctgaatagtctcatgtaatttgataatttgatagtgtatgatacctttagaaaattatgaggtgcttcaaatatactaaatgatcaaattgctacccttataaggacatgatttattttattttatttatttttaatttaacttttaaattaatttaataatttaattttgttttaaaaaaataaaatatatggaacagttcttatacaataaaaatctaaagtttaaaattatcatggtgggaagtcttacatttttcattgttaatatacattgatagttgtattacataaaatataatagtgaacaataaattaataaatgctttaataaataatatcaaaatgaaaagttattgctctttgtcaaagaaaaatatgcataacaaatagatgaaaaaatttacactagaaaagatcagaatgatctcgattaccgttgatctcatctaaatttgatctcaacttaacggcgagttgtcatctggtcaataggagacaacaacctgatagagaaactttttggatacttgttatattgaaggattgatatatgctttaccaatatatatattttaataaggtaaatggttcaacgagtagttgtttctttagttcccacaaccccttgacgatgacattcttaatctaggccgactaaattagttcaggatcccacaaaactcggtctttattatttgttttaatgcaagattaattttaattaattaaacaattttaaatctatgtgataatatattaattgatcttgttattatatatgaagtattttttttctcaaatcttgcaattgttgtgagcaataacataaaatgtaatgaatattaaaaactaaccaattcaaattaagatgtgaaaaaaataataaatattaagagcatctccaagtagtacactaaatttagtggtgtcaacactatactatcacaccaaaatttagtgttaaaaattattttcactccaaccataacacaaaaattacactaaaaaatatttcatattattatattatttttaataatattaaaaaattaatattatattaatttaataaaatcaccacaattgttaaagataataatactgtaaaattggtaaaacttaataatgtctcacaagattatagtccatgattatatcggtggatcaagaaataatattccacattattgaattgttgatcacattttaaattttttaactttattttcgacgtgttaaatttttctgaatttgtcaaatttttcaggatatcttaaataactataatgtacacaaccataaaaaaaatagattaaaaaagtctctcgaatgctaaaacaggtaggagaacatcagtgcaccacttttaaagaggtgcactgaaaatttatttttattaccataaaaataatttatggtattcacatttaaattacacacaataaattaaaatgtccttctataatgcaccttttaaataaaagagttatgcgcgcaacagataatttgaaccttatttaggcattttaaatttatctgaattttttgaaattttacaggatgtcttaaataactataatgtacactacaatggtacaaaaataaactaaacaaatctctcaaataccgaaacaagtaagcgtacatcagtgcattattattaaggatgtgcattgtaatttcataaatacaattaataatataaacatatataaatattaattaaatgtatataaaaaaaaaatatgccgtgtgtacagtgcacaacatatatgacgtgcaatgtagcacacacgataatttgatgttgaatttatagttacattggagacatattcacacgccatcactaaatttagtggctccttggtgatgctctaagtaattcaatattaaaaactaaccaattcaaaataattgatctaatatgtacttttgcagattggattttggttattatttggattggattgaattcaaaatatgaaattcgcacttagtacagatcaaatgcactatgagcaaaatattacagaatgaattggattagcactgttattgagaatgataaagatgaaataaaaaactcttcaaaaaaataaacaaaattaataaaatataggcaaaaaataaatggaataaaattatcaaatgaatgtatcaaggactgaactcatgtcacttaataagagataggataacttattaccaaatatgctagaataactttgttatgtaaattgattcttattgatttatattttgttgggtatgaaatataaatataaatatatatgtactttttaatgtgataatatgtatttactcttttcaactatatatgtgtactactaactagttcatgcatgatttatatagatagtgtaattaaaataaataattaattcaatatctaaaaaatataaatatattgaacatttactttgaattgaaataagttgaagaataagcatattataaatatgtattattttctatttcaaataattatataattaaagtaaattaattttatatctaaaatttttgaacattataattttaaaaaataaattaattaatatactatgctaaaattttgaaattattaagttaattgaaattttaaattaaatataaataaagaaaatattgcttttgaaggattgaactcatgacgttttaattattctaagagtacttatattaattattataatttgaacatgttatagtttcctataagtatatttattgttttaaaaataaatttaattgaaatatgtttttacgtaaatttgaaattaaaaaatatataattaaaattaatttttttaatagacataaaataaaaggtaaaaaaattatggtttggaattagatttggagttttgttagtcaaatatataattaataatatttaaaattaattataaataaatatattaattatggtatagttttcaaga

SEQ ID NO: 27796 - DNA, 4410 bp, Cannabis sativa
ttttttttttttttttgccatattccctcacctgatttttttttttttttttgcttcatatttgatttgtagccaaaactaaatttgtttcatagacaatcatattgaaaccgcctcaatcactttaaaaactcctcttccatccttcttttttgcaaccctaaatcaaattaattcgcaacttgaatcgcaactcaagtcgtaatccaaaatacatagagatatcccgtcaaaaaattgcaacataactcacaactcaagtcacaatccaaatcgcatgccaatttattatgcaacaaaaattgcaactcaaataagtcataacccgacgtaatgcaactgcaactgaagccgcaatctaaatcacaactcaagctgcaatgcaactgcaattgaagctgcacaacccaagtcgtaatgtaactgcaattgaagttgcaatctaaatcgcaactcaagtcacgagcaacctgaatcgttattgtatgagattaggttgatgtaagagtttctaatatatgttgttgtatgagattgagttgttgtaaagattactagcatgagttgctgtaagggttgctaacaggttattatatcaaatttggttgctgatattattgttagaagagttgctaacatggttgtatgagactaagttgctctaaatgttgctagatgcttactctaaaaattgctaatatatggtagttgtaagagttgctataaaaatagtaaacactcttaagacttttgagtaagccattataaattacccaaaatgtgtaaaaatgactacaatgagcactattttagagaaaacaaaaaagagatattattaattcatcatattgtataatactgtaagagtattcataatgtgtattcaaaaggtttatttatatatagtgagagtgtgtgagattatgtagttgttaacttggaacttagtgacgtggacgtcaatgtgtgacacgtggcaagaaagatgacatctcagagttgagtagtttcgcgtcatagcagtcaacctgggagggatccctaaccctgtgccgaggttgacttcgagaactctaaaatagaagtttggactttaataacccgttttcaactcactatcttttagtattctgtgccatgaagatatggaacaatcaaatacatatcttaagagctaaaattacatgaacttgcacctagaagtcaacctgggcacctaagattttacccaatgcctaggttgacattcctaactagggttttagtttttgagaccgtcttagtgcaaatgggtcaaactttacattgggacatgaactagacataccatgagcatatacgaggcatcatcaaatttggagaaagtttatttttgagaaaaagagagaattatacttatctttcattatattatgtatatcatttattaaatcccaaaataagatgaactcgttgattatgaagaattagcttcaaaatcacgttaaaaatcttctttatttattattattatttccattattatttatttaaatcctaagttcatattacgaaaagacttatttattggttaaccaaattttgtgttaacaagaactaacataattgtaattcaagtttccaaccatgcacattattagcttttcaaaatagaagttgtaagaattttctaagaaaatttaacgagtgaatcaaagaaattaataacttgaacaggagttcatgattattcatgatttaggtcaatctattaattaatcattattatatgaattaggtctttatagtaaacgacatgtttgatgaagacaacttacttacatatcgatccatgtcatatataatatttatcatatacagaagctttacttagatatctttctatatcaataatctgaatcgagattgcttgcatcgaataacgagcatcagtgaaccgtaatagcatccgttgattaaaaattccataactttaatatcttactgactattttttattcatggttagtgatcttaattcttcttacaatacaagtgacaacctcatatatgaacaaataattttttgatatttatatataaagtattcaatataaaatattaatattttaacattcaagcatatataaaaagttcaactataaatgtccttatagacttttcagagcataaatcctaacatgtactccattcttgtaataaaatcatttctaatgaagattttaattttgtttgtactacttattttcttgagaaaattcacaaatttcttttcataaggcctctaacactgtgtttacggctcttcttcaattagtgatttttgattttacggcccccctctcataccttatctttaaatgtttataagtattacatacactttgtagatgcctattgtaggttcacttggatatatatgctcaaaataaaatatgaggccttcaaagttttctaacacttcaagcaaaagttgaactacaattgggaaccaaattattagctctttaaactgattggggtgaatacaaaacctttacaccatttctcactaaacttggagtcatccataggcatcccttccccacgacacatgagaaaaatgggttagcggaaagaaaatatagacacatagttaaaaatggccttacattgcttgctcaagcctctatgcctcttaaattctgggatgaagattttagaactgcattgcatctccacaataggcttccacacctattctcaatcataagttgcatattgaagtcttgtacatcaccaaaccagattacaacaccttcaaacacttggttgcacttgctatcctaatgttaggccatacaacaaacacaagttagagtttagatccaaatcttgtacctttcttagttataagtgtctagactccacaagtcaagtatacatatctttatatatatatatatatatcattttttatgaacattcattcccttacaaaaaatatgtcacttcacttatgtccaattatccacatgtgaccaatcctactgttacttctcgtatccctactcatcccaacccattatacctaacctccattaattacattagatgattcatcttttcatgcaccatcatcttctttatcgccatcctctagtgccaattaccatgattcaaatgctcactttactaatattactaatgagactcttttacaggccactcctgagcatcactctcacatacaacaacatcagcatagcctctcaccaccactaggctttcctcatattccctctaccttaggtgtgcaaagatgtcatcagtagctcatcatgtctccacctccaggacgggaacaatcacctttgcatgttgcattgtctcctactcctgcatctcttcctccaccaggtcatgcacctatttctattcttacttctcagcatgcatctctgcttaaaataggtcctacacttgtttctgatgtttcatcacttatggtaccttaaatatccactcataagatgcaaacttgatccaaattaagtattcataaacaaaaaacttttcttgtttccaaagtacctctctcccttaaagaggctcttcaacaagaaaagtggctatgtgccatgaaaactgtgatgttttctctctcataaggaacaaaacttagatcctagtgccacttgcataaggtagacaaccaataggctacaaatggttctacagaagagaatcctaatggtactattaatacatacaaagctagattggttgccaagaaattttctcaccagcctggctttgatttcacatagacttttggtcatgttgtcaaaccaatcacctttcgagttgttcttaccttaggcttatcaataaactggattgtaaaaaaacttgatgttaataatacattcttaaatagggacttaatcgaggaagtttacatagttcaacctctacggtttgaagatccaacatcaaagagcttagtctgcaagctcaataaagctttatctggtctctcaaacaggcaccaaaggcctggtttaagaagcttcaatagtggcttccttttggcttctccactttcaaatcagacacttcattattcatttaacattatgctcaaggtacaattcttgtactagtctttgtggataatattttgattattggcaacaatcaacaagccatagattcacttgttcaagcactgaatcaaaaatttactctaagagatcttaaaaagttgagttactttctaggtgttgaggttaactacacatcagaaaacatgcattctcagatcaagtatgctcaagatcttttggctaaatccactcgaacactcttatgacaagtgatatgcaactctctgcctttggcagtggcattgttgaggatgtgcagtta

SEQ ID NO: 27797 - DNA, 2462 bp, Cannabis sativa
tttttttttttttttgacaaagttcattctttaggtagtaggaaattacagtcttgatattccaccaacgctaatgttttatactgtgaattgttaataattatgagctcagagtttgtttgtggtagctactaaaaaaacagaatgtatatatttgtgtatatatattgaattagtaataaatcacagtccgcaagaatggacatggattgtactactaacctctgataactatagtttttccctggtaacgtgtacctctataattttggatttgtgtaactaaatggatggtttttgttcttcagatactagatttttgtgaagaattttgaactgatatataatatttgtttagtatttcaatttcattagtgcagcttacctgtaaaactgtcaacactcttgtgggggtattgagggttgtttgataatcatacatttaagttactatttgggtattgagagttgtttgataatcatacattttacgttactatttgaactcttttttcattggatagtagtgtactttggcttaaatggaatctattttgctggataattattgttgaatgtccatgttagataacttagttcttgcgagtcaccggtcttggcctcttaactttgacatttaatagtcacaattgcattcattagaagtacaatagatttgaccggtgaggcagttgattgtaacattgtgctttgatcgaaggctcaaacacaaaacaaagaaagaaaaaggaatactgtaaacatttttatgatgtatttgtttacagtttattgacagcatgacctgttttcaaactagctgtaacagatttatattgttacttgtaatttccactgacagctctttcttagattatttcttttgaccaggacatgggtgatactcatattaagcaaggcgctgtcctttggttaaattcataaggatgcctctagatggtaaattactaattgttagaaaaaagagctttagtgagggattgtctcttctcttgtatgagtttgaaattttcaattggtagatatgttactctaattttgtgtaagtttgtgatataaaagattgtattttcagtagtttaagcaaatcacgttttcttttttgctgaagattctcacgtcaaatttttagttgtgagatttgtgaggcaactttattagttcttttttttttcctttgctaataaagtgtttgatcttgcagaaaaacagagggcaatcagattgagacaagactcgagtgagtctggagcatgctttgtggccttcagtggcaaggatgctgaaaaattaaatgcaagggtgacgaagtctgtgaaggcaatttcaattcaggcaatgtctccaaaaaagtttattattttggactccgctggagatttacactttttgtgctggtccaaccatgtacctggacttgataaggccagtcacatgcaacggttgccacgagttatgaatgttcaaaggctggcagtacttgctgaatcttctataagtattaatctttctttcttttctttttaaaagactatatgtttggaagttggattttggtgagaaaagaaaaagacaaggaaaatgtaggaaaaaaagtgtggagaataaaaaaaaaaagtcaatttttcatgtttagtatggaaaattttgttgaatcaagtttttttccatacaattttcctttgcttaccaaacatgagatgttttttatttttttttccttacacttttctttcctcaccaaaatcgaacttccaaagcctaattaatttgtgaatattaaagtggtggatgtcctgaggtcttctgaaaattggttaatcggccagtttgctcatttcttttcttttgggtggggcaagcagggctttgtgttgtttctttgtgttgccaatagttcactatctgaatttgtatatattacttttgactttttgaactacgagccaagtttttactacaccactgctcatcaccctttgttgctaaaggatgcttgcaatcattttgcaggaactcaaactatatgggtgtcagatggatgccattccttgcacatgatggaagcatcagacatggacactgtggttaatgaaaacgataggacagataacgaggaaaagctgatgcaattctcaggtttttttgtagtcccgttgtttgctagttaaagtcattaaattaataagtctaaattgtgttaaacaacacactcacttgaaacctatatgcttattgctacttttcttttgcttatttatctccatattctctgctagttattcgagcaattttcactagtgaaaagattgaagatgtcattccattggctgcaaattctactttagttctcggacaaggtaatatatagtattcttttaacaaaatttacttctttattcctgtttatttttggacttctagtcataattataattatc

SEQ ID NO: 27798 - DNA, 2003 bp, Cannabis sativa
cgtgtcacagtatttttgtaaaagttaaccaggattccagtatttttgtaagtttccctatttataaactaaagtatggacatgggcatacccatgactcgtctaaggtttctgcaaaaagcctacccactgttggagtaaaatacataagcatactgactattgggcccccaagataattctttctcgtaaggcaaagggtccgtacagtggggatcattgttggtacgtacaaattaaagtcttcacttagtagacaaaacacccagagaaaccgtcagacaaagtcatccgactctcgcttcgtgataggcctctcacttagtagaccatggagtgtgcgcactactatggtctgacacagaaaacaagatctgattctgtgtcagaaaagaataacggtcaattaaagtcatttggctctcgcttcgtgataggcctctaatttttcccgcgcaattagcatctgtcttagactcttcagcatcttcctacactcttaagtaataagtaagttggtcttctctgggtcccgaagagacgataagactttcgggtccaagatagtcatttgctttgtggcaaatctctaggccttttccatattagatctttcccaggctaatataatctttccatgacctttcgtaattaaagagactccagcaataatcattcgaattattgccttctattttttactacatatcttttgtccataaacacggacaacaaaatacaacatataaacaacgtttaaataatatattataatattgttgtacatagtcttgtaagaaaaaagacttcaaattcgtaaacatatatataaaaaaaaaaaataactatttgtccctgttgacctcactagctcattacattatcttttaatttttttatttactttatggtgaacacatgacattatcatttcaaatgaggtaatacaaatgtgaatgtgttaacaaacaatgaaagatcttaaaattttaaatttattcacatgagttaatggaacaagccacatcataggttgcatggagaccaacaaagaaatagtaaagaagcatcagcgcagtgcagacgaagaacctgaagaaggccaccattcccaaagacccaataagaaaaagattaaccacaatagacagagatggcagccatggaaccataggaactccccaaacctttggaactctttgctttggaatcagtgtcatccccaaattccccacggaccaaatcaaggcagccacagaatactcaatccaccctcgcctattcatgttccaaagtatagtaaacccaatagaagaaccaatcacaagagataaaaaagtaatgaatttgatcaaatcttccttttccgtaacttctctaatgtagtacctcctaactagcaatgcaatagctataagcataaaaatagagagcgtactgatcgagaaaacgcttgacaaaacatgcaaactcgtaaaaaatgttatgactgagccagtaatggttatcaaaagagtggcataaattggggtaccagattttggatgaacaagagcaaaccaaggtggaatcatatgagctcttgcaatttgagtgatgtaacgagcttggccgagagacataacaagcaaactcgaagtcatacctttgagggcacatatacccaccaaatacttggcccaattcatcccaatctttccaaaagctattgaaaacgctgcgtttcgatctatttcagtgtatttctgcagcatggtcaatgacaaacccattaggcaataaattacagtgatcatactcattgaaccgaccaaaccaatggggatatctctagagggttgcttagtttcctctgccattgtggccaccatatcaaaacctacatatgacatgtatacaatagcagcagcctcaaaaacacccttctctccatttgggaaatatggattcagattcgaaacatcgccacaaacaattcccattactataatgaacacaataac

SEQ ID NO: 27799 - DNA, 1967 bp, Cannabis sativa
actacaactattttcccctacaacacaagtaaaccaaactggtcctaagacaattttaaccactaactttaggtaaatttaggtatatctacttataataggtatatctaaacctctgacaacaatgagttataatggctagaaactaaaaaataaaataaagaatcatccataaaatactctccattaaatgagctaaattagctaaggaatttatctaagcactatcattctctaaatatagctatacactattcattcttttaacttattttattattattattttttttttgattaaaggaaaaaaaattattaattaaaacagaacaaatgctacacaaactaacatctacaaaacaataaaagaaagatttatttacatgttacaaacaaaataaaaaatttgttagtcactcttaaagagatttctcctattaacaagtagtaatctcactttaagcgtaactctaattaaattattcacataaaaaacatttttattattttattttttttcttcctttttcttttcttattcaatcatatttttcatttaaataaatatataatatttaaagtaaaacataaagaagctaactattgtataatgtaaaaatttgagacgaaaaagagaaagtaaaattttagtgaaatatttttaaagatagagtcgaaaagctaattggagtgctaagctcaatctagtttttgtataaagggttagaaaaccttagatgaaagtaaattttctatttaatttgtttgattgatgagttttttccttggaaaattttgattaatcaatgtggtttataattttgaaaatgttgaaggacatggacatcattagtattgctaagagcatttatgttagtttttttacttttattttttaaaatatattatcaaaacctcattttttttttattatacttcaaacttttatattatacctttttcaatttttttttttattttttttttctatatcactaaaatattatattttataatatatatttattattttaaatatataatattaatatatacggacatgatccacatataaaataaacaaaaaaaataataaaataataaatttaaaaacttctgtacatgtggagaagtactatttattgcattaaaagaaaatataaaataactcattatgcatgctattaacttatctcttctctatattaaagaaaagctcattttgaaggagctaatgtgagtcatgttcttagagtatacatttgcttaatgcatttcctcttagataaatgaggaaaggtagattcggaaaattaatcttattttaaactaaagaaacttaacctggtttcttctattttattgaaaaaaattattctttttgttctgatttgattaaaaataataaaatatcttcaagtgggttaagctagcaacattactagttgtctatattgttgatactcttagcatggctatataactaaataattaatgttacactttttaatttaataactattaaaaaaatactaccaaacaaatgtaatggaaattaatatcaatgctatttttattaagctctggtcattcatttagtttcgatattaattactcttgtcataattgaagtaggcaaattagaagtaaaattgatgcacattaaagttaatactaataataaccacaaagtggggactgaatgcctaatatcaatgcttcaataaacacattttttttttcctttttcattttgaaaaagctgttgaaaatgacttaaagagaaccttcatgtactgatttatttattttctacaaacacaaatttagaactaaaagggtaataataataacaaaaagaaaaggttggtccacaccaaatttccttatttctttctagcaattataacataactccattgcgcaggccatttaaattaaaaggtaccaccacatctaccacccaa

SEQ ID NO: 27800 - DNA, 2525 bp, Cannabis sativa
ttttttttttcctttttacaataaacacatacagttaagttagttacatatattccctcaaataaaagaagttagttacatatattcttataccaaaatgaatataccgtatcaaaatagcttcttcaaatgattacatgaacgttgtgtctccgcttggtcatcacactgctagtgggtaacacacaaattttgttaccttttccaactacagaaaagcatcacttgcaatatgagctgatagattttctctgtactttttatttcatcggatataactagaatttcccattagtaaatcaagcatgtcatcaggagttacgagtgttgttccacccaatatcaattctacgtcgggtcttccactatcagataatgcctcttgagcttctcgtacctttgcacgccacattaaaatgaagtcaggtttcgatttcatatgaatgtagcattttcgcagtgagtaaagaagaaaagaaaactcaaaatagttgaagaaaatcagacctcaaggccgttaatgcctccaacaatgaaaaccataatgacattttggtcccctagatttggttttgcctgaaaagtgtttagctacgatctttagcaagcaagatagtataatacgttagatttaggagcaaattatggaagaaaatcttacctgcccgaggccaaatcttccgaatccactcttgaaaagtcgccccaccgtagaggaatggtactccaatgcaggaacatcggttttattcataactttcattaaaagtttgtaaagtaggcctttacttgcgtaagggtctccaccaaaattactttcagaagcaaatgttccatctcgcaagggtttgtttttcctcttcaaactggataactgatgtaggaatttgaaaaggttctcgaccctgtcacgtaattccaacttcagctgcatgttaccataagaatctttcttaccactatcctcatcatcgttagcatcttcatcaccccactcaccccattgatcatcatcaaaatcatctttatcaggttgattgggagatacttctttgttttcctctgagttaatcctgttaacgttgctctcaagctcttccacaagtccatctagaaatttcagtttggttacccctgggttttcaagaatcgcatcaactacagaatctttcaataattgctcctcttgccatgagaatgggccatcaggtccagatgtggggaaattctcaccagccagtatatatccagtcaccataaggagtaatgcatcttgaaatgagagtaaagcttttgaggcttcagtttttcctttcttctggccaagcgattttacaaaagcacttttattaatgagatcttcaatttgagaagcaagattctggcttgtgtctccaccagcacttacactcaatattttctcagcactcatgaatgcatcccacctcgaagaatttgattcatcaagggcaaccagtgtagctgccgccaattgaataattcctttgtttctcaataaagaagattgacttttagccagtgctttaatcatagcttgcaactcttgttttgtcacaaaaccaggacgagatttaacattcacagttaggttttccctgcgaatggcttcttgaagccacttctttaccaaaatggatccatcttttgttcttctatctaatatggcttccaagtatggagttccacggaagttatcagtggagacaaaggacccatttagatgctccaacttagagtaaagaggttcactattatgaattttgtttctgagattaatcaaatctacaatttgagaatccgagttgctggagtcccacccacatagaaaagcttcaacgctttcagagagctggaagttatacgtttggtagtcctcatcatttaaaattttaacaagtggtatatgaacatcaagagaagcacgttgcaggctagaagggccattgttcggtttgctttctgagcctcttatatgagtgtagtacttggttttctctcgtctgggcaaagatgaaaacatacgatcaacaagtgaatctccatgacagcatggagtaagaagatcaagtgtgcggtcaatgagtaaaaggcctgctgatcgtctgcgtcgaccaacatcatagagacttgacatgtctgtcaacatctttcctattgtatttgagagatcgccaagagaatatatttccatctttaaatccatctacaaattaagaaaagataataggaggtcaagatagagtacagagctacaaccaaagaaagcctaacaaattacaatgtgggaagggaatttaaaggttaagtccttgagctataatttaaaagcactttaccaaactgttctgattttccactactgttgttaatttaaatgcattttactaatgtttgttcaacttctagtggcaacttaatatttataccaaacttaacaaggctaaatctagcttataaagaaataattctgttaaaacagtaaaaaaaaaatagtaagacaacta

SEQ ID NO: 27801 - DNA, 2353 bp, Cannabis sativa
aacatcataaccaatactaaaatcttctaattattttagccattcaatttactaaaaaaaccattcatattagtatctatctctacaagaaaaaataataaattcaatacttattaacttttactacccaataatagaataaaatcaaaaatatccccaatttactattaatgtccccacctcccatttataatttttacaccaaaataatattatgttatatatagtgaaactcatgtaacataatttcacagcctatgttctaggatagggaccaaaggattcggttcatttggctgttcataactaagacaataaaatttagaatatgaagtattatttatgaacaagaaagcaatctcatcaacacaatcaatcaataatagtaagactagaatgattagaaaattcaaataagtatatagaactgtcatcatttcatacttagagaaatatcattttagacagccacttgaaaagacttggacaatttactcagccgaaaactcgaataacatggtgtgcttgtacttatcgccgggctgaacaacaaccgaggggaagtttggctggtttattgcatttgggaaaccttgtgtttccaaacagagccccgaatgctttccataaaccgctcctccttttcccttgaccccattgacatagtttgcggtatagaattgaaccccgggagcattggtccacaagttgaggacccgtgagcttgatgggtccttaacttttgcagcgtgtttcaggcctgatttttcttccccgagatcaagaacatagttatgatcgtatccaagaccgacctgttggatatcatcaccaatcctcttctcagaagtgaaatcaaagggagttcctttcacgggaagtatttcacctgttgggatactggtttgatccaccggagtataattgttcgcccatatctggattttatggtccagtatgctccccgagttatgacctgctaaattccagtaggtatgttgtgctaagctgattggtgtggccttgttttcacacattgcttccatgtcaagtttcaatgttgtgctcgatgtaagtgtgtaagttgcagtaacggaaacatctcccgggtaacctacaaccaagaaaatcacaaaaatgattaaaggggtttggttaaagtgatagagaaacgagattaaaacacgaaaaaacatggattttaccttcctcgccatcacaactgtgatacttgaaagtaatgtgagggttttcgcctttttcatgttcaacaacttcccatatcttcttatcgaacccgttcttcccacctaaacacagtaaagagtaacagtacacattggaaaatcaattgagaagacctaactgaagcaaaacacaataaaatttttgatatagcttctgttccatcattcggtctagtaatgtggtcttagaggaatatcccgaaaaacatgatgctcagaaaataattttctatcatttgaggcaaactaatccaaacaaacaggcaatcctacacctaaccatattgagatatttgtaaaacaactataagaaatagaatacaagattgtccaagatcctaaatttattatgtctacagaaattttcgctatagaaacataaacagaagtccatttgtttgactaaagtggctatcaaaagcaacatgttttgggtaatttaggaagaaactacaagagtacatggtttcacacataccgaagaacatgataagcacataagctttgttctctgttttgatagtttttctgttaggaagttagttgtggattgcccttagttagataagggtagataaagtaatgaagggtttgtaaataagcgtagccgaaattgactgaaaagcgggactgagaattgtattggtgagttattttgactattgggaaagggggaacctcttgaatcaactcagtgtaaccattattgggttcagtctaataaccaatcaattgttgatacaatccatagaaatttcatgtaaggttttgtgttttatgagctagaattgtactaatattatgacaacaaaataagatgaaatttcataccatggagactgtttggagggttgttgattggtagagagtattccactccattcagagtaaactttccatgtttgatcctattggcaactcggccaacaatgcttccaaaataaggagcaacaccattctaatcacacatacattgtacaaacaatcatgaaattattcaatgagatcaatcgaaaacaagatttacagctctattcaatatatataaaataaatcaacattgaaaatacaatttcgtactatgtatttaacaaaagttatcaatc

SEQ ID NO: 27802 - DNA, 3298 bp, Cannabis sativa
  modified_base (2679)..(2680): a, c, t, g, unknown or other
tcaatggtcgtatcagatttgacatttgagtaattgaaggcagtgtcttaggttgattgtcaacctgggcattgggccccttttctatgggcaacagaattttcattatttctgttgaaagaaaaaaattccctgaacacatttcggtgaatttgatcggaaacaacccaggttgacaatatgtcaacatgggcactgggcccagctccaggtgttaacctaggcgttgggtcccaattttgccccttcaaaaattctatttggttcctaaatatagttggatctaaatattttctaaaaacgaagaagatggttggaagtgttcttgggaaactccatttaaaatggcacatgttggaaaatatcaacttgggcgcagggctagcccaacatgtcaacctaggcgttgtgccctattttttgtacccaagaagtgttgtttcttctttgaaaggacctatttcctgtttttgatgaagattaagaagatgcaaaagttgcaccttcgatatgatacttggaaggtgccaagatttacagattgtcaacttgggtgatgggtgctcaaggctctgggtgctcaaaaatggacttgctccgattctaattttgatgcctcaaatatgttcgtggtatatctagttgatgtaatgtatgttttgacccttgtgcactaagactgtccgaaaaactaaaaccctagttgaatatgtcaacctaggcgctgggtgaaaccctagttgcccaagttggcttctgggttgcaagttcgtgtaattttagctctcgggccttggattagggttttccatgtcttcatgttataaaatacttaaagatggttagttggattcaagttattgaagtttgaacttccatcccaaagatcttgaagtcaacctgggcgcagggctagggtcccctcccaagtcgactgctatgattcgggcctactcaacttcgtgacattatccttcatgccacgtgtcaaatattaatgtccacgtcaccaaggaaagtttccaggtttaaaataggcatacgtgcaacaaaatatataaatcttatttttagtattgtaaactactcgtaattctctaaaagttttcaggtggtcataaacaattataatgtatgtgattatgaaaaataatagattaaaaagctctcttgtatgctaaaataaataggaatctatcaaatttaagtgcacaatatacttacccaataatttattgcttacttttttatttgtttctaacaaaaacttcgtagaaaaatctgattttttagaacattataaactaattgaagttaggaatattcttatggaatgaaattatgagaataattgaattgttagtattatagaatgtctttagcaaaaaaaatttgttttatgtatctttaataaaatgccatcccatatgtctcatgagttcaggcatcaactacactacatatacaaataaataaataaatgatccatatttcaagaaaaagaaaaaaaaaatacaaaatgggatttaacaatagcatgtgtcattaaaaaaaaaaaaaaaaaaagcatttaatcaaagtactagtactattttttttagaagtactactacttacttttttaattttgaaaactatttaacacatgatggtacactaatatttgctggacatcaatctaatagtttgaaatctattgaggtttcacatccctcaaatataagtgaggtttggccataataataataatagacaatgactaatatttatataaaagattgcatataatactttgtagataaaagaaatgaagaagatgaagaataattattcaaattataaacattataaccaacaagaaaattattcagcatataaaaactgtaacataagcttaagaaaaattagttgagactaaacattaatcactaaaaattgtgttcttttttccttgtttataactcctatttatagaagaaatttagttgctccaaacgtatctctgtaatgaagagagtggctcagtcgctgatgacagtggccacgaggcacatcaaagatcgtccaagctcataatcatggggtttgggtctgattgggtgcaaatggccattatgggctctgctaaattaaagtggcccaaaacatttgagctgggccaatttatattattgggccataaaggcaccaaaatgtgattgaatcctttatctttgtggggattagaaatggaccatgcaaaatgaccctaaatttaacaattaagttaataaatattcctttttttaaaaaaaattaacaaaatgaccattcagttaaaaatttgatgataaaattataattataaccttagataataaaccctaactttctaccatattctcatcttcttgtatccagaccactcgtctctttttttccctcaacaccaagtctagactatctcgcctctaccagtccgacagccaccccttgagtattaccaccgcagatcgtcaccgccccttgccagttaccattgcagatcttctacctttgtatttgcagatcttctacctttgtatttgttacattttcttcaatttatataacatttgtacttttacattcccattataggttattttttaaagattaggaaaaaagctcaatgctatactatattttctatttggtgtnnctggattgtgaaggagttgttttcattatattttctctgtgttaataatagccttgttgctattattaagctgtgtttctttcaggatttttgaactattcttactatcttccttacttgtttaatgaaagtgactctgagatgcctcatcttatgaccaccctcctttcatattgtcttcttttttctttctttcttttttacttgagaatggtcagtgcacaacccctgaatttatagtgtgacagtattttatttcattatagactaattaacagtaaaataataattttaacactaaaaaataaaattaacactaaaaattaacactataattttattttataatagttacctaacaataaaattaactccaaaaataatttagagtgtttaatcatttagtttagttttgacaatccaatttaactgtgcattgttttagagtgttttgttgcaatggcacctctaatctttgagaaagtatattgattttaagttgtagtatatatattatatctaatagaatttaaatctatataccaacaatttaattttattacatataaaaaattactatgatttctttgtttgttaggaacaaacaactattgtgga

SEQ ID NO: 27803 - DNA, 2008 bp, Cannabis sativa
aaattattaaaaattaagctcatggccgtatttttattattttgaaaaatatagggtttattttgtcatttaacaaaacatagggtccaattaattttgcaaaacacatagttcaaaatagtatttacccttattattatatatgttttttttacatttattagtaattcacatgagacttttacttttttgagttaacaaaaaatgaaattgtgtgtgactaaaattttatattcttagtttcttctagtttgagaaggccaaagtggtttcacattttttttaaatatgtggaaattaaagtatttaaaataaaattattttttgatgaaagaaatttgtattttttgttaaaatgtgtgtatagaaattttgaaaataaacatatagaaaagatttaatttatttttatttatttgtaaggtaggaaagatttattagaaagtggtgttgtgagaaaaaacataataattaaaatgattattaattagtacttaaaaaattattaggtgaaatggaatggagatgcaggagagctcaacattaatggaactaactatacattgatggattgtcattggcatacaccatctgaacacacaatcaatggacgaaggtactttataattatatatttctattttagggttttttttcttacattttaaagtattttttttttacgaaatatatattataatttacgaaacaacttaaatcacaacttaatttatattgcaactcatgcagcaacttagattgtaatcaatagagtaacccaaattgtaaaaattaaaaagaaaagttaaaaaatagtttatgggataatttgtcttttgatcgtgtgaataacctaatgatggttactaaaaaatattagtataaatataaattttagaaatatttaactattagattttgatctcatcgataataaaaagaaaattggaatatctatatttaattaagaaaaaaaagctttaattttacattatatcaaaattatatttatgtaaaaaatatcgaactcaaattcaacttttattttttatatatttctcactcattgtagcaaccccaactcatattataatataaaaatgatagaattttttataattagatcgcaaaattgagtacgaaaactaaaaaatttcttaataatactcatgacctatttaacatatggtcatagcatcttgaacacatatttatgatctatttatgattttttatagctttaaattaactttaaatacattattaacaagttagtttcgtgttagtattttcaatccgaacatgattcaaactcatttaagaaaaactgaatccgataatttcgtgcaattttcaagtcgttttatcgtgtttaatctattttgttgctcgtaaaattttaccaaaaaataaaaacaaaataataagaaccaagaactcgaactattatggcaaaaatgaatcagttttatcaactttgaatcaacacatgtacaacttgaattaaaccttgtaaactatacaattatggtgattaacactattacataattccaaaacactcaaaaaacactcaagaacacttaaaacttgagagagatgaacccaagaaacccctaatttcttcaaggtactaattaatttgaatgagagcgaaactaacttattatttataggcttcccaagttagttggcccgatcgagtaagaagaagtcttaaccaatttaactactttcgttgccaagtaggattagtagtgatgaattggacaatataaagtggactaaatcttcaacacaaataaactactattttataaatattgtattactatataaaggattaaattgagatttgtatgtatatatatatataaatatatatatatatgggtaggttcgatttggagcttcacattgttcatgagaattctttgaatgagactactgtggttggaattctctaccgatatggcttgccaaatccctttctttcaacggtacaaat

SEQ ID NO: 27804 - DNA, 3327 bp, Cannabis sativa
  modified_base (2172)..(2186): a, c, t, g, unknown or other
agaattagaagtaaactttagatctctattcgaaacgtagactttggtacatcatgaaatcttactatctccttgacgtacgaatctgcatattgatcaactataaaggttgttttaactggtagaaaatgcacaaacttcgtgaatcgatctatcacaacccaaattgaatcaaacaaacccgtggttctaggtaatacaacaataaagtccatcctgatatcttcccacttccacttaggtagtgttaaaggcttcaacaaacctgccgatctctaatgttcagctttgatatgctaataggttaggcatcgcgataccagttctaccacattcttcttcatctcgccccaccagaagtagggtttaagatcttaatacatcttggtggtgccaagatgcaaggagtatggagtggtatgagcctcttcaagaatttcgtttctaagttccgcactacttggaacacaaaccctggtctttaacaatagtatcccactatctgacactgtaaatctctaatttgaccagctgaaaccttttccctgatctccactaattctggatcagttaactgagcagctttaaatgtaacatatcagattgtagcgtcaagttatgtaatttacctacaacaaactcgatgcttgatctgaccatgtcctccgctaactgaggtgaaatcttaatcatactagttacctacccgtgccccttcctgctcaaggtatcagccactacattggccttcctaggattgtaagggatttcacagccataatccttaaccaactcttaccaacgcctctgtcttacattcaaatcatttcgagtaaaaaaatatttgaggctcttatggtcaatataaatttcacatctctctccgtagagataatgctgccaactcttcaaagcaaaaactacctcagcaagttctaggtcatgagttgggtaccgctgctcatattctttcaattgacaagaggcataggcaataacccagtcgacatgcatcagtacacaccccagaccctgtctggattcatcaataaactacaaacttctctttatcagaaggtagggctaacactggagctgtgattaatctctgtttcagctcctgaaaacttgcttcacacttatccgtccacacaaaatgttgattctttttagtaagctgagttaagggtgttgaacttttagagaacttttctacgaaccaatggtactaactagttagacccaagaaacttctaacctctgcaactgttttcaatctcgggcaatccttgacgagttctatcttccctgtatccactttcattccctcattactgacaatgtgtccaagaaaggacacctgagataaccaaaacttgcactttgaatttggcatacaacttgtgttcttgaagtcactgtagaaccatccaaagacgttgctcatgctccttttctaatttgagagtacagagggatgttgtcgataaatactataacacacatatcgaggaaatccttgaataccctattcataagatccataaaagatgcgagagcattggttagtccaaaagacataaccagaaattcataatgcccatacctagtgcggaaagccgtttttagaatgtcctcctctcggattctcaactgatgatagcccgattgaagatcaatctttgaaaagactgttttccgcttgaggttgaattctcaattctttaagttctgctggagccattctgaaaggggcctttaaaactggttctgctccaggtgccaaatcaataactaaatcaatttccctctgcggtggtaaacctggaagttcatccgaaaaacatctaagaattcccgaaccactttgatgtcctctggcagaacagacacaggccgagtggtatccaatatcacagccagaaactatagacatccatctcataacaattctctagctgttgatactaaaaccactgggatccgagatccctgatctgatcctacaaagacaaacagttcctcaccttctggttggaagattaccatcttcctcttacaatcaatactgctgagtacttggataagaaatccattccaagtataatgtcaacatctactaaacccatttctattaagttagcactcaactccttatcctcaattctgatnnnnnnnnnnnnnnnccaccttttggagatgactaactctccgccaggcagtagggttccaaaccctatatcataactatcatgcgatctacccaagttaccaaaaatgttggctgccacataagaacgagtgccccagattcaaataactcagagaagtaagagttgatgacggggagctgacctgttaccacaaaagggctcgcttctgcatcaacatgagttatcacgaacacccttgctggagcgggtttcgtcacagtcttttgtgcttcagtcttgaattggggacactcccttttataatgccttggcatgccacactggaagcacccctgctctctacactcttccagataatgctttttaaaactggggcattttcggtaattgtatcgggtttcggagctaccctgatgattgtctcatcctaggttcccttggaacctcttgttctgacttgagccaccaaatgcagtgggtgcctttcttttttggtcagtggtcgagccactacctcccctaccaaagcctgatgtaagaggagtacgagccccaccaataacccgagtctctcaagactgcagggtgcactgtactgcgccctcggctcgcaaggccttacccaccatatcagcataggtggtgttgtcatcagtagtgatcattaaatcatgtcttatcttcgagttgaacccgtccaggtatttctctttcttgctaaaattagttggcactttttcccgaggtaattgtagtaacatcatgagttagggataccatgtcccaccatactcggtcgtcttcttgaaactagattgtggcacaggccgctctgtcattgccggtaacgcccatgaaattcagaattctgataataaccgttagccaatgcttggctttcataacatccggacctcccaaaaacacaggacgtgtctgcttgcggaactttccttacagtggttccattcggttcactgcaccgactcgtcctgcctacatagaaggggcaagagctacctacatttctggagcagggattgcaggagtaccctattgtctcaaacgtctgatctcctcatcttgctcattaattcccgttgcatttctgcaaacctatttttcccattcttgggcagcctgtggcgggtta

SEQ ID NO: 27805 - DNA, 2207 bp, Cannabis sativa
agaatttctatggggatcgtatttgtctcggaaaaaatcaggaaagctctcaatgacagccgaagcagcaacacagataagtggatatataggataaaggaacctgtgacagcaatcatggtcagaaaccatcaaaaagactaaaatgacagagcataataaccaagctaggagatgaactaggctggttatacagcaatgccaacaccaaagcagatatcaaggtcagaaaccacattagataatagatccgaaacaagactaatgttcaccattccattcatagacatccacaccatctaaaattttgagtttgtaaccggcataaaaaaaaattaatgacataagtatgcaatgttagtaaaactgtaattttcgtgtaaggtccagattctaaatcattaggtgtggaaagaaacgagtaacatgagttactttttaatagagtccgaacttatgaaagtagatactaattacagttttaattaggtacttatacactgaaaaaaaatcattaggtttatgccatttacaaactcaaaactttacgtactccttttttatatatggtgcgcatcatggttacatgaaaaagaaagggatgaacattacacaaaacagagtataactagcaactgaattgaaaaaattatctaacctttcttctttgtgtggctgcaaggacataaatgccaaccagatatatagtggagagaccacaattagcaagtcaggggtgtacttctcctttacaatgggcaatattaccacaaacagcaatgcaagaacaaagcagaagttaaagttgttaaatgcattcctaagataataaagcgacccttcggttccatacaaatggctttcaccacctccgacaacattgtaaagcatcaaatttaacacggatgatgtccatttcccgtagtagacgtgatccacaagttgtgataatgcctgaaatgactccacacttgtcatatggcttcataggtctagcaaaagaaataaactaaatgaattggcgagagaagacttacaagaagtgcaacagaggtgatagctccagcaacaaacacttgtttgaattttcgggttaaagagaagatagtcactggtagaaaagctaaaattgagaatggccagcctaggattacaccgatggctgcaactgctactgacatagcaggtttgtcgagaagaaacaaacccgatgataaggagatggcatacatcgaaaatgaactaggcaagaaacctgaaaagaaagtgaacataagataaatccaagaataaaccaacccgtgtacagaaaatcgtgaaaaaaatgatgcgtggaaaagaataactcactagtgctagcgaagaaacaaccactggttaagcacagcatagcaagtgtgtaagaagcaaggcgctttccgtactttcttgatagagctaccactagaacggtgtctgtgataacggaaaggatgccgagatagattcttacagcatagaatacccttacctgcaatgagcaacaattatttgttcaactaaaaacgaaataaaatcatagatgaaaaaataacactgaacaaggcataaagaatcttactttgtcctcactaaacagccaagtagcaggtcggccaaccaactcatggaagagaatatacaaatatgaccgaagcgcaaactgagagctgaaagtagtgtatgcgaccaaaaactagttagagcttaatatctaaagtacaactctattgaatttcgattttctaagtgtttctcaaatctctaagctggaatatagattgaaattagaaagttaagaacaagctaatgaaatattgcacaagaacaaaaataggatgaaccgatcaatagccaaaggaagtgaaaatatctaggacataataggttttgaaactagtataaggaaaaacagaacattgtgtttgtgccattatcataattcagtcctctggtttttttctagcaaaatatggtgcaaatcacatggcattcaatgcaatacgctggtttaaataaaagcaacacaaattagcttaagagtttaagcattaatcctcaaatttccaatacccaatttactcagtttagttcacattcccactatttattaatacacaacagcaaaaacccaaataccatatcattttcttctcatttcccatcaaccaaacacaaaatcccatcac

SEQ ID NO: 27806 - DNA, 1996 bp, Cannabis sativa
aaaagtaatctttttattattctaagaaagaagaatgaaatcacagtgcaggaaaaagaaaaagaaagcctttaaatagggaaaggacttcgactaagtcggtacaaatcataggaggagaaagaccaacgaacttaactgcctaaccaaagatctcaactaacttctaacagcttcccttattaataggaagagtaaaagaggaatacaatacaaaacaggggaaggaaacagagtaaaatagtagcagtatgttgtattgtattctttaatacccctccttcaaggtggagcgtatatatcaaaaacagacatcttggatacatgagaattcaaaattggggaggtgagaggctttgtgaaggcatcagctaattggagtttgctatttatggggattagcctaatggtagaattgttgattttgtctcttacgaagtggcagtctagttctatgtgtttggtcctttcgtgaaaggtaggattgttggcaatgtgtatagctgagtttttatcacagtaaataaaggcaggttgtggctaaggaatgtgaaattcatgcaacaaatattgcagccatgtaatttcgctagtggttgcagccaaggctcgatatttagcttcggctgaacttttggaaattgtaggctatttcctcgtgcgccaggagatgagacaatctcctagaaatatgcagaaaccggtggtggatcgtcttgtgatggggcatgatgcccaatcagaatttgagaaaccccataggtgcaatattgatgttttggtgtagagaaggccttatccaaggatgtttatcaggtagcgaagcagatgatgcacaacttggagatgagtggtgcgaggattggctgagagaattcacggtgaaagtgatatcgagtctggacaaagtcaggtagagaagtttcctaacaagttgacgataatgagaagggttgtccaaggcttctccatcgtcgttgtcaagtcttagcttgggatccattggtgtcttgcttggcttactgttgatgtatcctaattcttccagtaattggattgtgtatttcctttgagagagaaacaatccattttgggcacgggcaacttcaaagccaaggaagtatttaaggctttctagagctttaagtttgaacttgtgatgcagggagtcttgtagttgatgtaagacgtcgatattggggccagtaatgaggttgtcgtctacatatacaagaagagcaatgaagctgtcttcagctcctctagtgaacaaagtatagtcgacttgagattgtttgaacccttcttgtatcaaggcttcagacaacttcttataccattgtttggaggactgtttgaggccgtagatggacttatgtagcttgcaaaccaggttgcaacttgtattgaaagaagaaggaagtgttaaaccttgtggtatggacatgtagacctcttcattgaggtctccattaagaaaggcattattaacgtctagttgtaaaatgtgccaattcttaatagttgaaacagcaagcaataattttagagcgaccatctttgcgacgggagaaaaagtatcgaagaaatctagtccctcttgttgcgtataaccttgagcaacaagccgggcctttaatcgttcgacactcccgtcactattgtactttattttataaacccatcgacaccctaaagctctttttttgggtggtaatggtacgatagtccatgtattgttgtcagttagagccctcaaaattcacactgtgcatagcttttttaaccatccaacgatttgtatggcctccaagaatgttcttggctctttgacatatgacactgcaaatatgaaagctttgtaagtgtcagataaatttgaatacgaaataaacttatcaagatgatgtggggtagaagaggtgtcctggatagttgaataacattcaaagtctctcaaataagagggaggcctggtgtaaagaccgcttagttt

SEQ ID NO: 27807 - DNA, 2889 bp, Cannabis sativa
  modified_base (189)..(190): a, c, t, g, unknown or other
taaaaaagtaaaaaatatcgcctggcagtatttttgtaaaaaaatagtaaaagttagtataccatgtaaattttccttaaattaatttaagtgggccgatatttaagagcattgttatgggatattaaagtgcgtgacacttttatgatatgatttataataagttagcagttttttataatttttatnnaattaaaataaataaaatttgatattaaattatattaataataatattataccagtactaaatattatagatgtcatttaacatttgttgatatttaattaaaaagtagagataaagaagaataaaatagatagattctccttaataacattattaggctttttcccatgtttgcgaaggttcatggagtgtcactggtcaatgactaggaaggaagagaatctcttctgcttgtttaagaaggattgtggaacccacataaagtgtattgtttttttttttttttttaattattttgtccttatttattaaaaaaaacaacttacttgacaagctgttggatagagcaatccaatgtgacccatcccacatgcaccccttcaatcacacaataatttcactttcactattgggaagaaataagaccctttctttgagacaatttattagtttgaaaattaatgggaaaaataaggtttagggtaaatctacattataccctcttaaatggttgtttcgataaacccttatttatttcacgcagactcttttaaataggtattttggtagattcttattcgtttcgctatctagaagaactttttagtctatttctttcataatcgtgtatgttataattatttaggactacttgtaaatttttaaaaatttttgaatagtttacaatactaaaattaagattaatttattttgttgtaagcgcgactattttttcttacatgcatagtaagtaactgttcaaattttaatttttgacattgtaaactattcagaattttttaagaatttataagtgattttaaataactacaatgtacaagatcatcaaaaaaaaaaattaaagtaaacaaattttctagatgttgaaagagtagaaagataatctaccaaaacgaccctttaaaaggtctagtacaaaaatgtccaataagttaatttgctattgtaactttcatatgatcttacatgatataacagaattacaaactggagttttattataaaacaaacatatttcacatagcactcaatcttcatatctcaatacattagaaattacttccaaacataattatacaaactagatgatatatacttaatcttcataagttatatctatagcactactaaactttgtctccaatgaagaaacattcaaagatctcctaattaggccccctttatcccttttaatcaaaacaagtttatcaaaaacacaccaagcaaagctcaaaaaatggtctctactcacattatcatcattgcaagccccccaaaacaatggatgataagtaacaaagtaccaagctgaagctttcttggcacacaagtcatcataattttgatcaaatatttcaatcttgttattattaaaccaacttctagcttctttaataagagctttaacagcataattagctgattccaaatcccttttcttattaaaatgtcttgactttgaaaccacattcccactaagtatttcagcttcagtttttatgtcatagtaatccattaagcttcccaatttgtaatcatactgatttttgtgattcagggcatcttcaatgtaatcctcaaaaccatctacttccatatcagagtcataacactttctggctatttctttagtgaatgattttatggaacttgagtgattttccacatccttgatttgtctaaagagtttcccaattacatgttgtgattcataacatgttttgtcttgtttttccatgaaatcggggtattctttggcgcgtaatcggcttgggatttttgcaggcacacctgttttgggaaaatctactgcaattgagaatagctttgctaactctatgcattggttactcttggcttttttgggctctttgtctgcaaagactgtatgtgcatttgcaattatgcctaagctgtcattcacaatgtagtctgtgaaatactcttgaatttcctataacaccatatagtatttgattaagttagtgagaaattgaggtttttattgacaaaatagaaaatttgtacttagtttcaacatcaaaaaacaacaaaaactagagtaaacatataataaaagattcaaaattataaccaggcatttctgattggttctattcttgattcataactagaaagtttttctaattcttttctaaacagagttaaagctctaaaaagtaaaaatattagaataagaataacacttgaaaaaaaaaatcataattaacaaaaaaaatattacatatatacaaagttatagttttttaaatatttttatggattataatttttttttacaaaaatatttattatcacaaaatatttacattatgttgtttcatgctatttttatatttatgttgtttttatgttactcttaataaaaaaatgtaattaaaaaaataaaaaaaaaaagtatgtaagatagttaatcatagtccataaaaatatttaaaaatttgtgtggtagtttctaaaaaatactacaaaattatgtatactttaagcaaattatttttcaaaaattttaatggggtagactctagactcagacttgatttgtcttagcacatagtcagctctatctgaactcaatgcattaatcactatagccttgataaatttactgaattgaaatagaaatcaactctattataaatgtaataatatatacc

SEQ ID NO: 27808 - DNA, 3878 bp, Cannabis sativa
taagctaaggtatgtgttacttttgtccggggcctcgctattctccttcagcgacatatggtttctcgttaatacactaagtgcgagttcgtacattgattcctcgcctaagaccttacagtcagcgggttgcaaatatactctgatacttacgcaattattgagttatttcataaaaagatatgacatcgattcacattcactttaccttgacacgtgtcctctatctgaatttcaggtataataaataactactttaaaagcgagatcgatggaaatggtctcttataatatcttaagttgaatcaaaataaaattattttggttgagaaataaaatgcaaataaacaaatgtattaagtttaaacataacatacgagacaataaagtgaagatagatattaaaaaaagtaaagttggccattcaacaacgcaaattgtctttacaataactaaagccataaggggcaaaccactgtctcgaccaaaaggccatctttctaaatataataataaaaaaagtctacatagtgggagacttggatggatcttcttggttcgcctaatctcttcttcctcaccgacctcttctcttccggtcttctcgcaaaaggcaagcatatcttcagttccttggcccaaaaagctgaagtccatgtcaggattggctgaccaggtttgataaatggttctcctagcaatgctgttaaccctatttttggtgtcaactttggcatcctcaagctttttatcaacctcggcctagatggtcttgatggaatcctcaagctctttattcttcttctgatcaacttgacgttgcttttcagcttcctccctgacgcgagaaagttcagattttaagttgttccattttttggccatcgtgtccctatgctctctagtctggcaaagttcagtcttgagcatttcaactcgctgaattcctctatgttgagtagcaaaggaaagaagagatgcctgcaagaaaaagacatacaaataagaaaaaggtataaagacgagaaggaaaaggaacaagaagagaaaaaagactaacctgatgcataaggtcgtaacttctttgtgcaagaccctcaaaattaccctttgtaagtagatcccaattgctggactcaaaggtttgataatgccgccagttgtttgtagcatgtagcgagcagatatgtgaaccttttgtcctggcttctaggggcaaagggcaagagggctcgagaagaaccatctctgggcgagaactagaaaaatttactttgtgtactgacctagtaggttatttgctggcgctcaccacagtaggcgccaccttctctggagattttgccggcttgatggtgagttggcttgaggacttcttcttgttggcagttattttagttcttttggattttttgatagaacccgaggcatcatgggcagctcgctttttggcccttttgtcaacaagttgggggctaccaaacatattcttcaagtcaagatccatatctacgagacataggaaatacatcaacacttaatcaaaataaattaaagaaaatggggaacaaagtcccacttgaagaaggttaccatattcatcagatgatgaagaaggaggactatagtattcactaaattccctagattctatgatcatgaatatgtcgtaagggttaattggatctaaatcccaatctgaatctgggtggctcgccttatccaagttggtcccatacttctcgacaatcccacagtatgagctagtacaactaagttggatgaaaaatcttgggtgccaactatcaaacctacgggttatgcgatctatgaggaaagggttccaagtataaaatttatattgactatctttaaaagttactaacaaagtacgttctaccctaagcacagtgggtgaccatccacattgattatcttgggaggctcattctttagcttcccgaggggctattctcttgagatactgtatgcgagcaacgtaatcctggctctcttcgtcggctggaactgggaccttctcccacgaagagtactttggaaacttgtaatcacaagtgtactcgtccaaggcaaaaaggccaacagtcttaagattggcttcatttaagaggaaatctgacgatcgcaatccgaaaggaagacgtaacaggattttacgatgctcggccatctgaggagtgggaattggtctcttagaaattgttgtcgacacaataaatgaaataagttagcgagctcaaagccataaataggaaaaccactcaaaactaagttttttgagacaaagtttacttacgtattatgcggaatgtagttgtgttgataggagaaagactagttgtccagaaaaaattctccttaaactcagtcttatttggcggcctcacaataattttattgtcatttgtatgggttccgagataataaaagccccttgcacatcgcttcctcgcaggaactgctttaacggagtagaaatacactatttttagaggagtggagcactcccatcctaaaatgtgatacagaacctttagactcgcaagaattctgtaggaaattggaaccaactgaaagggggcgattccaaaatagttaatgaactcctttaagtaatctctcaagtggagaactgctccagccttgatgtgctcgggctccaagcgcctattctagacgagccactagtacttgtaccaccacactcctcacaaataactctttctagggggaagcaactaaactcccctagagcaacagatctgatatgacaacctcgcctttgctttatgttgcaggactttaaaacaccgtccacataccctccaatggttctgaccttggattcaatgagttcgacctcaaaggtgacattagggtcctgtggagtctttgacttacgagacttggtagacatgatttcaaaatcaaggtggtgaaaaagtaatagtgactctgggtaaaaatagtgatttagccaaaggaatagaagataaagataaatgttcaggtcaggctgcatctcgcaaaaaaatgaagtttactctcggttacctcttgaagaaaatgcctatggcgactagcaacttcatcttgattggtttttattaaatggttggtccctccctcctaattttttcatcatttatctccaatttagattgaggtttaaaagttctgggtttgaatgggagggcttattctttaggacactctatttttaagaattttggagaataaacttcaataacagattgggaaatttttacaaaatgagaaatcccaattcctagaggaaatttatcaaaaccagaaacttataaatacgatcaacttaagttttactttgattaaaccctaaaaattactcaaaaaattaaatcgaaattactaaaaccaaacgaagcaaacaaatatgcaattaattaatagataaggatcataactcaggaaaaagaaaagaccagagagaaaggaatgaatcacttactattcaaagatgggttttcacatggcgaaagctttgcaactgaagttgatgagagctacgcgatattttgagaagtcctaagattgaatagtatatccaaagaaattcgcagaaaatatgtcaatgacaaagaggtgttaggctatttttagcctatgtctcgggtcttatagataagcattttcttgattattattgtcttttggagcggttttacgcttaattttccttgtttctggttcccggtgcattagagttcaaatttagtcaattgacgaaaatatggggcaaactagtgaaaaattggccaaagctgctcaatgggagtcaatagtcgcgccaggcataatgctagtcacgacccttt

SEQ ID NO: 27809 - DNA, 6990 bp, Cannabis sativa
ttaagacgtagatatattgacttgacatttaatggctagatacctatagaagttctataaatataacttaagtattattactataaaaaaaattaaacttaaatatttcttaaatatttatttgtacctggtatacttaagtatttacgttgtaaattactttatataatattaacaattaataattttatgatagagtacttttggtaatttgatatttgttatattttattatgttcaaaaagaaaattttgtgtatgtttgtcttacattatttgtgtaaataatttgtaagatttatattagacaaagtaactactaaaccattgttttggtaatgataaatgctaaagaaaagtgtaatatataaagagatgtaggtgaagataatgtattggaggatcaccaaattccagtttaattcattctcatgagacacactatacttacattacatatattatataaatagatatataggtttggagcctaatatttgacactttctttgcagagttatctgttgagtttattagtgtggataagaaaagggcccattaccaaaggacatgaattttattctttcacatggactgtatctactaattaatcattgacttgaaaccccttcctttatatattttatagagatcaagaagatggatctgacacactaacacactaatcatagtggcataatatatcacaagtgtgatactgtcaagaaaaaggaagagagactattaattgtctgtgatatatatgtaaagtatgtcgaccaaatttttttggccttacactaactttttggggcaaacttttttatcgttataaagctagaaccttttacattttgtcatgcctaaatattaccatcaattttcagattcactaattaatgaacaggataatgaatgatatacacatatttgaatatgtgatttaaggctgttgttgtaacacatgattggcatggcatgtatttattgacttgtctacatatatgagaaacgccagattactataatactacaatacaagaacataacatactgttattagtgtattttaatattagattctacatattttaatttaataaataaagttactaatagcatgcaatgttgattcatatgtttgtatgtaccttgcattgcgagcaaagacactgattcggaggctttctttggcgtgttggcgacaagttgttgacctttctgaccctctgatttgttgaccttcccatcaagtgcctcaggatggatcttcctcttcaacatcctccgcatcatctatatatcaaattaataatacagtatattaattattaacagtatacatacatatttaagctagaatactgtgtgtaattactacagaaatcatgacaattataccatcttaatcaaatgataaaagtgtccgggttgtcaatttttgaacagtatactgattattcaagtacatgtctcatatttgtcccttttttatttctcttcaaatctgacccgtttcttacttctatctaaatgctatcaattttatgtgctactttcataagctaattggtgctcttttctatttttgtattttctcttgtgaacctatatgctattttaacttgtactattttcataagttaacatcaaagtataaggtggtatactattattgttgcattttaatatagtgtctcatacattataatttaagatgtggtattgggcactaaggtgactaatagcaacgttgctagtatcacttaggtagctgtttagcaccactatataacatcaaaaacagtgtgaacacttatgatatgctgtctcacttcagtaataatatagcatagaaaaaaatgtaagtgtatacatataaagttattgttttgtgagttttactaaaaacatatcacgtatagagatatatatatatatatatatgtttaaatattttgttgtaatatgttagcatgggcattaattcatatattatagcaaatgaattaaattccttatatatgaacataaaattaaaatactaagagaagagaagaggagagacatgcaatgatgatgttataatgattactcactcgttgtagattcttaattggacttttctcttccttgactcgaggaatgagtttcttagcaaaagagaggcttttcttggttcgaacattattcattttcttattaatggtctcttcatgatgatggtcagccaaaactttcccagaatcaatactattcttcattttaacatcaccatcggccaagaacaagtcggccagtgttgttcttccaactttcttcttctcttcatctttcgaagccacagaaacactaccattatcaagtgatgacagaagaacacgatcatgatggtcttcgttaattttctgatcagaggctacgacatccttattattatctttattgaaactgtgtccaagtccaagagctgagaacatcaaagggtttacttcttcttcatcctcggcacaagtgtcatcgctcatgctgtcttcttcatcaacatcactatcatgactactgtcttcaacatcatcaactgaaaattcttcatccttgtcttcttcctcctcgctttccagaaccagatactctttctgtgaataacattgctggttcaatggttttcgaggatcaaaaccaaacgtccctattgctaaaatgccatctttccaaccatcaagtgcatcgattaggacaacttttttcagtaatgcttgagtgtccttatcattgctatgatgaagtaattcatcatcaccactcttttccacttttcgagcaaagtactcgtgatctgatcataaaaatgtaattagtacttattgcattataattaagttgaatcagtgaaagagttcttaccctttgggaggggatcatgatgaaaccgtttatgaacccaattgaataactgacatgatgaagaatggaaaatttgtttagaagaaattaattcaaaaacaagaaatattagacaagtatactataaaatcatcatgtaatcaccttgttattaccttcatgttttttttttcttctccagaataagttggcaaaacagagagagaattaatgatagtataagcagagaaaaaagtgaggaagggaatagaagtaggagaggaggaagtagtggggaaataatatgggagaaaggggacacaagagtcttctcagtcagagagtggggccctaattatgtgtagctttgtttatggtttgtatgcctattggcgtgtttgaggagagtaatagtgttaactctctctctggcttgttcgatgagtcgaaattcttgaagtgatatgctcatttccccctgttttcatttcattaccccctatttatcatacaactcaactgctgactagatcttccattttaatttctataatatattaatattataaaaggtgttctagtcaaacttttaacagtggtttaatgatgtggatcataagtactactcttcagtcttcactcatagtgatacacaacaactaaactgttttgcctaattggtattttggatatagaggaaaaagttgtatcaatatcaagtatgtactttgcgctaaattcatgcatgtatatagacatataatgttaagtattgaggattgaatcttattaataattcaaagctcgcagctagttagtctttatgatacatataatttgggaagtcatttcatttatgtgtatttgtataactagaacagttcaaacacccatgtatcagtcttctactgctccacactccacttgaatatatcacatctccctgtctttatttgagaacaataatatagggtcatatataagaacatagactactccacttatcattaattggttttgagataaaattctataattatcaacgtggtatcagagtcatatctctaatgagctttcgattcacacttatccaagttaaccacccacatgagatctaaatggtgttaagacgcttgagatccaaacaaaaataaactagcaaaatcgcacggtctatgataaggtgattcaaaattagtgagcaaaaataaccaccatcttaaaagagaatattggaaaatattgctactctactcatcatcaattaattttaggatagaacgctacgattctcaagagtagacagcatataattcttacattctgattgtttggttttgtacttctctacgaaattttctatatgtattgaattaggattaataatgtgttggtaattttttaactcatgaattagtccatgcttattgttaaatataaatgtaaaaattatttattattactctgcttatagctatgcttactataaaacgattgtgtacgtagacataaatgcattactttttgtattagtttagagcatacttcatactatcacacccgtaaagtgtatatttatcaaaacaatttcagaaacaagtgatcataaagccaatgaaaattaattattggtataaaatctttgtaagtaagctttatgaaagtaaataattatataaatatatatgcactcctttctcccttcccatgtggccggagtcccattgatggtaagacgactcagggcatccactctgtacctctcttttcttttctttttcttctttttgctactttctttcttagaataccctttccatcacacatgaaagccagaaaaggtgctcttttttatcaggtggaaataattcctttcaaaaaagaaacaaagtagaaaagttgtttcagtggaaatcattttacttgacattaatgtattgagcaaaaaaaaaaacattccaagaatgttcaggtgctcttttatcaggtgttatttaatctatgttgtgatacacgttttacattatgtagcatcaaagtttctattggttattcgctcatgttactaataattaaaatacattaaatacttgccaagttttggtttcttagcacttgttaattgaagtgaccagccttgtaattactattgattggagtattgtaggagttgattaacttgatttgattcaaaacctctaatatcattctctttttgtagttatattaaatttattttaatcactctctggattacttaaatacagttgatcatttaataaacagctttgctgtttacattttccttttgttgcaatataaaggaactagagagttagctagtataaaactatagtcttacacaagggcatatcagacaattaattacaaagagaatgttttatgaaaatgaaagcttaacttgaaggggttatttccaagagggcagagccaaagagacataaagcaaatgaagaagctgttagtttaaccattagtaagttgtctggtattacaaatggctaaaaattaaagccttcgaacccatttccaaaggagggtgagctgtgaacttatgaaccagacttattagtcttctgcactgtctcttggtgctgctttaaagttatatatattgaaaatgctttggattctttataaagtaaatagctttcatctctcaaatgtgaggtgggacaccccttttggcccatatatagtcaatggtattctggcgtattttagcagagaccaaaagaaaagtcggggatggaaaagaaaagggactcatcatatagaaatgcatttgaatatgaaaaagaccagattcaaaagtttagccacatactctagctaaaattaggcttatgtggaattaatatgtttaggagaaatgaaatgtggtctaagtagatatgtaaatcacatatgctgttacctgctaatactacatggttgaaacattgtcataagctttttgtcttctaaattagcatagctattcatagttgaattgtggtctaaattagttctatcagatgcactgtattcactagtaattattttgactatttgttctgtttttttttttctttaacactaagatagccttgatgaaaatgattttctttttggtctttgatctccatttatagtgaaacattatgttcagttcacccctacactagtttattttcactgtgagtttgtactacgtactatgtttaaacacatatgattaactatcatcagccttacttttctcaagataagataacaaaggaatccattttatgcatccaaaactctatccactagtaagtagtgctcatttcatcaaggaaggtcattgtctcactttgccactttaaattttaaaaaggaaaaaaagaaagagatgagtttaagtattatttgctctgaaaataagctttacagatttagaaagagggctccccctctgtccactcgagtttgaatggtcagaaaaaactctaaaacagatttaaattaacttgctttatcattataagatcaatgcagagccataaaatttaagaatgataaaatagactgggaaccagaaattttggtgaactactaccacagcccacatccacatgctcaaaaaaactatggaggacacaaaagccccacagtgaactttggttgttacaggtttgaggccccaatacggtgtacaaaagcagtattctattggcttattatattggccgatagaaatttgtgggttatacacaattagttgatgaaattaaataaaaatatataagacagatgagagtttttggttggattagttactggagctcacttaatatcttatctcaaggaaaaaagactcattgttaattagtaaaactgtggttacacaaacatggcatgcaagctagaatagacgtttcgagacagacaacataggatgccacgatatacaaactaaaaagaccctagtatgtgataggcataggcttaaacgatatatgttaaaaataaacctccacttacactgatattaagactaaatacaactagatacaaaggacaaaaaaggaaatacatacaaaatccctaagttggcctt

SEQ ID NO: 27810 - DNA, 5400 bp, Cannabis sativa
cttctggtaatagaccatcaacaacatgctattgcaaacttaggagtagtgatctgagagcccattaggaaagacatgatctactccatgtgatggtgttcttaaagtttcttcataccaccacaagtgcatccattgcaagtgtaattatgcctgtaatttgacagttcatcttagatttccttcaacttcgtaaatacatgctgatagtttgattgtcttgccgcaaattcatcaatatgtgtgggtcgttcctttgatgaaagagaactttcaaatctatctagataactgctgcagttttgtcacaaaaagaatgttagaataatttttttttagagacagagttaaggatccaagagatcataatattattatttctaatctaagcattgtaaagattataatcagtaggaagaggtttaggaattgaaccgtccacgaacccaagcttgttcttgacatagatcacaagctgcatagctcgactccaagaaagatagttttcttggcctgttagaatatgagaaaccagaatatttccaggattgtctccatagtagagataatatagatttgtaggatcttcgagtggattttttgaaattgccacttaaagagtttgattgttttcattgacatgcacttgcaaattctcaatgattgcaaggtttaaaactctagtttcaactcgagaaacttgatcattgttcgacatggttgatcaaaataaaatcaacaattttatgctagaggaagataacatgatgctactgatgcgacaattggagaggaacatgcaaagaacccaagagagattagacaaacaccacctttaccagagaataagacacgatgaggcaggatgaatagaagtaggatcgagatcaatcaaaggaaaatatgttttcctgctctgataccatattgtggaatgaagaacatagagaatgaaaaaaaatttatgcattcatgtaatgtgaattcactaaattacaaagtgtgcaaaatacttatttatacaaataaaaaaccaactaagctcacacgagctgaaccaatcgaaattataaactcactaactgactagtcaaccatagcggtaatataactaactaggaaagatgctaaaatctattacatagtatttacttgaaagggaaaactttttggctccacagggctagaggagaccctagttggtattggaagaaactcctcaaccttaggtcgatcatatctgagtcgatgaaacatgatgctggaaggtttaaggttagcaaattttataactcttttcttaatgttgaaaaagtagattatgtttgtgtagtttggagtaggctcttgattcccaagtatagatttcatactttggcagatagtaaactctcagttgatgaccagagataaacttcaaacattacaactctcttgtgcttctccatgttgtccagtttgtaataattttattaagagtcgtgatcatatgttctttctttgccctttttctcttgcgctactgcgtaaggttcatgaatgggtaggtttcaccacatgacccattgtgtactcggattgaaggtcttggatcaggcatttggggtctgaattacaatgtcaagtattgattgttgtgataactgttgtggtttatttaatctgggttgacataaatttttatatttttgtatgtagatcatttattgttcaccatgttagtaatatgattaagcaggatatcaaagctcattttggttgtctaggtaaaagaaaaatgtcgtctaaaaataaatttattgctaatattataagtagttgatagtgtttcctgagtttattaattttgactggactggtgttgcttgatgtaattattgtgatgtttgatttaatgagaatttatctccttttaatttttttttttttaaaaaaagttgttaagaaatttctcaagatttcatcaactctttcttttcattaaagtaaaagatttttttttatttatttaaaaaagaaattcattacttgatattattgtttttgaaaatccaaaatgttggacttcaaaatgaaagaggaaaagcatcactttacccaaatattattccacaatgaaactaataattagaccaagtttgtatcttttcttatggtaaggaagaataatttaattataaattataaatatatacataaatattagcattgaattttctgtgtttcttcctctctacctgtatccacatatgtaaattattatacacttccccaactatggtttgttcatccgtacacaactcttcccattataaatatacattattatattcatgtataaatttgctaaaataacaagactatttatatgtatataagattatgcattttacaataataaaaatgttataatagtggtggcatcagtgtaatgtaatgcaaaaagtggtaatttttataaatgatggggtttgaccttaattcatatggaaatattatttgatacatagaggcatcaatagttgtggttgtttattctttctttagattttcatatatgaataagcccaatttgccccaattaattcaataaaagaaaatagtatgtgaaactattttattttgcagcacataactttttatgtaaaatatctataggtgaaattacataatgtgaagcttttgttgtaatttaccccttcatgttaaatcaaatgttaaatttaactaaaatgacacataataacatcatattgaccaaaaactaatttcaattccattttttttttttataaatctcaatgaaaatagaaagtgaagtgtcataaaattcatcaccccaatatataaatagtgtgctaaccttaaaaaaaaaaaaagattgtgatcaattgggaaggtcaattttggtggaatcataattgttataataaaatgaaaattattatattcagaatatataaatgaataaatgatattcccttgtttgtttgatccaatcaaattaactaacaactaaattcactattctctagcttcaattggtggaataatgattccatataaaaatgtttgattccttataagtttaaaaattaaaccaaccaataaaataagaatggcctagcctattattttattcttaataacacagtccacaaaatcaacctaacattaaacaaaaaagaggtttaaattaattagatatagattacacaataaagagagttacttgttgtaacattttgctccacatgtaaagcccttagccctataaatacaagtacctcactattaaactagccacaaaatagccttacataataaaatggtcccatattatgaaaaagggactcattcatttgattatgaccccatttcttgagtacccttttcatatatatgtaaaaaaaaaattaagatagaaaatattaataacaataagaacaagatagtctttttcttaggaaccaaaatggaccattttctatacaaattggatttatatatattaaggggtacttgatttgatcaatagccactttgtttccaaaggagttgccttgaaatttcttcactcccttaaaagtaggaccctattcttagttttcaaggaatttttgactttttgtgacattaatttacccatattttactagctagtttgttttggaaaaatgtttttgatttcttgtttggatcttattttttgtttgtttcacatgatacatttaattgttactaatttgactaagttagttagtgattcagaaaaaattggaaagcaaaagacaacttgtgtactaattattatgcaattgggtaaatttattttgagttgatatatattttttttttctaaaaaacatcatgcattttaatttaattagaaaaattgttaattatatttgaaaaagatggcagtgcaggattatctccttaaaataagaacatcgtttcaatataatgatagatatttttccgaaagtgatattaataaatatacatttttttttaaaaaaaaataaaaaagttttgaatacattaaaatttggccatgtttctccttaaaaatttaaggcaacaaatacaaatatgtggtcctttaaaataaggacacaaatttctgaacttatgaaaattctataacatagttttaaactattttttgatttaattgtatacaaatttgttgttaaaaaataaaggttttttcaatgtttttttttttttattatttttatttttatggaatatagtaaactcatagagtaacgtaaataaataaaaaataaatcgtaaaaatcaaaaaaattaaaaaaaatagtaaataaagtgattcccttcaaaaatataatttttcttaatatcatgttgcacaaattaatcaaataaataaataaattagatttacctaaattttctacaaatggttaaaaaatctcaaaatgttctttggtgatattcagttattatttttttaagccacgaaaataaacacttttacatattttaatgtagtttggtgcttgacaaaataggaggttaaagatacataaaattatgggatttttaagtacttttaattgagtatttttatgaaaaatatttattttattgaatactttcacttacatatagcaaacaaacttaatagtaaaaacataattaaactgagtcaaaacataaataaaaattattcttaaaataaaattcaaggggttaaatataaatattcattttgtttaacctctgaatttttaaaattcgaataaatagttttagaattacattgtagctttcatagagaaatatttgaaaattaatttataaattacacattatttatcttaacatctcaatctcacgtgcttaattaaattcatgcataagaaaatataagcgtgtctttggattgaccgaccaatgatgtaactctatggactatggttacgttttcattaatttgtaaaactcaaaaaatgcatctaacaatatctaacacactaaattaaaaatttatttaaagaaattagaacattttggtcataataataataaaaatttaaaatttaacttatcggtgagggaggaaaagtaaaaaaataaagaaaaaggacacgagttcgaactactcataagacactatatgactttgtgtgtcaaggaagagaatcattagttgtgtttgctatttttaacgagttgcaagctgctattcaaagaaatcgggcttcgtttggtgtcgaagccgattgtctacaatcgatgaagctcatctaaaaattgggaaaattgcttttggaaagtggacgggctggtttaggagattaaaaagttgctgcaacacctgttagttaccgatttaacatttgcatttagagaagctaatcgagtgac

SEQ ID NO: 27811 - DNA, 2605 bp, Cannabis sativa
  modified_base (595)..(596): a, c, t, g, unknown or other
ttgtccctgttggatagggcattacactctatatatggttacatactactactatatattttttttacacaacatggcaacaataaaaaataaacttaaagtgttgaatgaccgaaaccctccaggttgcactgccgtgatatgtacaatccttgccaagcccatctcactactcctccaacttagctttacccttacctacacaaggtagcaaattgataagtcgaccgactcagtaagatatgcataaatatatataagcaatgttatcccggttttatgcttaagtcgtcctgagcccaatttctaagctcacccaatggttaagaacgttctcaacagaagtacgaccattgtaccatatgcactagagtactgactccgtactcatgttggtacgaccattattgtacttcctggagttactgagtgttgtatcacctgcacttcgtaccccctggtactcgtgttggtaacactgtaactaccctaagactttacactgtactcacccttataactacatctttaacagcactagtagtgtaaacaaataataacatacatacattcacacacacacacacacatatanntatatatgtatatatatattttatgctatcttacctcgtttccttgctcaggtgtgccagtcagcatgagtggaactgtaactcgatgctttataaggccctaaaccacaatatttaaaattccaataaaagacatgctaaaacacttttcagggacttaaaatcaaaactagaaatagccctatcaatgaataacattacaataacctaaatatcataaaaatgggaaaactagggtttataaaattgtcccaaccagtagacccgttccccaactagaattccagtttgatggggtttccttggaaacaaccggtaggtccccttgaactggtcaactggttaagtgtaggaaccatcaaaaatgtccccaacaccacaaaacaatcccaaactctactaaaatctccagattacctatagataccataattaagccaattcaagcaacaaaactcaacaacaaactcaaaatattaaaacaccattagagcactaagcttgggtttccaaaccccatctttgctcaaatcaccctaaacccctccaattcagctaaaaataactctcataaacctagactaactctaaaactcaaaattaaacaagttcaacatcacagtaccattttcccccaattcttgcattaaaagctaacataaacttaaagaaatccaaggaggaagagattaggatggtataccttagcttgaatctcacaagtccactagatcttgccgagttgatctaagaaaatcaaaaccccaactggtctctagttggttcgagagtaagggaaagagagagcttgatgaagacaaaaaatgggttttcctaagtttctaggtgtttcataaaaaatcaaatactattttttatttaaaataaataaaagaaatcagatcctattgtccacaagatgacaaaataggaattaagggaaaaatatgacattttactcttttgaccaaaaccaaaagtttaatgaaatttaagggtagtttggtcattaccaaaccccgtcaattcccgatacttcgaaaacctaaccatgaaacacatgactctaatatggcccaacatcacgttccactgctactgaacacatttatagaaaaatgagtaattcacataaatagcataattaacataatctgaattcatataaatctccacaaatatgtaaattataattagtaactgaatctcataataaaaccataattatctacaatccaacatatttaaattaggcaatctttacattggatgtgtcggtttatgggcctctgagtcacaatattcgtaaaacaggtgagtgatatgctaaatcacttttcggagaacatggcaaaactaaaagtttctctatcaacggataacatggcaataccccaaacatcggaaaaaacgaaaaaacctagggtgccctaaaatgccccaactagtagaccggttcctaactggaaaaccggttatgtggggtcggcctggggacaaacaggtagaccggttcctacaggtccaaactgagccggtcgactgattcagtgcaggaaccataaaaactcttcttaacaaaccaaatcaaccccaaaagactccaaacctttcagacctcctaattaggccacaacaagcaataaatctagcaaaagaactaaataaaaagcccatattcaaaaattaccatgagagagcaacgtttgagctctaaagttcaaactttactcaaacacaactacaacactcaaatcagttctaaaccagctcaaataacctcaaaacatcctctgaatacaaaatcaaatatcccaaaaaccaacagaactccaactctaaaatcaagcatagaactcttaatttataacttaagaaaacaaaaagaagtgagctaggggtttaaccttgaattggaagcaccacaaccttgctaaatcaccaaaaatagagctgaaaccctatccttctactagtttctcctaggtgggagagagagagagagagag

SEQ ID NO: 27812 - DNA, 6324 bp, Cannabis sativa
aaaattttaaaaaattcaaaaaagtttaacatgccgaaaattacattcaagcagtgttattgcttgcgtgactattttattttatacgcatgtaaaataaactgtttaaatattattttctgtattgtaaattattttaaatttctcaaaattttgtaagatattttaaataactataacaaacatgaatatgaaaaaaattaaactaaaaaataaatagagaattcattaatacattctttttaaaaaaatatatttgtagaattatcttaaattttatataaaattaaaattattaaaatgaaatgtcttaaaaaaaaaaaatttaagttgtaaataaaatttcccttaaaattatatgagcatgtgccaatatacaagtgtgctaaagagccatcattaactcccaaacaaaacgatacgctttttagttttagttattttccttatcaacctcgttaacccaagacaccatagctaccttttttccccttcctattccttcacgctgccacgcctaattcacttcttagggcttgtttcttcttcttcttcttcctcttaaatctagggcttgcttcttgttcttcttcacgagggtttaggatcatggatgcagcccaccaagcttaggatcaactcggaagatcactacagaaggtgttgatttttcgaattggaagtttgaggtactctactgcgtggtatctgtagctattgtgtcttttgatgcttacagaaaatgattcacattccatcccatagcagaatgagaattcaaattttgcggatgttccaaaccttttgttataatggatatacaattatacatagttgagatttttaatgcttttcgctatggctgggcttattgaaaaagagaaagggggaggttgaaattaaaagctaatttgctctcttcctctctctcgctttctctgtgccaacactttcatagtattattgtgtatctgggtctgtctttattggttctgctttccatttattaatcactgttttagtaattttttttttccttttatcaagttttcctctctggtcaattttcattcgactatgccatcttctgaaattttcatttgggtcattcttattttaatcgaaatgcaagattaacttgtctttgatttatttaattatttatttctttatcctgtataatgagatcgtagattcttgctgcattacgtggtatctttctatacagtcaattcttgctttttctatattcctcaaccaaaaaattccaaccccaacgcgagtctagcaaatagacaggttttcttgcttttcataatacgtgagcacgagagtgttaattggcacaatcctaggcagatccctcgaagaccacttaatcaagtatttctattagaattactcactttactgctttgtcaagaaactaacttgtttataagacagaaattcaatattatttaaaattgaattaaacacatgttgtaagtgtgttataagttggaactatgctaagtgctaacctcaatttgtttatatttctagtccggaagttggaactatgcttggaggtgtgaagttcataccccgtgatcagattgctaaggtatgaacttttgcgcatagattcttgttcttttgtttttgatctcttggttttgttctgtttgttaaaatgcttaatacactaatgagaatttttcactaattgagttcataggatgatggctcagatgatttgaagaaagaaagtaagaaatcgagtagaaaggagaagcataagagtaaaaaaagacgttcacggtatagtagttctgatgaagatcttgagagagtaaagaaaaattctagaaagaagaaatggtactcatctgatgaacattcgtcttcgtattcatcagaaagttcatctgaagatgaaaagagaggacgtagtaggaggaagggaaaaaaaagttacgatgatagctctggggaggaggctaatgaaaaatcaaataggaaatcaaaaggtagaaaagaaggaagtaaggaacatagaaggaaagtggataataaagggagtcgacaagacaatgcagaacaagacatgtctggtatgatccatgttctgtttttccttatgtgctcatattaacatgtaaactcaagtgctctttatacaagcttatactggagtatgatttactgcatgatatattgtacagatgacagtagaggagctgatattgttaggaaggaaattgggttagagtggatgcttagaccagaagcaaaaaccgatagaagacatgaagaaaccattgagaatgagtcggctgtggataataagagtgaggaggtatgaccagggtctaacattataaagacacattgaaatcttttctcttaacagatgtcatttttatgatattagtgggccgtttgttgtttgttatgaagtatgtaatttgttgcttcatattgatatttgtgaccctactcatgccttcctctaaattagagtgaaacaatttatattgttatgctctgaagtcaaatggcaatgctgtaaaatatttcttgatatgcagtaaaatttgatagccaatgttaaaactaaaaaccacatagggtatataatcattccttgttttgtttgctttaactttattcttgcacattcgttgttttcttgaccaattaggacaccgtatttgtttgtatttaactttacggagcacttgtactttcagtactgtctgtttattttagtattaatacattagtttcttcaaacccagaaaaggacagtcaatcccagagaattgaatccatattttaaggaagacggatctggttatcctgaagaaaatgatgagcctaaagctggcgacccaaaacttttatcttcatctcttgttggagacggaggtgcaagttggagacttaaagcgttgaagcgtgcaagagagcaagcagcacgtgacggaagaaaggttgatgaggtatgatgccttatctatagtctttactatttaccagtatcactaaccaactttgttatttaattttgggtttccgttaattgtataggtcgttgaagagcgttggggatctcttggtcaattggctgtatctgtagcttctcataaagctgccccatctcgtgcacatctgcatgccataaaaagtagacaaagagggcatgctgatgaaagtaataccgactcagaaaatcggcccaagaaggatactgaaatggtatttttaagtgcatgagtttcctctacaaatttatttatctactggcttttgcatgaatgtaaattgattatggaagcttcagttgtttgagtcagttattataatgtttcaagtctacaggaacttcattgtgtaagtaagtctgcgtcctagtaaatgtctcttaaaaaaccattagctgaatatggaagcttcggttgtttgagtgaattattatggtgtttcaattctttagaaacttgagtgtgtgaatcctgtgggtttcccttgttaatgtgtcttaaaagagacatctttttcctgctgaaaaatatgataaaagttgaatatcaaactttgttcagattttgacttcctacttcgtcattagctatctttcttatttctttgttcttttttccaaattagaagccaaatcgagactacctgaaagatgtatctgtcaagcgacctaaaatgaaggagcccaaagttcaagattctttgtcatggagaaagcaaagaaatcaaaatgtctctacccaggatgctggtcttatttctgatacaatatctagcttaaataaatttgcagatgatggaagctttctgcgtggagttcttcaaaagcagagtaataattctggtagaagtagtcctgaaagagacaaagtaaatttgaaaactgagacaagctcaatagtacaggaatcattaagcgcaaatcagctagcagccaaggctttacaacttcgcatgaaagggaagcatgaagaagctgagaaacttatggtaagacactctttttttttcttataacctcttatatttaattatttctcacatatgtgatgcatgcactactatgcaaattttcatattgagaattacaacgcaaagtcttattaggaaaaatgaaaaaaaatgaatgataaggtaaagaataatgctaagtgtttggtatacacctatagtgggggtggtgggtggtagaaagaatgagggcatcatgagaattttattgtaattgagctttgttcttatccattgattcatttagacatctattctcagacttggttttactcaatttgcttcaatcttcgatttgtttatgttttttcctattatctattgttattggtttgaggatttctactggagtataactgtttttttttatttccattctatagaaagaaatggagattatcaaggctaagcaggatgttggtaatactctccataggccatcgaagcctgaaagctccagccggtaagtttgcattttatgattgctctgtttgtccttttttatattgtgtgtttgctctcttggagaattgcattaatagttagaaagtaattataattgatgtcctttataaaaaataaaataaaataaattataatgtcaaatttgagccaacttgtacaattatgctgtaattgtttccttatgagtctcacaaatctaattaggtattcctttttgtctagtgctgttattcagggtgtatctcttggacggaagaagaataaagaggatgatgctgatatgcatctagctcaaaagattatgcagaacaaacaatacagtatgtcaggtcgagcagatgatgaatatgactttgatgatggcccaagaaagaagtcacagaagaagcggggaggtaatgatcaggctaaccagaaaaatgtgattgttaatcgtttctcttcaaaccagcaagagcgctgcattttctgtttggagaatcccagaaggcccaaacatcttgtcgtggcaataggaaattacacatatttgatgttaccacaacaagagcctttggtgcctggtcattgttgcatattaaccatgcaggtgagcctttatagtctttgcatagctttattggaccatattatatgaatgtaataattgacttttaggggatgaggctcccatactgattttctttttctttttctttttctttttcaacagcatgtaccctccacggtcagtgttgatgatgatgtttgggaagaaattcgaaacttcaagaaatgtctcattatgatgtttgcagagaaagagaaggatgttgtgtttctggaaacagtggttgatttgcctcaacaacgccgccattgtttagttgaatgtattcctgtgcctcgagaaaccgatgaagaccctgtgaactatttttaaaaaggttagtcagcctttttatatatttttgtaagttttccttttatattcaatgctttgtgcttgtttttaatgctggtagatcctcattggcattgatggagagagtttcatttgatatgttttttttccctgtcaaatgatatggagtaaaattgcttgccttatcaaatatctaagtgactttattacacatttagtttctcttgttttgctcacgaaatatcactattataatttcgatctatactattgcataagaaatattatgatatttgtgaattttgagattaaaaatttcttatatcaatattaccatcgataccaatattttcattttgatcatatcaggaaatacgtgatgcagaagatgattgggctgttgccaagaatgttgacactgattcaaaaggattgcgcggtaaaattcccaagaacatcccatactttcatgttgaatttggtctaaagagaggatttctccatcaaatcgatgatgaagaacaattcaggagtggttttggcctgaatgtcatgagaggaatacttgagctgcccgaggaagatatgtaccgtcgcaggcgccagaggtctgagtcagtgtcggaacaaatgcaagctgttcagaaattcacccgtgattgggagccatttgactggacaaagcagctgcatcaatgataatgttaacattttattttgtttttgtaagcaatgctaacatttgatttcattgtaacatagaataacatttttgtagccttggaaggaaaaaaagaaaatatggaacatgatttatttcatgggtcttttgcgtatataatgccctttgatgccgaaaataaaattgaaaaaatgtgtatgtcaatatttttgcaataccattgaagttatactca

SEQ ID NO: 27813 - DNA, 4383 bp, Cannabis sativa
gtaaaatagattgtttgaacattatttttctatattgtaaattatttcaatttttcaaaatttattaggatgtcttaaataagtataatgtacatgactatgaaaaaaattagactaaaaaatttgcctagatgccgaaacaaataaaaagtgcatcggtatacctcttttgaaagatgcattgtagaatcacccaaatatattttagtaaatttcaataattttacttttttttttttaaaaaaacaataataaaaaagtattagaaaattctacaatgcaattccttaaaagagatgcatcgattcacctttaactgttttggtatccaaaataattttttagtcaaatttttctcatagtcatatacgttatagctatttaagacatcatgcaaaatttaaaaaaatttaacacgccgaaaataaagtttaaataatgtgttgcacgcgtgactattttaaaatattttaaataactataacgtaaaaaaaaatatattttttttctaaattttgaaactgatataaggtaaatcagtttttatgtaatttcggaaataattttttttctttttttagtcttttgtattagttttacattaattgtaccattaatatgttttatataaatatcggaatttataaggctaagaggaggttgttagaatatctaccatacatagagatataaattggcgatgcagtgctaaagtatggtttatttaataaaatacttgttctaatattttattaaaaacatggtaattttgacaaaaaaaaattgtcaaatttagtatatgctgaaaaatatataatataaaatatatacataaaaaaaaatatcacttggaaaatatttccaataaatattgctttaatattaataataaattttagggatttttttttatttttaaattttaaagattttttttttttgtatttttatgaaaatttaaatatcaatttacttggtagaacaatctaaattgcaatctaaatctatatagcaatccaaataataattatcggagtaacttaaaattgtaaaaataaaaaaaatataaaaaaaatatataaaataattccataaatttaaatgtatatttgtgtattggataattcaacattaaatatgagtaaagtcatcaccataatatttaatttatagatgacaaaataagagtataatatttctaattgtatcaataatcaccgggaattggacatcaatatataatatttctagtatacttatatgtgagtacctaggaaccaaaaggctatcttaatgaagaaataagtcagagaatccagcttgtttgatgctgtgatctcatttatataaatatatacatatatatatatatataaaaattaatgagaatataatctcttcatctgtacaatatttgattaattagttacgtaaaatgaaagagacagtcaaacatactgaatccctttacttgtcgtttgccaatgtgctcataattattaatttaagtatacatatgtacaatatacattaacaatatagacacacacatcatcacttagctatatttaattaattttaattaaggaatgaaaaaaaatgacctgagaaaaaagttggaggaagagcaaatgcatcgtttaaaatatttttattcaatcatgtgcatcttttcaatatcgatatatttataaaacccattattaattttaaaataataactaatctatcatggagtagctagagcagattctatattagtttccacccccaattagtgcattttaagatgcacccatcaccaccaactataataaggccaagtaatgatagtgaaatataatttatttatttatttttgtgcaaataaaatatataacacatatatgataacaaaccttgtattcaaataaatatatacactcatatataatattgatcaaattatgcaaattaattaacccaataaaaagatatagaagccgccttcacacccccgtaattaaataaagttatatgaactataaaaacgtttcatacgttggtagtttgggtattatatatctaactttctaacccatatcctaagcatataatataattttttccaattaaaatataatataatgtttatataatatacataaatacatatgtaattttcgaccttaaaattaatatcatgcattttcaaaaaaaaaaaaaattattatctatgaccatttcaaaaaaaaaaaattaatatctataaatgtatgcatttaataggagtttgattaatctcaacataacattaaatcaatactatcacattctaataaaatgtcatttttcattattttgatggaatgattattttattttaaaacataaaaaaaaaattattataatatagcacgagcaaaattttatcaatttcttttatatattttgaattttattcttattcttatttttatttttattcttatttctgtttcttatatttttatttctctaagtttacttatatttcctcttctttttttaaaggaatgaattccattttttgttgttgagagagagaaggtatgtatactaacttatctatttatggctgacgtagctagcttctttatataattccataagaatattttatttatttattttaaacatatgaaatacaatttggccacactattagatattcttaataaaaaaatggcgtattctcaattatacttcagaaagagggttgctcctatacacagaataccaccgaaccaaaggtgcacagcggattcaaccttgtgagaaagttagtcaaatccttgttttttgttatctcgctcttgagccatagccactaggattagaagtaacagttatttactttagatcactttcatctccatctctttttttgctaaagcccttctcttatgcccggtcaaatgaaaaaaaaaaaatataatttgtttaattagaaaaaagtgattacttataatttatttttacaaaaaaaaatccaaatttcacaacatttcaacaacaaatcaaatgtaatttctttttctttattaacaaattcaaatatacacatatagtataaattataaatataaactttacatacatatttaccagccaagataatatctaatcctaatcccactgaaaaaaaaagaccatgaacccatgagttgccacatgaataatcttagtcaacaaaatttgacaaagaagggaataatgaaaacttgcagtagtaatagtatatatatagtactactaagtatatcaatagtgactccaaatgttgggcatggtcattgccacttcagagagataactctcagaacttccttctccacaacttaacaatggtgactcctccaaatttgggttggtttctatcttggtgatctggtccaaaacagctctcaacacttcattatcaccagactggtcaacaccactacaagggttcaaacaatggttgttgttgataatagtactagtactactcgtactagtgtccatcaagtttggtatcccattcccatggtgatgaccaagtcttcctgtggcctcatgagcattattgttactacttgtgctgcttcttatgcccaaatttggttccatttgggtagtgttgtgcttgaaaattaggtcatgggtttggtaacaactaccttggggcaaattgatcatattattattattgttggagaagcagggcacttgctcatgaaaattattatgagctttgttatcatgatcatcaccaccaccactattgttgttgttgtaatagttgttgtaataatcatattgttctggtgaagagtgaattttttgagtaggcttctcaaaacttatataagcatccattaatggagggagagacttggaattggaccctgatttttctccatagtaggctaatcccatgttataattgggtttagctgaagttgctgatacatttctgtttttgtagaatactctacacaatacccaatcttcctgtatattgaaaatatatatggtgaattatttattatttatattattatattaaaaaaaatacaatcaattaataatttgtggaatcactatagttaggattttgtgcttacataaggagataaaattgttagtctccagaatctaaattatgtcagcaaacttgtcatcaaataaaatagcaataattgtatacatttatatttttaaaccaaaaatacagataaataaaagcttagtgcattacagcttgaaagctataaaattagcttaataaggacatgattaggtcagctaccatattaattttttttttttttttgttagtttgcatattaggtcttgtaacattacataactaatcactca

SEQ ID NO: 27814 - DNA, 1659 bp, Cannabis sativa
  modified_base (51)..(79): a, c, t, g, unknown or other
  modified_base (1091)..(1112): a, c, t, g, unknown or other
actataatctttaacaaactcatatgttatggacttaaaaagaattcatannnnnnnnnnnnnnnnnnnnnnnnnnnnncatgtgaaccatgcaacatagaacatgatcttgaatatagacttcaaacctaccaaatacattgagtttgatataatcttatcaaagcacaaccgaaatcattaaagaaaatttccaaacatagacaactttccacaagagaatcattctcttacaagaaatttactaaacaaaatgagacgagctgagaagaaatatttccttaaaaaaaagactaattagagacaaaattaatgtaataaaatcaatttaattgtatgaaaaaatacatattaattaaaaaatattttgacacctaatttaccaaaaaaatgtctttacatatttacatatttaagttcaattttgttttataattttttttttattatttatgttttttaattaattctttaattagcaaaaagtgcacaataatttgaaaatagtacttaatttagtagaacattatacaaatgacacctaaatttacaaataaaagtgcagtttaatatcgaggatcccaattacctttaaaagaaaatagtatttaaaaattgttaaacattttaatcattatttatacaacaatttaaatatattgagtattttaatagtctcttttctagtctttttttcatggaagcgaaactactaaaaattaggcaaacgaaagcagattatgaatctatgatgttaggttaaatttagttgttctcacatcaatcaaaaatcctaagttgatggcctatcccctctaacaatatattcattatttagtaattaataaactaataattatccttaaaaataaataatttaataaataaactaataataataaaaacatacatttcactatttttttaatttatttttactatatatgtgtgaaggatatctttatatattaaaagtgcttatctaacgacattttttggtttaacagaatatacctgttaaatttaacgatgttaataggtttgatctcccgttaacaaataaacccaataaataaacccaataattaaannnnnnnnnnnnnnnnnnnnnnttttaaattaaaaaaaatcatcttagccacatatctctaacaacctgtatatccccaaatcatcaaatccggtataggtactctattaattttcttgttattattcttaattttaaatttagcttcgtatttaacatgcatggctaaaaatattctctttctttcctctcaaatctttctggccacacccaaaatatcggtttcaactttcggaatttaaaacagacaaagcttcactctctcttgctcttgctcctggatttcgagaattgttcatccacgatctacattctttcattcggtttctctctctcaatctcttcttttaatatttttaatttattgattttttttattttattatttggatattcttgttcttgttttggattttgcttcttgaatttcgttttcggtgtttgattattgttatagcttatgtgactacgatgaaatgaaaggaaatgaaatgtctgttgttcttgttctgttttgtgtgtgagctcgttctttttttgtttcttcatcgtatgtatcatgattttgc

SEQ ID NO: 27815 - DNA, 2272 bp, Cannabis sativa
gccattaattactagtcgagttataaagcctcagaaattacaattctgtaaaattactgcaacgaacaagccattaattttcgtgtttactttgaataataatcattatatggtgattctagaaccctaaccaaattctttccatattaatataaaaatatagcatgaatttatatatcatttttttcaattaaatgataaaactttaatatttgtagatggatcgattcaatactctactgtcttcaaatcaaacatctaaactaaacccaaaaaaagttcaacttaccatattactagagcaaatatcaaaagaaaaactaccgaattgcaattagcaaacatacaatcttcaggtacgaaatttcccattttagagaattaatgtataatattcatactattgatcttaaatttggctaaccgacaacaaagtcgtatttataattgatattaccacgtgtacacaataagaacatgaaagtaaagagacacattatttttatagaagtttagcgccccttagttagcgagtaatgatctactcccattttacttgtattaataacagagataataccactcagattacaagagttgtggattttgaagtggctctcttaagattacaataatgagaatcagtaggcaaatctcaagtgagagagatgaaagagacttagtctcttcaacaattcctaggatgtatagaagagagagaaaaagagagttggggttttagacttaaagcttgagagctttagggttcttcaaacttagagaaattaggttcaggttgaggcttgttatgtaggagagcttacaagagaataataacataatatccctgaaaatagaaaacataacatatgtattgcataataaaataataaataattaatatgttaattaatcaccaaaaacaggtaaatatttgatatttattccctatttttgtggattattgaagcccaattcgcaacttggattgctgtccaggatgtaagctgcgcaccaagtgcctgccagagtgaatgctacacaccaagtacctgctagggtgtaagctggccggccaagtgcctgccaggatgtaagctggcctgcccttcctttgctggaggttggctggccaatgctggtcataaggccagccaagggggttcgatcagaccctttaaggtggccagttcgttgtctctttgttatgcttaagtattcggacttctcgtcaactgatatattgtgtatgatgacttggcttcttattgacaagttatactacatgtgtccttaaccttgcccacatagatatgccacatcatgtgtgcaaaaattgggatatttatccccgatgtccccgtgcagatgtctgtatggatagggactttccataatcagtttggactgatggagccttaaccggccagatcttccaatatattcagtcttgaaatgttttctcttgcttgtttgatcacattcctaagcagaaagctgataatatttatacatgttattttttttgcatgttgcatggtaaatgagagagggacacatcagaagctatataagcttagttggtgtaactcattctcattccacatttctcattctctctctttgaaaaaggaaaccaaagaaagctcttcactttttttcgatgatccaatctttccaccatctttcccgaaggttttcactagtgggtaagcttttgaatcccgctctctgcttatttatttggatttgccattatttcattcaagcttttccatgctttaaatattctttgattctcacgttagattgtagtctttttggtattttaatcttcatgatagttttagaatgcataatgtgtgatttcgtgacgaaaaatatttgatttcggccttcgttgtgattcttgactctttgagtcacgaagaacacgaagaccatgttcgagttttgaaaaacatacattttgatccaaaactaccgttagccgaacctaggggtcttgtttaagatatagctggccctagggttttttcatggggacaggccagttttagcgtttcaccctagaaagttggtcggttcatggctgggtcctgtgaccctggccggttcttggatgggtcatgggaccctagctgacgctttcaaagctttgggaccctggccgacctaggccttggtctcaagtaggtggctaattttctatcctcttttgacctcggcaagaatcctgtcatagccttgtgggcatatacaaccttagtct

SEQ ID NO: 27816 - DNA, 4112 bp, Cannabis sativa
ctttttgccacaagatctcgtgctcgactcttgcagcttcgaaatcttctccagaccacaaagaaaggatcattatcgatcgaagaatacatattaaagatgaaacaacatgctgatggcttagctgctgctggtcaacctctcaatgatgatgatcttgttctttacattcttggtgggttagggtctgaatatgaagcagtaattgtcaatcttacatctcggtctgaatctctctccctccctgaagttcaatttatgttgcaaagccaagaaatgcgcattcaacaacagaccactgattccctccacaatgttcaagcaaatctggccaatgccaacttcagcaacactagaggttcttattctagccgaggttcaagaggtgcttatcgtggtggcagatctacaaattctaaccgagggggccgtggtaacagaccagtatgtcaactttgtggccgtgctggtcatatagctatcaaatgttatcatagatttgacatcacttttacaggggcagcatctacatcttcaacaaatggtgaaaatcctcaagcccttctctctgaaaccagctccaacacagacatttccactgcttggtatttggacagtggggctactcaccatatgactcatgatgctgaaaatcttaacaacaccaccgactacaagggtaaagctaaggttgttgtaggtaatggttcatctttatccattcatcatttgggcactagttctgtccctacttctatccccaatcaatctcttttattacaagatattcttcatgttcctaatgtcacaaagaacctacttagtatctctaaattcactaaagataacaatataactcttgaatttgatgacatttcctgtcttattaaggacaagacaaccagccgtgttcttctacggggccaactcagtgaaggcctctacaaactacaagtctcttcccccacaacacaagaatctgtcaagaaactcactgtttctcggcctcaagcctacaaccacacaactactagcaatcctgttcaagacaagtctcaaattgccaacatatggcactgtcgacttggtcacccctctcaacctattcttagcaaagtcttgtctcaagttgttccccatttcaaatgtaaacaactttctttctgtaatgcttgccaaattggcaaacttcaccaatttagcttcaaagctactgaaaataaaactgtacacccatttcaattagttcttactgatgtttggggtccatcgttttatccttctagtgatgggtttagattctatgttagttttatggatgattttaccaaatttgtttggatttttccaatgaaaaacaaatctgaagtcagtaacattttctctcaattcaatacctttgttgaaaggcaatttcatacttgcataaaatctgttcaatccgatcttggtaaggaatatgaacccttgtataatctatacgaaactttaggcatcgttcaaagaaactcctgccctcacactcatcaacaacaaggtagaattgaaagaaaacatagacatgtggttgatattggtcttactttacttgctcaagccaacatacccttaactttctggtgggaagcttttgcttcagcagcctatctcataaataggctcccacacccgattcttaatcatgtttcaccatttgaaactctttttaaacaaccaccagattataacatgctcaaagtctttggatgctcctgctttcctcttctcaaaccatatgaaacacacaaagttgcttttcgatcttcacaatgtgttttcataggttatagcatcacatccaaaggctttcgatgtttacatccatctggccgtgtttatgtgtctcgaaatgttacttttaatgagcaagtttttccttaccaatccttgtttcaacccactgtccataagcctcaagattccccaccagttttggatccaaatgcttttcttgttccttgtcatcaatctgtcatcaccacttctaatcctgcaccagcaactgctcattcaactttttcctcacaccagcagcctccatctgtacctacctcaccatatatcagcagcaattctaccacttctgttacaccacacccaaacacttcacctattagtcctactaaccccacagccccatctcctccacaaattcaaaaccaacatcccatgatgacaaggtcaaaacatggtatttacaaaccaaaactgtttgctgcccacttgaatgatgaagttgaacctacaactattaaagctgctcttgctagtgccaaatggaatgcagccatgcaacatgaaatcactgctctcaagaacaagaaaacatggattctagttccaagaacctctgacatgattattgttcaaaacaagtgggtttaccggattaaatttaaccccgatggcactgttgaaagacttaaagctcgtcttgttgcaaaagggtttcaacaaactgcaggtattgacttttttgaaacttacagccctgtcatcaagccttgtaccattcgaataatgttcactttggctgctacatatggctgggaaattcagcaaattgacatcaaccatgcattcttgaatggggagcttcaagaagatgtatatatggctcaaccacaaggttttgtggaccctaaattcccaaatcatgtctgcaaacttcaaaaagccatctatggtttaaagcaggctccacgggcctggtttgatactctgaaaaacactttggtcagttggggatacaccaatagcaaatctgacaccagcctcttctttacaaataaaaatggtcatctacttctcatattggtgtatgtggacgatattctcattactggagctaactcctcacaagttcagcaagttattaatgatctacacaacacttttgctctaaaaattcttggtccagttaactactttctcggttttgaagtttgcagaactggcaacacaatatacttaaatcagcaaaagtacatcagagaccttctagttaagactcaattgctggactccaaccctcaatctacaccaatgtgctcctctacaaagattactgccaccagtggtactcctatgcaaaatcccactcaatatcgcagcatcatcggtgccttacaatacttgacaatgacacgacccgacatatcctttgctgtaaatagattgagccagtatatgcaacaaccaacatctaatcattgggctgcctgcaaaaggatactacgatatctgtctggcactcagcaccttggtttaacctttacaccatcttctcgattggacatacaaggtttcacggatgccgactgggccgggtgtcatgatgaccgtaaatcgacttctggttactgcatatttcttggaggcaatctgattagctggtgctcaaagaagcaaactgtcgttgctcgttcaagcactgaatcggagtatcgagccttagctttagccacttcagaaatcatttggattgaatctgttctcacagaactcggcatctctctacctcaatgtccaaacttatggtgtgacaacatgggagctggctctcttgcctcgaatcctgtctttcacgcacgcactaaacatattgaagttgatttgcattttgttcgggatcgtgtcttagcacacaaactggatgttcgatatgttgaatctgaacatcaaattgctgacctattcaccaaacctctgtctacttccactttttcctatctacttgacaagttaacccatggcttaccccaaccgttaacttgaggggggatgttagaatgtaaaatcagttacgtctgttactggtttttttactgttaggaaaagtcagttaagtagttagagttgttgtgatttttgtaacagattgattcttgtaaagatctctcttcttgcttctgtttgctgtaacaattattctgtataaataataaagagtctcaatcagttgaggattgagcatttcatttcatcactttccactttcatctctctctcttttctctctgctcaaactctgttttcagagttctttcaatacgggacttaaaaaatgtata

SEQ ID NO: 27817 - DNA, 4664 bp, Cannabis sativa
cgactccgtagggaccctacggaggcggttttttcataataagcaacgtcgtaggctccttacagcatcagttgtttttaacccttttagcgtcacctggaacaacgtcggcaaccaatttcgccaaaatcgacgctgaatggccttaaaaaccgcctctaaagcctaattttgtagtagtgtaccatatctccacttcgacatggttggtgatttacttgctcaaggtccacatttacccccattaaggatcagtctttgttgagtaccccttaggggtcggctcaagacgagtaccctctaggggtcaccttaagtcaagtcctccttcatcatggtggtgttggacccgtcctcctataactttggtaccaaaccctatccctgcttggacaagggtgatggtctatttgcttagagtcccaaggtttgtcccgtgcactcaacatttgtttatgcctatggtttaatctccatacaactacaagtgtcaaagtaacacatgacaaagaccgtagagtcccaaaattggatcaaagtaagaagcaaaggtgtatgtcctgaggttaacgacacaaggtcaagtttccctctagggcttgaccaaggcagagtgtccccctaaggctgacctgatcaagtcccatatggacaatcgcccagttgattatttttcctagcacttgataaggagacacgctcacgatgtccaatcgcactgaaagctcaaaagttgttacaaatccacaaaaaaagttgtatatcaccaaaagaatcgagtcttaacacattttgagaatcatggggatagttaagatattctctcatgtagttgggattctattgaaccttaggacatgcctccataagcgaagtgcatgatccatctccctatataagggggcatacttgacctagagaggtgatcaaaaatttattattcataaggaaaaacactatcatttttacttcttgcactgaggagctagttcttgacttccaacccagattaataagatacaaggggagtaggctattaccaacacttgaggccgaacctttaaattcttgtggtctttattagcatttattacatgttttttgttttattctcattaattaagactccgtgtcgattgactaaaaaactaatcagcattttattttggttctttcattgagagcttaagccaaaatctcgaagcttttatcgaaaataatggtgtttaccagaaggtcatctaaagaatgacctgacgagggtgttgacaatgcccaccaagtcctattggtgagaaccttcctgaaactgtggcaagggactgccacatcctggtagtcgaggaaacaccaccactaggcataccatcgcctaaactaaagttgatggacaaactatcgcttgccgtacaaccacagctcccaccattggcagaggtgcaactggcagtgcaatcgatagggacactacaagatattttcattcggactgatgaaggcacaagccattccaatgccttaggggtattggcgcttttagggcaagacgtaatgagccccatgtgaatatagaagggatcaatcctgatattgatcagttgagggatgcaattggctaattgtaagaccatgttcagagcgtgcaccaagacaaagcccaagctcaaacgactcttcttgagagtcttgccaaaaaaggagagaacttttatcttggttggatgaacacgctcaggagaggaaaaggtgtcaagaaactatgaattgacgtacttcggaagtggcttacttgatttggagttatgtgaagaaaaacatcaatggtttaggcacagatgccatcaactaacaagtgtccattgaccaacaaaccaatagcaaggacctatgtacccctacggaccaacaacaaagggttgtctacgaaccataccaccgtcttcgggatagggagcatgtcaagagtcgtcattctaatagagaccctaacaacaataacaacgactgtccactccctgtggatgaccaagtcctttcaaaacaccttatgggaagggaaaacaataataatgttctgatgaggccgaacggaggaggaaactctaggaacaacagtgttagcaaacatgggaacaaaagaaggctaggccaacaacgagtttggcaaccctactgcaatgaccaacctcaacaagagaatggtcaacctaggaataattgactaagaactagaagggaagacctcgaagtcactagttaataacgtcccacctaccctgatggtcatggagaagataaagctgagagtaatgctaacaaccaaaataaaaatggtaggagaggctattagcctgtaggactgtatgtctatttaaggcagcacaaacccaccaacaacccacctcaaagaggtgagaatcatcaaatactgcccctagtatctggaagagcagacaacgaaaatgctgacagtatgccccaaaggccaagattagtctttaaccaaatgggagcctaaggggttgaggacctttagaataccattattagaaattagggaaattaggaaaatagggacaatcgaggcttaaatcatatagcttcgcatgagacgatttaagaagatcaggtcaacaaaggcttcaacgtcatccaaccctaagtcatcatagatacggtgatccaaccatagatagatgtgctaacttggtgtgttagggaccttaccgcacaaaaactaacacacttaaagttggacagtagaagagagtcttccttttcacaaagaatcaatgacctcccaatcccaaccaagttcaagatgccgacctacaagatgtacatgggtaaagaagatcccttcaaccatgttgagaacttcaagatccagattgatcttcaaagaataaaggacgacctcagatgttgtatcttcttcgcagccttgacagacatgacacaataatggatcaccatgttagctcaggggaggatcacttcataggaagagcttgttggactattctataaattctcttatgataaacaaatacccgcaaacttgggtgacttagtggctaataaacaaaggccaaacaagccactcaagtactatattcatcctacatgtaagaagcaacaaaagtaaaaagtctaagcgacaatggcaagctggccatggtcataggggcatcaatgtgggaggtcgactctggatagacatagggaggaagctaacccactttaagaaagccttcctcgatagagcagacaaatttattaagtcggaagaggctgaacagattaccaaaggccttgaccatgccaaaaactttaagaatggagcaagttttaatggctcaaaaaatgggaagagtgtcaacaataagagcgatgttagtaacactaacgataacaagtgactagagaatagtattaagcaagtaaggtcaaaacccatgaccacaaggtatcacccaaagtactgacttgagtagcttacttgaaccacatatattagggttagagaagaaacaagagcaaaagcatccaaaggatacttggaagcttcacattggtggctcttctgttgaccaattgtaaggagcttgtcttaccttgaccactcctgaagtgtagtacattcatgccgctatccacttaagattcaccgcttccaataataaagcaaaagacgaagaactcatcgctggtttcaaactagcaagggaagaaaatacgattgtgaatgctttggctaggctaacaagcattaccaaggttaagaaggccaaccttgtccccattaagtaccttctcaaaccaagacatctttgcctggtgacatgaagaaatggtgggaataagtcacaccatcttgagtttgctcttaatttggaaggaccttacaaagcggtagaggtcattccccctggaacatataagtttgcacggtacaattccaacatgaacttggtatcagggcctcgctattgtaacaaagtacacctctgatggtactatcagtaaagttggttttcagcaactgcttaagctataggacaatcccaccaacgaagtttgttttctttttataaggcatgtgcacccaacttgatgtagttaggcacattttcccattttattcatcaaaaaaaatttcaaggtatgacaaagctcgtatgattgttattgaatctatttatgaacttaaaatacttgcttatcttactaactttagtgatttagtcacataattttaagagtgcatgtgttgacgtagaaatttggccaatattcgctcgctagattggcgagaggaataataattttaagtaataaatagagagaaacaggaaatttctagtagttcactcctcgtgtcgtgatggtaatagagctaagtctatttttagtttttatttctcatgagaattacaagaaacttgccaaggcaagagctctaatttctagagagagattctctgaccttatgaggatttaaaagaatgtgaaaaatgaggaggtcctattaaaatattaataaaataagacaaaaaatttgaaaattctctttgggctaatcttgaccattgatgattatctaatgatgaaaattgaattttgataaaatcatcaactttctgagtttgaatctcgtctgt

SEQ ID NO: 27818 - DNA, 4803 bp, Cannabis sativa
aaaaaatgttgggtcattatttacttgcccatcattatttttaataacggtttctactactactactactactattacgttctcaattattattacatgcacagtttcattccaaaaacaccactatcaccatcaccatcgagattattatttgcctcttttctcaactggccaataccataatcatcacatatatacgagcagccatacactgagaggggccaataccacatcatccaaaatgatattttcccacttgacttggggtattcaatcaacattattactgttttgtttttgtgtttactttcattgttgttgtcttctaagtttgttcacttggtttggtttcgatattggtttcaagaagaacagtgttattaatgaattatagatgatattttttttttcttttcttttcttttattgttgatttgttgttgggttgacggtattaatatatatgattaaaggaaatgaaaatgtcgaaatgggtcagtaatgatgttacattattttgtttcgtgtaaaaaagggatgacccaccagcagaaaaggaggtagacttatagggacagaatttcatggatagaataaggacttcgtgttccaatttaggacacacaaaaatctgtgctctgattaacctctccattttatttggaaaaaaaaattgaaaaattgcccaaaaaagttccacaacgataaaatgaacgtgcaagttgaaagagtaaaaaatcaagcacaattaatttgggtggaaaatgacacaagttaatttaagagggtggtccggtggaggtgtcagtcaagaaaggctgcctatttaattaggaagagccgtcatttgatacggggtctaaaactggtgaatcctgacactagtgactagttgaatgtcacagctgaatttagccccaggctatggtgtttgagttgggttggattgtgtatttgattcacacataagtcccatctataaaatccatattcactcccttgtttttttcccatatggaaaagagggaaacatttatacatgtcccatcccatctcaaaagttgataaaagcagcctttctttcatcctaataatcaaaaagaaaaatgttgagtaaattcttcactgagtaatgaaacttttactatgacggttaaaaccaggaattttagtgtgattcaattcaatgtggaaccaaccaagtcacagaacacaacacatgcaataatatgcttttggtttaaatagttcaatatctagttgagaagtcaagttgattttaagtcctactactttctagttactttgaaactactttttgagtcaataagtttggttcatatctagaatctactttccatagcatatgattgaaaggccaatgacaaggccagcccagccggaccctttggtcccaatgttgtcatgcctcaaacaggaataaatatttctaaagatgcttgttttgtcgttccattgtatggtttgcattgcatcaagagactctcaagcaaatgccctttgcccccactccacaaatttcatttgattcattcaattcaagttcaatcctattttaagtttcgatactaaaaattaccacaccaataactgtctgtgaacctctgctttacaaactagacatgaagataattccacaagctcagacatttacagccaaatgtttgcttcaagcaatataaggtataattgttagttttggtctgtgtgagataaacaagtacactttaggaattacagctggacaaccaagacctttgtaggatatgatcacttgaggaaatgagtgtagacttttgtatatagcagcttgcaggtctacaaaaacagtaagaaagaaagtaaaaaaaacttacctccattgcccactccaatttctagattcaaagtagtatccaggattttgagaagcatgattagtattaaaagtgtggtcaaaatgcccaaactgtggtccaggcatagtaacataaggattggagctccaagcatgcctagaaaaggggtcaggtgcactcctgtaatgagatcttatctgagaatgatcattaacccatggaggatctgcatgtgattggaaattcggaaaattacttgtaaatggacgtgagaatttctgatataccctaaaatgttcagatgatctaaaagttgaatcatgatgttgacgactattattataatttctagattctccaagtggagttttcccacgactatcaaagttatcctttctcttcattgtttcgctggcctttctctttcgtgacggtcctgcagaggggatttttttctgatctttagtacctaatcacgccatcaaatgaagcaatcaacaaacaaaaccaataccagcaacataaacaaatagaagcaatccttttttttttaacttatttctctcatgttcaacacgtgaagaattccctcccccacctcacctttgtttgcaatcccattctttgttctcttcatagctctctcaagcctagcagctgcacctcgtttatgcttttcagcaagtacattcagccgcaatgcttcgtcactccaacgctaaaatgtggacaaacagaaaatcttaacagcacatggttaccatccccacctccataaataattatatagataaattccaaagagctcacctgtctgaaagttctcattttatagagattgcgaccctttacaagcaaaggatagagcggagacaacttcttgattcctctactccagaaaacttctacctaaaatcatcaagagcattaacaaggcagaagaaaaacacattatgtctcttctaggaatcaggagttgctaaagcctcacagtaaatgtatgttgttgttttgcagcaccatagctctccttaacaactcttccagcaacagttctcttccctaaaaccttcccatgtctcatcactttatcaaacctggcatagtgcaagaatttttaggctctaagaaatgtcatcatatacctaaaagaccagaaaaattgatggtgtaaaatattactacctctcataaactttttgtgtaaagaggacaacatctcccttgcaaacatcgcctacatcaagtcacacattgcttgagcagatggtaaatttttctcataattataggtaagaaaatggtttcaaaggttaaaaagcaaaagaaccatttaccagtacaattgatgtcaaatgatgaactagggtaaagtgcttcaccatttccatccattaacctaataaagtaactcataattaataactaacagatacttaagaggcaactggagtaaaatgaaaacaaaaaaataaaataaaaataacatacacagcattcacttaatgaccaaaagttttactggaataaatatatctaccacaacaatctgaaagtttgaacataacattaggcataatgaatacattaatatttgaataaagtataatttaggcataacaaatttcataactttaagcaacaaagtacccaaatttccagactatatctaccttcaacagaagccattttactatgctggttaagttaagaaatgactaaaaactccgggtataaacatgaattgcatgattttacaaacccttattacagatcaaaacccaacattagtaagtttaattgttttgtttcaggattcattcatttacctgcaatgctccttaattctttgtatacaaacagacttagtcccggctactctgaggccatgcttccgcaaatatgctttgcaatcattgagctttaaagattttaatccatcatgttctactcaaacacaataaaaataccagaaaatattcagaatctcaggaaggaaactgaaaattaaaatattatgaatcataaatcaagcgtattcaatagaatgttggaatgaaaaactcttatcaatatcctcaagaagaagaaaacctttcaaacggctgttaatattgttagagagcgactcaacgtcaacgtcaacgtcatcgccgtggccattgctatcttcttcagaatactccgagtcctcggattggtcatcatcataatcatcgtcgtcgtcgtcgtcgtcgtcttcttcttcttcttcttcttctagatctatatagtcggtggtggcgtcgtcatcggaagaggaagagaggcaaacgaaagggaggttaccttccttttccgccattttcattaccggattaaaacacacaccaattttcgaacaaatagcctctttttttttctttttaattttattatcaaatcaaaactaaaataaaataaactgccctgttagataaccgccatttctttcaatatttgaattttacactttttatattcaaatcatatcgaaaaaagaaaaatcacattttatattcatggatttttttttctcttttcaaaacaagaacaacaacaatagaaataataataataattattgtttaatttttttttttttttttgagaataaacaatgttattataaattaaacagtgtcatttacaataaatggaaggaggaaaattctccaaccaagagcaaacttcatccaaccctaaggcaaattttgtcaaactatctgcaactgaattagcatttcgattaacatgagttacaaaagtgttaggaaaaaaggaaaggaggtaagagatgtctctaattaaatcactaaaagctgagatgcctgccgttggagacttcaaagcattggaaagtaagagggcatcagtttcaacaaaagtaactggaagctattgctgaagaacccaattaagaccg

SEQ ID NO: 27819 - DNA, 1524 bp, Cannabis sativa
ttttttttttaacttttacatgtattaaattatgttattgaatttttcaagttattaaaaaaaatttgaactattactattaagttttttgaatttcggacgaattttagaagacttcttctaaattgctggttaaaatttttgaggttggcaatatgtctacttgggcgattttttttttatgaataaggaaattgtattgctcaaacattcaattacatcatactgttcatatacaaataaatcagcactaggacttagaactgggggtgttcgctaaaattgtccgtaccgcaaaaataatgcagtttgaaattctttgcagtgcgattgtagtttaaatttttgtaccgcacattataaaaatactaatttttatattcatttttataaaattacctttcttatataacatttttcaattaccctcacaatatatttatacgtgttgagaattatggggctccatcttaaaactaattggtgataagtagagtaacccatgttcttatatatgactcaatattttactatttattcaatgtgggataatatatctacaataatgagatattttagaggaaaattaaaagacaagaaaaataaaagatgttaattaataaaagaagaatgttattacaataaagataaagatcatatttagcaaagtaaataaagttagggaaatagatagaccaaaattatcatgtgctagaatatatattaattatatatagatagttattgacgattaataaatatgtatatatatttgacatattataaatattcactttaattccccaaaagaaaatattcactttaactaattcttttaatatacgtatctttaaaaaagttgaatcgtatttgatttggagaaaatgacagtcttggcttaatacatatcggaatctagttcccaaaatctccaaaaaaatattatatttaagggatcttagttaatatatagaatttctttttttcttatagcaagattatataattattttgttattttgataattgataatagttaaaataacaaaaataacacgttatacaaaaagtagacaataatatgataaaactttaaatttgagagttgtgacttccattctaccaaaagaaaccttataaaatgtagaaaaaaaaattgatgaatattaaatatttcataaaatataaaaaaaaaaaaaaattatataaatataatcataattttataatataaaaagattatgacttatttttactcatggatggtatgtatgtctaaaactttgtataatgatagaatatatgttgttatcatctcaatctaattagttgataaactcacttatccgaatatccttatacatattactcaaaatatcttattgataagtatattatattctaaaaatagaacatgtaataacatacatgtaaatattattcttcgatttttgttagggaattaatatgtttgattaatatagttcaattaaaatgaaagtacgtacgtatatgtggttgttt

SEQ ID NO: 27820 - DNA, 1790 bp, Cannabis sativa
tagacctactaaatggagaccccgaggggggttggtgttgctccggctactgcgttaccagaggtgatcgttactccaagggggctagttgcagcaagccaaaacgaccaagatgtgattctacttgaggagggcgagatagtcccacccaaaggccagagaggcaagtgctaggagcgttcctcttccaaatccatgtcgttaaaaaggtccaagtccaatgacactccatttttggatacatccaatttagggatccctttagaggcgatcctttttcctagggccccttccattccattaactccagtccatttggatgaggctcacttgcaactccgacttgccaggcccaaatttgtcgtggatgaacatacaaaagggagtgcttagattgaggccttaaagaggtggttggatgagcactaggatgggtccctccaaggcagtatgctagccaagtacaggacttaaacttggatctgatgatggactggtttggtaattatcttggctcctccctttctccctttgcttctgagatcgtcaacaatctggcaaatgacttgcttaagctttgcaccaagagattcccagcttgtgcatcgacaaatacaatctttcaggcccaagacttgggcttgatgctagctttgatgagttgtatttcccttctttgtcatcattattatatgttcatttatttcttaattactcaagcttgcttttgtactattttgcggcttggttaggctattgttgaggttgggcgattgtccaaaatcttgattggccaaggatatgacaatgcttccttgggggcttccaggggtacatgccaagttgaagcaagttgaggagtaggcaaaggccttgaaagatgatgtcctggcttagaaaactctgagagagcgagaccagagaatggcagccgaaatggagaaggcaatgaaggaaagccaagaactgatgatgcaggctcaatctcagatgttggcgggtaagcagacctatcttcaaaaggaaccaaacctatctaaagtccaacgggagaatgagccttaagaaacgtctggctaagcttgaggagcttcatcaatctgatttgaagcctgtttccaacatgtctatggaattgaaagagctctatctactctgggattcaaaaaagttagtcgatgaggtctcgactaggaatcttatttgactcccctctgtggtcacttgccaacactgcgtaaagtgctatggggatagcgttttcatgaccaggaaaatgaacaagttccaaccccgtcttcactttttgaatgataccaaagctactttgaaacactttgtggagaaatataagaagttagtggcaactttggcagcgaaaatgggcggacctcggctacctccttcatcctcgccgagatagtgattgatccaatttcataaccaacacatttttttatttcttttttatggccatgcaaccactttttgattatggggggacgttataaatagtctttccccatggcttttatttattatacttttataatttttgagacaacatgacctggtgggctttatcttagtattactttcttttctcaaggtcctgatctttgcacaagatatattattattttttgtgctttgcttttggcatccttgctaagtttaagacttattttgcttgatttgattttttttgtaggtaggctacacctccgtaatggtatttactatattttcatttgcttttttgtttatatctgctaattacttaccgccaa

SEQ ID NO: 27821 - DNA, 1800 bp, Cannabis sativa
aatatataatattgttgtctttccttttttttttttataaacatgctgccattggaaaacaaaccaaaaagttaaacaactgagttcacatctcccaaaagggaattaacttcagcaacagaaaaaaaaaaacgacacaagttttaggacgcagcccaggatgcaatcacatgtgcagcatggttaaggtttctagggatcaaaaatagccctaaaggagcctctcctcccgtctcatctaaaatagcttcgaaggtgagataggacatccaaaaagggaaatgcttgctgtctttcattaaaattgcatttctccaaaaatttcttcaagaattacatttgaatgtcctctttgtacatgtaacacaatttttatcaaacaaaatattagattcaaattaatatatattattattaaaattaaattattatagcttacctatttctattatcttttgtcttcatcattgatccaaatgttgaaaatgtggattagacaaaaattttaagatgttatcatctccctacaagcacaaaaaatacaatttacatatattttttgtctataatatattccttacttaaagaacaaactaaaatgaattgtcttgattaaaattacttactgaataataatgtaaatcttaattttcataagaggcgaattcaatattattttttaccggtatacataataattacatgatatttttacaaataaagaaaactttaaataaaagtaacatataactataatcattattttataaataaacaaaccatcttttgagaagaacatccaacttcttcatgagataatttaactgtcttcaatgccttcaatataaaaatctacatattaatttgagaaaatataaaataataataactttatatgtataaaaataattaaaatacctttttagatgtgcttttcttggattttttctcaattctacacttcattcttttcggagctcctttagtctttgaaacttgtggatcatttagtgaaatattacgcataacattgctatcaatattttttttgttaagatcatgggactcaatgttaggatttatggagttcttttgtgaatgattctccataatacatttttttagtgcatccttcaaagcataatatgcaatgtcaaaactcttcaaggacattgatccttcttcactcaacttgatagtttcatggtataactcatcaaaacgttgtttcttggattgtatactttttggactttgtatagttgagtataaacttcttgcatctttgcaccaccgtatcaatatataatggcacattaaaaatgccaaggtcttgaaaaacacaaattgcataccgacaaagaaatccgtaatactcaaacatgcgtcataaacaagttattgttgttgaatttgaatctcaatttactacaaaattttcttttctctcaaagtcttgcactttaaaaattttcaagatgccatcatcaaattctttcatagaaaagcaaccaaatgcccccatatcctcaacttgaaacttcttaaaaactttgtgtgtgtatattgttgacatttgtatctcaaatggtgacgaagattttaaagctggacttttgtgccatgtattaaaatttgcataaacttctttctcttgtctgtcttggaaagccaccttgtattgatcaacaaattcttttaataaagttttcttgttcacatatttatcaaagaaagaatttatactttctgatcgttgagttgtagacattctagcaaaaaaagtatctctcacataag

SEQ ID NO: 27822 - DNA, 1860 bp, Cannabis sativa
ttctctcaaggctttggcctcgtgctgcttgtttgggaaagtagttgcacccatggtggtggaggaaataaatgttactgattttgtggccaaaaactggaagatgcaagtttcggtagtggcactggtggatgaagagaagacatctaatgtgttcaagttcggttttgaatgtgtggaacataggaactgggcccttgacaatggaccatggtgtgtgcgtggatataccctgattcttcaagcctggactccgtccattgatggaccgattgaccttaaaataatccgtctatggattcaaatacataatctcccccatgaatacttttctaagcaaatggtaacctgttgggggagttggcgggtaaggtggtgcaagtcgagttagaggaagataggctggcttcatggcgcaaatttctcaaggtgcaggtggacatcgaggtcgaaaaacctctgttttcgggttgtttcttcgacttagcttccgaggtgaaaagatgggttcaggtaaaatatgaaaaaattggcatcttctgttatttctgcggttgcctggggcaccaacgcaggggatgctctctcacgtcgccggtgacggttgcgaacaaagatgggattccttttcctatgtgtcgcctatggctatctattcaatcagtgtaccaaaatgtgttttctggtcctatctctagtgatacccgtaggtttgtttcctcggatggaagaaacgacggtggtgtcttgttatcactgccggcgatcttgggtaacgatgacgatggttcgaagggtactcttccaagctcctctcgacgtccgagacgtccggtgatagggaccactcgagcttcggctgacctcgggaagacccagcgtgtggtgtggttccctaagaatcgtcctcttggcgtggagaaggcagtttccaaatctgactatgggggtgcgactgaacgcctggacaagagaaagacatctgaggttttacctgttttgaatttgaacagcttagatagtgagtctctcaaggataaaaatttcaaaagtttgcccgttatggatagtgggccgtgtgttactgggccaaatggaaactctattgtaaaggctggcattattaaggctattggaaatgggcctactaataagaaacttggtaatgggcttcctatgataacttctagtgctcaaatgggtgggcctatggttgattctaattttaaaagaggttcggtgggcccgtgtcttttgggtagttgttctaatccgattgggccggagtctttagccaaggaaaaaagtgaactcgtgggggttaacacttcattgcctaacatttctcatggggcaccggtgcttgttaatgaagaacaagctttagctcaattctttaatgctcaagaagaattgttacacgacctcaagcattttgggaagctcgatttgtatgagattcgtaatataggaggggatattggggtcccggcttcctctgaagttaatgagagaacgacacctttcaagaaacggaaattcgaagcgtctgcctctctttgctctagaccccacaaagttccttgcaagtatctagatgttgttcgtgacttcccctgggatactaagaataaagtaaatgacctgaaattggagattgatgatccttcggaggacagctctagctccccgagctgctctggtattttgaagaacccgatggttggttcctttgtgattgatgaatctgtttcgagtgggtctgcttactcccacaaccatgtggaggagaatgtcgaatcgcctccacaggatccatgagaggtattgcatggaactgtagagggttagggcagacct

SEQ ID NO: 27823 - DNA, 2157 bp, Cannabis sativa
ttttttttttttatctcctatatgttgtaatcatatttttgtacttgcaaaatgttattcatatattattctgttttaattttaattggttgttgtattccattgttttgaacattacttagcatgagaacttgcaatctttacagtggttttgggatcaaatgatgcattgttttgagcagtagttttgttgtttgtattaattcttgaacttctttctttcagtgagacaatgcttcttatgtcaaaactagtcagatatcgtcaagttgttcagatcccacaaaagagtaactttatcatacttaatgttgttaggtcgtttactcatagtgaaggtccacaatctcaaactaaaatcaaaataaacaaaattgctgcacttattaatgagcatccctttcctgatcagccacttcaacctacccttctgcaagttatccctccacctttaatttccaacattttagtagagaatgttcttggtcgtcttttcgctgcccattccaatggtcttaaagcccttgagttttttgattattccctttgtcattcacagtttagtccaagtactgatgcttttgagaagacactacacatccttgttcggatgcggtatttcgatagagcttgggaattgatgaaaagaatcaaaaaagaatacccttccttgcttactctaaagtcaatgagcatcatgatctcaaagattgcaaagttccagtcctatgaagatacgcttgcagcatttgaaaagatggagaatgaaattttcgttgggaggaaatttggtacagaggagttcaatgtacttcttcgagcgttttgcgcacagaggcagatgaaggaggcacggtcagtgttcctaaagatgcattccaggtttgccccagacaaaaagagtatgaatatattgttgttgggttttaaagaatcaggagatactactgctgtcgaattgttctatcacgagatgattgcaagaggttttaagccaaatgttgtcacctataatattagaattgatgtttactgtaaaacaggctgctttggtgatggtttgagacttctcgaagagatgcagaggtcaaatttgtcccctacgttagggacaataactactctcattcatggagcaggaattgctcgaaatccaataatggcacgtaaattgtttgatgaacttccagcgagaaacttatttcctgattctggggcttataatgctttaatgagttcgcttattaggtgtaaaaatgtacaggctgcagccaccttaatggatgagatgaaagagaaacatatcattcttgattatatgacctatcacaccatgttctttggcttgattagaaaaaaggacttcgaaggtgtatttcagctatatgaaaaaatgactgaaagaaaatttgtcccaaaaacgcgtactgtggttatgttaatgaaggtttactgtgaaaattgtcggattgatctaggcttgcatttatggggttatttagtggagaatggatattgtcctcatggccatgcactggagcttctgctgacaggattatgctccagagggtttgtcaacgatgcttttgagtgctccatacaagtcctagagagagggagacacttgagtgatgcagcatttcagatgatagagcgacttcttacgcaaaagggtgagatggataaaatcaggaggctcactgagatgatgaagaaattgcatactcatttgcctccattacaagataagaccataattgttcctgcctaattacaggtacaaagtaatggctatatttattatccaagcatgtacgttgtaattttattttatttgaatttataacttaccttgtcatctgagaaagttagatggatcacccaactatgttcatattttgtttttcatagtttgggagatcaaatgcatctgccattttttcagctccaacacacattcacagctttattgtctgaaatttcttctcttctccactagacctgcccatttgtcactcatttatactagctgaattactggaatcagtatttgtctcatccacactatcaagttcttagtgtgatcaactcaaccaaactaaacacgggcttttaacaaaactttatccttggttttttaagcaattaaattttaaa

SEQ ID NO: 27824 - DNA, 1438 bp, Cannabis sativa
ggtatcagagccgtgatgactcttattcgttgtttaacttctgttcttgtataacctttgtcgttctcttcgtgattcgccatggattcttctccaattctttcctctgcaactagccagaacagaacagctagttctggtggttcttcgttcatccccgttgttttctctcacaaactttcaactaaactcgatcatgataactatctgctatggaaacctcaggtcatttccgccattagaggacacaagcttccgcagtatatttctgacactttcgttcctcctgttcaatatctctcagaagaagatcgtgttgctggaactttaaatcctgcttacatagattgggatcaacaagatcaattgttgtattcttggctgttatcttcaatgtctgaaccgatcctcacacacgttgtcaactgtgaaacctcagcaagattatggtttgtccttaccacatattttgcatctcaaacagaagcaaagattgatcaatacactacagaactccagaatttcaagaaaggttctcataatctcaatgagtaccttctcaaggttcgttctttgattgacaaactcaactctgttgggcataagacttcatcaaaagaacacatctctgctattttccgtggattaccttccccagattacgacactttcatcatatccgtgaattcaagagctaaacccatggaagtgactgcccttgaagcactgctcctggcaaaagaacaccacattgaacgcaagaacaaggatcttgactctgcttccattaatcttgcaaactccaatttcagatcaagaaacaattctagtcaattcagcaacaaccactggaatccatatgccaataacagatctggaagcaatccttcaagtaatcctccttacagaccacccactccaggaggtagaggtaacacgttcaactcttttggatcttcatctaatcctaacaactctggacgtgtttcagggacaagcaataataaagtaatctgttaaatatgttcacgggctggtcattatgcttcaaaatgttatcaaaggttcaatcattcttttcctggtcttggatctcagaatcaaggttttccctctgcaatgttggccacggcagagacagtctgtgatgaatcttggtacccagattcaggtgcaactcatcactgcacctcaagtgaagaaaacctgacacaaaaaaatgaatgccagaccattgaacaagtttacatgggaaatggaaatggcctacccatacaaaatataggtactactcaatttttggcttctgatcaatccactatgcttacattaaataatttactacatgtgccccaaatcactaaaaacttgattagtgtttctcagttttctgctgacaatggtgtttattttgaatttcaccctaacttttgctttg

SEQ ID NO: 27825 - DNA, 3682 bp, Cannabis sativa
  modified_base (3358)..(3381): a, c, t, g, unknown or other
tcttcttcatgtggtagcatctcaaatataacatatccatttcgactcacaactgatccacttagctgtggagacttcaggtactacgatatcatattagtcacaacataatttttttttttgagtaaatatcatattttgtagtaacaaaaaattacttgttactgaaaattataaagcatttccatacaagatttattactattttaatttttaagcgcaatatatatatgtatacttttggtagaaagcccaatatatatatttattataaatttagttataccaaaattttagttataataatgtgtgtgtaaaaatttttatttttgatttttttttaaactacaaaaatgaaatataaattttgtttgtgatttttaaaataaaaaacaaaattcatatggtaacttatttatatttttttgtttattggggaaagataaagtggtgggaacaaatgctatttagaactcaattatgttagtttttaaaaatttaaagattttgattcttattgtaaacaataatcatttttatgaaacttattttaatttaaaaaatagttacagaagccactcaatattttaattgtaactaaaagtatacaaaattccataaaaaaattattaaaaattagtatttggtaacactttttataaagtgttatgcaaagtatttcctactcgcaacttattttttgagttgagctttcaggtacaatctttcttgcgagaacaacaatacagtactacactttcttgttcatgaaaacaaatatcaaagatactatgtacgagcgatcaactacaataactatacgattcgagttatcgatcccaactttcacaaactaaatgaaacctacacttcattcaccaacaatactttgtccattggagacttcaacttacatgatagttatgcagcaataatttatttagagtcaaaaaatcaaaatccttttgaggaaaagtccaaacaaattgcgaaaactatagtgttgattagttgtgaaagagtagtgaggaattcttcttacatagatgcaaatccttgcatactaagcaataataatgatagttttacttggtcatattatttattggataccgataaaatgagtccttccgagttagaggagtcttgttggataaaacaagtgactcttattgatgacacaagttttcatggagccaaaccttcttgttatgacatcaacaaacaactagctcaagggtttcaactttcttggatccaaagtttcgatgaaacagaagtaggcggtgttcgacaaatttgtcgccttaaccaaaattccaacaaagttcgttgcagttattattctaaatgcttatttaaagaaatattcaaaccaaatgaaagccttgataagtgtggtaaggatgttttctagctagagataattaagaatgttttgaatataaatattatattaacatgttttgttgttgctatttgttatgatgcagataattcatttgaaatttttatgagcaagtttatattttacacaaaatgtaaggactaataatcattttattcttagtgtttaactcatatttatttccattctatatattgttgtagtgcattttttctaatccttttatgtggtttattttgtttctacacagactacatatactatatgggaacttataaatacattggtaatgttacctttcattcaaatagttttattattattattgggaagaaaatgttattttattttattattaatttcgatatttttttttctaatattttactagtgggattgttgacgccaagaacattttgtggatttatatttgtgattttccttgtggtgtataaatggagaagacgacatttgtcaatgtacaatggcatcgaagatttcctccacagttataacaatctcatgcctatacgatattcttatcgggacattagaaagatgaccaacaattttaaagaaaaactaggtgagggagggtttggtacagtatataaaggacaactttgtagtggtccctttgttgcagttaaaatgtttggaaaatccaagattaacaatgaccaagatttcatcaatgaagttgctacgacaggaaaaattcatcatgtcaatattgtgcgattaattggattttgtgttgatggtacaagacgggctcttatatacgatttcatgtcgaatggatctctagacaagtacattttttcccaagaaacaacgaatgtcaccttaagtgttacccgagtttttgagatatcgcttggaatagctcgtggagttgaatatcttcatcgaggatgtgacatgcctattcttcattttgatattaagcctcacaatattctattagatgaaaattttattccaaaggtttctgattttgggctagcaagatcgttttcattggataatagcgtagcatctttatctgctgcaagaggaaccatgggatatatagctccagaattattctataagaatattggaagagtatcaagtaaatctgatgtgtacagttttggaatgttattaatggaaatggcaaatcgacgaaaaaatgctagtggaaatactgaaaattcaagccacatatattttccgttattgatacacaagcaactcaacgaaggaaaggaaataaaaattgacgagcatgctacgaaagaagaagcagaaacaatgaaaaagatggccatagttgcattgtggtgtatacaactaaggccttgtgatcgccctacaatgagtcaagtcatagaaatgcttgaaagtaaattcgattgccttgaaatacctccaaatcttcttctatatcctcaagaacaagagagcaataatagtgttgagacatcattctcattaacatcatgtgaagaggattctgcatattgatatcatcaattaatagattaaaactatttatcaaacttgtaagcttgtacttgaattttttgaatgatgatcattatgttaaatgtaatgtactctttttttctttttagtatatcttgtggactctagtgtttctattgttgtacatattgtctgtagagcagatttagtatgatgaatcttcttaatgttagcacacttgtacttctagtactcgattttccttgattcgacccaattcagtaaaatatccatatctctgtcacaagaatttcagagaagacgattgaagatgatataaaaagttgagaaagagatctaaaacgtttaagttatgaaattttccaaaaaaaaaaaatttatattctgcctattctgttttgtcgctgcaaaactggtttctgcagtattaatagaattacattatgcttctgcagnnnnnnnnnnnnnnnnnnnnnnnnatatattattgacatttgcaaaaattcggttttttaaattatttattggatattgaattttgccatccgatccaatcaaattgaattgagtcatccgatccgatctaatagatgtattggattggatcggttccatccattggatgctttaactagttttttattggattggattggatccattcaatggataaatccaattcattttaaccaccatttagactgatttcattaaaaagaaaaaatatatgaaaaaatataatttaaaacctaataatccaataataaacaatagtttaat

SEQ ID NO: 27826 - DNA, 5828 bp, Cannabis sativa
taaaataaattccaacatctaataataaattaaaataaataaaataacaaataaaaaataaaaaatttaatagaagaaaaaaaaattatatgtagaaggaaatgtttaattttgtttaaattgcatgtagaaaaataaataaataatatataagaatggaatatatatttaatcggttaagttttaaaatatatttgtattatatgtgttagatttttaaattactattttttatattttataaaatagtaattggatgtataatttttttaaaattttatataaatatgtggattggattggattggttaattttacctatcaatccgcacaagtgtggatctttgattttttaaaccaatcatatctggattagattggattgactattgcatgaacactcctagtaaaataataagttgttcgatattcttttttaattgttttataatttatttatagttgatttatagtagtcattaggttaattttctcgttattttttgttgttttataattgacttatagttgttatgaggttaattttttgttattttctataattttttttttttttgcactttttaattttacttataaatatatatttttataattttgaaattttaaaaatgtatttttaaacaattaaattcgtataattgtaaaaaaaatatatatatatatatataaatcgtaaaaatataaataaagcatatttatgaaaaaccgcaaaagaaaggagagaaaaatgaaagaaagataaagtctccaacaaataaataaaagtaaaattactaaaatagttttacaaaaaaattattatattaataatgttaagaataacagtataattttattatataccttttctttccttcttatataccaaacaacaaaaatagaaatatattttcattttcttcattctaattttctatctcttaaatctctttctttccttgccaaacatagggttagggttaaggaacacaaggactaacattcgaacaacaaattaactcatcttagtaagtagatttttacctaaaatttaacttatataattattgtatcagttattctatcagatatttacgctattttttaaaaataaaaaataaaaccatcccatcttagtaaggcacttcaatgcctaaaaggttccaacaaacatttgcattttttagcatttccaaaaaagtggtattatattaacaacaattgagaactatattttcttcataatctatacaccttttctagtaaatattataaaccttgtttaatctcaactcaatcagttacaggtatacaagttacaattatcacagtagtattcacccaaaaaaaaaaaaaaaaaaacctatcacagtagtaaaatacatttttcttctttaaaatgttctttttattattattttattgttcataattaatattggaagaaagtaaataagttgaactgagtaaacatgtaaatgtttatattactttattagaaatttttgggaagggctggaaatcagacttggtaagcatgctgtataaaaggccgatacaaattaaaggggtggtatattatgtacattttaacaaattttataacagactaataataacaggtgccaaaaatttgaaaggttgaaaatttcagctgcgaagtttcatcttctcatctaatcgctgtcatcactcccataattttgacacaacgactgcagtacgctgccactgcactcgtcgggttttttctcctccagttttgacttcttgactatgattgttgaagacttggtaacaagtctaattggagcctcaggatcttttcgctttcctacaaataacaaacacacaattcaaattggtattattattattattgtatggagaacaaaaacatggtctatggtttgttttctaaaagaagaaataagaaaaatcttacaaattcaagaattatcaaatggagttaattacctctggaaactccattggaaaccataatggcactcgaagcctcaatactgttagttggaggacgaattagaccggtaccattgttgtcatcgtcaagatcatcatcatcatcaatccgccaaatgaaatctttggaattctgttaatgtgtcatgaaatagaaacaagttattagaactaagctacctacaaattaaaaaaaaaaaaaaaaaagaagatcgatatgatatacttacatggaaaacaactgactttattagtgcttcatcctcctcctccaatttcttctcctgccaccatattaatcataacaagtcaggggggttttcgttcaggaggataaaaacatgtattagcagcttggattttctatcataccttttgagcagcggtatgttgcagggcctcaagcattgcatctacactgacagtagcgtgtcttgactgcaaaaaacatgaaaatctgtattagtattagagaatacatatcacatagttgcttatgaaacttcaaagtttaagaacaattaccttcatggacttcatctcatccaatgcagccatgatatccatctctcttttggagtctagtgttcggttctccagagatttcatagcatcccccacttcttctaattcccgtttttgtttttccttatctacttgctgaagagaaaacaaatctcattagaaaatgaaagagaaaaactaaaagaaaatcaaaatttatcattgatataatcacttctacaaaattccaagaaattaacctcatcctcatcacgccaaggttcaaaatttctcatggcaccagactccacaacataatctgaattttgtgggtctgttttcattgcaagctcagccgagcaccgagtgcacttgaagtaaaatctaaatatttggatacccaaataagtctgcaaaaataagacataacaatatagtaagtgttcactcgttgaggctcaaacacatgcaaaaatcaacttaaaccctaaaaatgtactaaaaatgttcataaggatatttatggagaaaaggaaaacctcgccaacaacgtcttccttgcgggaattgaacttcgtacccttgtagatgtaattaccacacgtgttgcagcggatactcatcggaagcatcatccgaaccttaatttgctggttcttaggcctccgaatccgagggagctttgatggatcgaaatctggtgggtagtacttgttcaggacctttctttctcccattttttaatttaaatttctctgtccatgacacatttacatgtatgttagaaactttaccaaaaagataaagaaaaagttgaacaggattacaagacatcacaaagaagaaatatgatctgaatagtgaaagaagccattttagaattgtgtacatacgatacgactatgtaacttaatttggaagcaaatggcttccatctaagtacaacaaataagctctttaacaattatgataccgtcaaataattactatgattttagatcataacaaagcaatattatagcttaatatctttatgacatgtttacaaaatcagctacgcttatccaagttctttccctaagtaataattctagctatacataaaatttaatcttggattggtatgatatggggaccaatcaattagagagagttgaggcatggacttgttactgtatggccaaacaaaacgccaccaaggctaaactcagtacaaagcattaaactaaatcattctactttgttagtaaacttttcattttggcttagagagagacagaaaacttttgttattcattttctactcactatagcctcaaaacactagacagaaagcttttgtcttaaagacagacatggcagttagacctctctacgctgttcatctgacccatacaatagtccacactcttttgactcccttgacactcaaaacactacttagagaggagacccctaaactacctaaatgtgcaggtgacaatcactagcaacacacagcatagccaaccatactaagtataagtatcaaatgagcaaccattgtgaatagaccttgaggagcagccactgatgttcccaaattcatggtcagtagtataacaacaatttccaaaaaggaaaccaactataacatccccaaatgtcaagaaatttatgtgcttgaaaaagtaacacaagctacaaaacaataacttcaaaacttgtttataatcatcttatattatattccaaatactatacttagccgatatgattgttttgctctataacacataacatacgtactagaacaccactgacaccaatctttaataaaaataaaatgactttctttatgcaaaatagcatccaacgattatacatagtatttacttagtgagatagtctgaagcacccaacacattctaattctaatcctactatcatcaaaatcagattacacccaaccagaccatcaaccaaaagtctatcatactacttgtatcatcaatatatgaaatcaaaccagtaatcttaattaaacctatctatactaaatacacaggaaacagacaaccatcaatgaaacattgtccattttggttcagaacttctgctggttattaattggtaacaattcaatgtagcattgcctattttattaaaatacctgaataaatttgaaacaactacaaattatttcaacaatcaacaacacaaacttgttccaggtaacttatttgccactatgagtagttaatataattacaattcaaattgtctagaaacaccataaactatattttatttaaagagaagtttctcgatgtcaccaaacacttcatcacaaccaagataaagaattatcccaaacctaaaatatatgtaagaacaaataccatagcaatgggattcacatgaaagatacagaaactcttttattgaaccaaaatcagaaaattatggaagtttctttggcccgggcccttacgtttcacatagaaaaagatttgagaacaaaatttcggaccataaagattagaccaaaatctacacaataatatatgcaatgtctaaatctttgaactaaacgttataaactaattatgacaaacctgactaatataaaaaagaagaagaaaaaaaaaagagaataggataattgctaaataactcagtacaaaacagagaaaattattatagaaaacaaataaataataataaagcaacaatgcacatgacaagctataacaaaataaatttatgagcttaataccctaaaaatatttcaaaacttcgaatccaatcaacgcaccaaatgaatttacttgagtttcacacgtacaaacagagaattgaaagttaatactgatacgaatcgttttcctataaattacttgtgtttcacaggtataaacagagaattgaaagcataaatgcaggaaagcgaagccctagaaagaaatttcgaaaaagcaaagcagatagtaaagagagaatgagatagaaatacctgaaagagagaataaaccgtaggaaggaaggaaggaaggaaggttgagaatatggggttggggttggaggggtgtgtttgctgcaaagactcggatacacgacgactatgaatctgctctcctttttcactcagctaacttaaaacaatacaacataaattttagggatattttcaattatatatatactagtaaaaaaaactacgtgcctcaattttatggtagctattttttaataaaaatttaaagtgatacaattaaaaattaaagaaaaaaaatattattaattattaagtgagattattattatgtagggaaattctttaatagacacccataaaa

SEQ ID NO: 27827 - DNA, 3732 bp, Cannabis sativa
ataaatccaacgccgacgcctgcagaataaacagcgcaaattagtaaatttgtataggattacttatgctgcagcttaacaaataataataataataataaagaacaagattgtaatgcattggaactcattttcatttcattaatttcctacagaaagagagatagcaagttgtctaaaagaaatatttattttgatgagttcttaatccataaaataaaactaaaattctaccaagatataatagattgatcttacttttttattgaatgaatataataagttattcttattatgttaaatagtataataaatatactaaaatatattcaaagaaaaagaaataagaaatatactaataaatacaaatgagaaaaaagaacggggtgtatcagcttcagcacataatataaattcacacagtaagaatgttaaagttgatactatcttccaagatataataagcctgtaaataagaaattaacctgcagacaatgatccaacaaatgtctcaagaaacctcagaatcaccatgaagaagttttctccagacgaggcattactttttaccatggccatagtcctgtacagcagaatgtagttgaattaaaacaaaaattttaactttttacagctaaaagaaaatagtataccgctcaacatacctgtacagtgaaattgccatctaccagattgtggaacgaaattcacaaagaatacacaacacacatagtcaatccccaaaggcagatatacaaactaaaaacattaaatgctgaatgtagtagtgaaatcttactgcgtcattcagaacagattctccaaaaactaaggcatataggttcatatctgttccaagttcctgcagttcacaacatcaccattaaagcatgttatataaatggaaaacataaagtacaataaatgatagaagagcaagtaaagcacctgaaatatggacaaaaccgtaacaggatctgtagctgatataagagcaccaaacatcagacactccacaaaaggaagcctgtacatgaggtacaccagaccaccaaggtaactgcaccacaaatgaacagcaacaaaagaaatacttagagaagaggtagcaagagtcaattcattaaagacttttccctcttaaaagaaaacagtgaataattagtcaaatgatttaataaatgggagaagcttacactaaaacaccagtaacaattgaagatatgaaagttcctaaaatagcaaacgtgacaatggctccaaaatttgagaagaaaggtttctgtgacaattgtagccattcagtaaagggcatcatataaggtggttgtatagtagaattacacacaaaaagaaaaagaaaatgatgaagaagaagaagaactcacaggtgaaagactgaaccctgattgagtgagagctgaagtgttaagaaaaacgatatctggtatactaggaaggtgaattaacctcagcataagcaaatactacaaattatgtgtaactaagaaaaatggcacatagaagagtggatataatatgattggaggtaagaggaacaagaagaaaaattcctcatgaaaattgaaccaagccctgcacaaattgacatttgacggatcaactccaacaaaaaaactgaattgctttattttccttcaaattcagtagaaaaaaaacaaaatgaaatttagggattaattgaacaaaggaatggacctgatgttattttcagtatttgagacgttagcaagtacaccaacaattaaacctgccacaaaactaatgctgtaaaaacctaaattcccacataccctaaacaacaatcccaactatcactaccaaaaaaactaggtcataaacttaatgatcagtcaaattacctatcaaaagggaagcactcgcttcgggaagataataaaacttgtgacgacgaaggacatgaccaaggacgaaggagagaaccaacatcatgatctgaagaaggattccaacgccagcggcctgctgctccttcccaggggtaggtgctggtacagaagaattagtcccattgggaccggtcggagatatctgcaacccaatcaattgaacatcttctatcatccccattgtttgggttctcgaacggagatactgaagctcgcgttaccggagctagatcgccgatttgcctctttggctgtaaaatttgatacagagaccaaagaaaactctctcctttggagtttgaagcgtttcacctcctattttattttctgcttattattcaaaaacatttgttccgtctctcacggatacaatttttattttaataaatccttaattttaatgaataacaataataataataatgtgtttaaaagagacaaatcttacttttcactttcagcaataccaattttgtagaatataattacaataatattgtattgtgccaacatattggaattatcaaaattaaaaaaagagtatatagtacaaaaataataactttgcaaacaaaacacatgccatctttttttgacaagaacacatcggttttctttgaaaaaatattgtgtaagtaattattataacttgcactaaaatattatatgacctatatttctatcctcccttaaacaatgtcaatgagaatataccacctctaaattactcacttacaattctaaatattaacattataataatgaacataatttttccattcagtttcttttttgaataaatttttccattcagttttaaataactaaacatataaaatttaatttaggtataaaagaattttattatatgaaataagaataacactttttcaacgattcatccagattatatgtatactgaaatggttcacagttcacacctttgatttcaatttcaatgtattcattgccaacaatatactccaacgtacctacctatacatcgaaaacttaaattcaaccaatacatttactacaagtctacgtatattacgtatgaaaagaaaaggtcaaaattttatagcaaatgaaatgaatgcaaactcttcactcttcactcttcacaacacaacttcgtatactatgatgagtaacatttaagtgataatttgtgtctcatgtaaccttcccaactcataaatacataatataaattactcgttacttatcagataattatatattttgaataaatttcgtttttccattttttatacaggttttgtctaaattgagaactcttaagattctgtaaagtgcattaattaatgattacgttgtttgatattataggctataattaattaatgttcatgcgttaattatcattaaatcacattctaattatgtggcaacatgcacctttaatatttgatagtcaaaatttccctctttcagatgtggtatctcgctaatttagagaagtagggagtttgtttgcttacatttaaaattgtttttagaaaaaataataataaaaaaaattttaaaaattaataaaaattgtttggccaaattttttaaatatagttttaaataaattagaaaatagaaaacatcaattattattttcaatttttaaaaataattttttttgtataacatattatattttatatttctgcagacccagatcctgactttgactcgaacactgaacacttgacctagacacagaacccatactcagaccccgaatcccaactcgaatcccactcgagacccctgactcggacccaga

SEQ ID NO: 27828 - DNA, 1152 bp, Cannabis sativa
tcgaccattccaagaaattcatcattaagatcttccactagctctataaccagatccaatggagtagcttcctgataaacaactcttcaataaattgcaacaaaacagtagaaataagaagaacgtggaagaataatcggtggtatttagccaagaattcaagagcttggttctccctcaaaggattacaatgcactattttttccgcaccccaaaaatactctactattctatttattcttacagtaggcgtcaccactgtagctgcaccctaggtacagaaacacccaacccaaataactaaccctttgctgcaacttttctcttgctgagtcagctgctgactttggctatcttgttgcttctcctggtgtatacatacatgaggggaggcttattagtacctcccgcccaaagtctcaccttgtcctcaaggtgaaatgaggaaattgcgcttgaatggtgctgaaatccttcctagtggccaaaagggcaggtaatttaactccttaaatcaaggcttgaggctgaattttttgagtgctagggtgaggatccaagactctggttttaaggtccattcgagcttggctatcataccaggaggtagaatcgatgcttgttgataggctcccaaagctgctcacagcatcgagacatggagcaccggatgaatccgcgagttaggtggaaattggaggcgattggtagccgctcccacacgagctatgacagggaaagggcagaagaaaaatagagttgtactcagtcatagtttgttatcctatacttacgattagttgttagttagatcttattttcaagacttttttatttctgacttgttatcctttgtactttataaatgccatttggctattcaaggaataataagaattattattctctaaaactacaaaaataatgtcatttggctattcaaggagtaatgggtgaaagaggacatgtctcatacctttcatagaagtggcattactatgaatagatccattaataataacaaagctaaactcaggcagagagataacatctcataatattatctggagtgttcataaaataaccgatctaatctaatccgcacaatccaattcaatccgcaaagtgcggatatccgcacttgtacggatt

SEQ ID NO: 27829 - DNA, 2554 bp, Cannabis sativa
  modified_base (721)..(734): a, c, t, g, unknown or other
  modified_base (2492)..(2493): a, c, t, g, unknown or other
gtaggccaaacactcattgtagtttgagtaaatttttgttttattcttataatacacatgtttcgtttattatttatttaattatttactttaaagtaaatatgataaataataattaattataggtggatatgtattctatctcttaccaatctaagcagagataataagcttaaaaaaaatacaattctcttcttaattcatgaaattttagtgatgttttatttaatttttagagtttattttcttatatatttttgtcattgatccaataaataaaattctaaatttgccactcaatcaaccatataaattattggtttgaattgtataaacttttttgtttaattttttggtcagccatttaatatcgatgaaaatcgattaatgattacttatggttgattattaattagtgctcataatattttaatatgtgtatatatgtttgaaaataatagggaatatcaaatatatgattattgtaaaggagtttatagataaaaatagccgtatgtttagaattgtcgaagctaataacattataaggtggtttgacataataatataatatatatgtgtttgacttgaatatatatcttatatttagacctagactacttgtaattgaatatatcaattcaaattcaaattcgatattttgcttattaattcaccgcaaaatttaacatcactggctgcattattattattattattnnnnnnnnnnnnnntattattattattattatccaattttattatgttcatcctttaaaacaaattttacgcgttgagagttttgataataataatagaaaattttacaatgtactaatctaaaaaatatatatattaatgcattcttatttgttttagtattaaaaaaaatattaatttaattaatgttacaattatatatgttatataatttatttaagatattaggtacaattttgataaatttttaaaaaaaaattaacacgctaaaaaattaggttcaaactgtcttttacgtgtgtaactcttttattttatatcggtataaaattaacaaattgattgttgtatagtataaattattttaaaatttttaaaattttacaagatatctaaaaaaatagactaaacaattatcataaatgccaaaacaaataacactacaaaaggaggaattagaaaatgggagacaattaattgataaaggagtaaattgtagaattatccaatagtaatttcttaagtgtcaacttccaaatgctcgcggattgttcacgtcctaataattaacattatttttggtgaaaataaatttagaagtaacactaaatatattaccaaatgactaattcaatgaatattaaatagattgtaatgttcaacaaatatatgtaccattttttcttcaaccaaaagataaattgatcatgaccaatagagcataccatatacatagatatagaatatgtcaaaattaataaagaggaatgactgttctaacttccaagcggtatcaaatataatgttaaagttcacttttttatctccaatgttaccctgcagctattgtatactagtcacttcttcttcttctttttattattattattattattattattacacttttatatttcaaaatagtttttttttcacatttttacgcaattagacatagaaacgtctattgcaattagcgctgcaatttaaattgcaataaaaaatcgtacagaaatccctattacaactagcgctgcaaccactttagaaatcaaaactgtaaatttgaaaaaaaaagttttaaaaaataatatgtagagtaattctccttattattattatactatatttaataatatttaaatatatattatcatttatatgtttataaagtttggatttattttgtctgtgttaaaaaaaacaaattttgtgatttcaaagtgaatttgagattttcttttaaaaaaaaaccattaaaatagaaaattaccgtttaattggattatatattataattgtaagttttgatttactcttttaacaaaaatttattatcttcttttatttaaataattaattactatataatttgtcggtaacaattaattattatactttaaatagagtatataattacgaatttcgtaggaatattattatattatgattaagttggctagaatataagccaaatggcagtcttttttaatcatataagatttgctgttaaatttatgaaaataatataaatactatataatatttcaaaaaaaaaaatgtagagatataaatactttataattttctcaatttataaaatgtttattaagttttaattaaatatatacacgtaattaaactttccaacggatttatttattttatttttctgtttaatagaaaaagaaagaatatattatagagtaaatattatatttagactatgttttgtaaaagtaattaattaaattttctattttgttaaatgnnaaaatagaccatgtattttttaaaattaaatgaataggaccttgaactaattttttgtcaa

SEQ ID NO: 27830 - DNA, 2403 bp, Cannabis sativa
  modified_base (41)..(58): a, c, t, g, unknown or other
atgtaattatttttatatagatgtatactttgttaatatgnnnnnnnnnnnnnnnnnnactaattacaatttaaaggttatagttatttataaccggcccaaattatgacttgatttatttataacaaattagagattattcttaaatagagattctactgtacataaacaactactattagttcggttaatgcacactaggcacgtattttgaacttttaaaatccaaaaaatctcaaaatttacataattatatcaaaataactcgggggagtcggtagtggatggagtaatataaatctttagaaaccaattataataatgattaaactaaaggaagaaagattaaaaaaaatgaaataagatttctacatagtttggacattaataaattgtaattaatgaataattgttattaagttcttaattatgaagtttacagcatattttctaggtttgaacacttgaaatttcaatcctttgcatggaagaataatgtcacatttataagtatatttcccagatgggtcatattgattaggagtcattagcattatattattgtaaaagcccattgatagggtaaatacaattatttattgatataatttgagctattagaccgggtaggtggggctcaagtacgttaagttaagttgcctcccgtactcagtcatactgttgatagtgacacgtgaggcgtgagccgttgttgagagaaaaaaaatattagaatagtggatgtctgcccgaaaatgtagtttcctttttgatgtgcacctttttaaggtctaacagggataagctgcgagattttttagaattgtatcagagaagtgccacacaacctctaggacactaactgatctcaaaagccctttcgtattctgttcccagatgacccctaggggcatccttcttgagatcacgttgtttttttctgctaagtgtagaattaatattcgggacacattttttcgaaccaaaccacacgtctggccaattttgcctgttcctaacggatgagttgagcgagttgtctgcattaggccaatatttgaacctagtatccatagtaagccgttgtgagtgtctacatgttatgtatccagaatcatcaataacaattttgaatgcaatattatttctaaactattttatcatactatactatgaattacttcataacaaaacaacatcactaaaaattccaactattaatgtagtattttatgttttatactcctattcccaccaaccaaatagtttgaaaatcatgtcaaggtagcttctaataatatattttcaactatatagataatttctcatcttaattcaacctaaccccattttgaataaaatataggaataatataaaccccacgtactccattataatcttatcctcttatagaacaaaaaaaataccactttaatctaagtgctatataaaatccattaattcaaaaccttcataaattgatttgaatcaaatacaccatgactgaactatatagtacttagaagaatgcatcatatcaatatataaacatatatttatattttgatcccataattttttttttttcatttttgtccttacatatttttatatttattctcataaaatttatattttcacttttattctcatatatatttatttttattctcataaaatttgtatttttttttaaaaaaattatatttctcataaatgcattttaaaaaaaaaaaaattgtccccactaaaatgttggattgcaaattaacacaacacacacctaaatatatatatatttaattatatgaatttatgacattgatatattacgtataacgtatataactttgaaaaggcaaatattattattattattatatactcgatagggttggagaaaaatatatagtataaattttatattaattaagaagatgaagaagagggtttggtgaggaatatatattgggaagtggtaggtgaaagttagggtttgccaaagttagttgttgagagctactactatgccttttcacacactatatataatataaatatatatatatatatatttattcactaattaatattaataatatgtatataattacataattaattaaatatgattatatatatgtattaatttaattactatatgatgacgccttctatacctttgcatgatgcagcctataatatatatgatgatggcatttccaccctaatatattaattatatatataaatatcattttcatttttggccattctttttttttttccaatgctaattaatattcaaactacatggtctaattcttaagaaaattaaattaattaattattattatttctctcatagggtcatttaagtaaattacatgtttgaggaacta

SEQ ID NO: 27831 - DNA, 1904 bp, Cannabis sativa
tttttttttttttttatgttgagtcgatacacttaaaagttctatatgatttatggataagtagtcatgtggtgtggtcccccacatatatccatacagctagaaaaaaaagatttagataatttttgtttgatgtgtatagctagggttaatttactgtatttgaatatctagtactatatatagccagtaccttagacttaatagatatttattaatatgattcccatgattattattatcagatgtaataataatacataataatattatatacatgatatatataattactttttaagatatggggaacatatactacttcccgaacttgtagaaataattaatattgcatgcatggtacgtacgtatacatgatgtgacaaattattattacagctttaaacaagaataaaatttatcagaatgaataatatatattgtaactgttttagataatagctaattataagcatgtttttttatatgttacacaaattaagagtacttactggttggaaactatatatatataggcccctcctctacacgtactgtttgtatatatattcacaatttcaatctaaatagcgagtgtacatatagacttttacaattcaacttttttttctttctcaaattttacaattcattctgatataaaaatattgccaaaaaaaaaaaaaaattaaatcgatgttatatttattctgaatattaatttcctccttctgacaataaccacgtgaatataaaattgaagatatattaaatttattaattttgtaactttaaagtaaaacagaggttctttctaaaaaataaataaataaataaaacagagattcatatattaaataaaaaggtataattatatacctaaaaatttatgtttgatgcagtttatttcttaactttgaaaattaatagtaatagtcttcaatattatatttttctaagtctattataattagtcctgttcagattataattttaatcaaaaataatttatagtaaaaaaactaaaaaatcattataaaatcataattttttgcccttttatttttctttcttcagtcttcttcacacatctccaaccacaccctaatttttctttgtcttcaaactttctctctctatttctcttcctcagtatcaaaatcctaatttattttttcaaacttttcatctctctctcggcactactagctaggtcgaacgacattgggacgaacaaatgtggggaagacgataggctggaactctggccaatgggtgactgagaagaagcttcggatctcgactcaaaacaccttcatagtcgccccatggttctctctctcctgctctatttctttcactcatcagcgccctaccctcctccagtggctcgtggttctcaattgttcgagttcgacgagggctgggtcactaggaatgagctccattttcaagtatatttcttagattttattaatttgtcttgttttttttaagtgtaatggagatccaaccggttctctctcttatttattcttattttgtgaatatatatacatatttatatatatatgtaacgtcaccgctttaagtttccattgagcccttacacccacagaatgatgactcttatatacgagtacgtcactttggctgcttaatggaatgacgactgaccctataaaccagcacgagtgttttcaacgtgctttgtcctcactcgcacactttctgggaaaactttccaagaggtcacccatcctgaaattaccccgtcgaggacgcttaaccgtggagttctttcgtgatgggctaccgaaaaacaaagatgcacctttgttgatataagtagtaccaatcaatcccttaagccctcttcaactatgtagtcccatacctacaca

SEQ ID NO: 27832 - DNA, 1401 bp, Cannabis sativa
ttttttttttttttttattactattttctttttttgaaagacaataaaagaaaaccagttggaaattgaataaattggtaggctttgttgagactttgtcaatgtttataaaaattaggactcatgaagtggctttggaggttcccaaagggaagtaggtatgcagttgctgaaaatcagtgagagtctaacaagagagagaatgaaagcaagaagcccatgaaaggatagtttgttagtgaagttcaaggtaggaaatgatgagaaaattagattgaactgaaagagatgtctcaagatttaggctttactcttctatggaatattttctttctgtgaaagagatcactatccagttttgtttccagggtggtctatgtgtttgttgccagatcaaatggagagaataaatcaattatttctggatgttcttagtacgtaagctgtgggtcacgctactcaagaaattcattttgaactagtgtatgccacaacattgtacctaattgttggcaagttaagattaaacgtagttcaactttgtggacaagtgcaacactggcaatgtttttgaaattttttaatatgaatactgagattgtttcttcattagtctttcttgttcttatgtagaaattgtgttaactctttataatttcttttagttgttaaagtacttgtatatttcatattacaggggtctaggagttagattctttagctctgcagcagtttccaagaggcacagtaccactgttttggagacaactgatggcttcacaattaaaattagtggtttaataaacatgacccgcactcatcaaaatggaattccatcagaggtttgtaatttcttcgttttagctgaatgtgtagcaatacattcttttgctggttgatgatcatgaccacattaagcaagcttattgaaaaatcattttaccctagtatgatatgtagtcattgttgcacatggttcacaatttttttttcttgctttagatttaataaaggagaaagtgctagttttggtgagtatttcagtgtcaactaacttttgtttttggctagctttctcttgtatactgttcagtagaagtgtattcggaaagaaatagtagtgaatgaattaagatttgttttaccttccaacctttagacgttagtggatttactaaataaattgagttttcgggtgctggtagtggcaaaggtgtccaaaaagcttatggggtgcttctcagaccagtgtatttgactagaactaatacttgccattttcttcctgtataatcaatcttataggctattacttctaaattgtgacaaaggcctttcctcttcttttgttttcctatcctatttaagaatttctttgtcgtgtctttctcaagaagataa

SEQ ID NO: 27833 - DNA, 2753 bp, Cannabis sativa
cattttacttagtatattataaaattgaaagaattatcatcttaacatatatagtattattcttttaaagaaagaagaaataagtgtctttgaatagatttgatacttttgatattattttaatttattccataaaatacattgagaaattaaataaataatattattatgacgtggattattttattaaattttatttttatgtataaagttgtgacaaaaattgtaaagttaaatttatttatttgtagagtttttacttaatttaagaaaataacatgctacaaaattattaatattttgagtaaatattaatgttattacaattaattatttcttcattatataatactacaaataataaagcaacatgcatacataaatatacatcagtcaattcgatttcctaatttcttatatattaaatattagagtaaatattattttagatcctgtattttgtaaaaattatcaattagaccttctgttatgttaaatgataaaatagcctttatatttttcaaaatactaaaaataggaccatgagctcaatttttaaaaaaattatttttttaatataaccaattttaagacaatttgtaacacggacagatacaaaaaatgtaaccagttttgtcatattatctctagatcagattattattaaattttatttgacaaaaatcagtttagggtcctatttgcacaattttaaaaaatacaaagtctattttatcatttaacaaaacacaaggtcttattgacaatttttacaaaatacagggtctaaaatggtatttaccctaaatattaatttaatttaattcaaaacccaattaattccaacaacattcaaatattaaagggatcattacataagacaccaatttttgtaaaaaaaatatattttttatgtttatagattttttttttttttttttacggttttttataaaaacaacataaaaacaacgaaacaagaaaacaacataaaagtaacaagaaagtaatatctaaataacatcaaaataataagaaaaactaacatacagataacaaaaaattagcaacaaattaacaagagtacaacataaaaagaccgcattttctgtaaataaaatcaaaaaattcgtaaatatatttaaaattccgtaaaattccgtaaaatcgtattttttttaatttttttttttttaattttttttgtttttttaattttttttgttatttttgtgtatttgtgaaataatcccgatattaaacctcataaaaatttaaatacaatctcataataacaaatacaatatcaaaattaatgttcatacaaataaaatacaataaagtaatatctataaaaaaaaaaaaattaaatgtgttggagagtggtttcacaaaaggagtcaacattgatacttatgggtggtattgaatctgtaccgtccaaagaacaattggactttgggctttaattgttacataagattgctatattgggcctaaaattattgaattggagtccaaccataatttgcacgtgaatatatgagcaaactcaaaaattaaacgttagtgaagaagaaattatattatatacccattttactttatttattttaatttttacctctatttttattttttaaaatatgcccactttttagaggatgtctcaattaaacctcttaagttaatgtaaattacatgctaaacttaaatagaaagtgagagtatagtgggcaacccattaaaaaaagtaggtatattttaataaaatatcatatgaatgtattttcaattaatgatacaaaaagagatacttctcaactttaaaagaaatataatatttttttaaaaaaattacactcaatatagaattttaaaacattatttcataagtacggtaacttaaatttgtgtactttttatgaaatttttatgattttcaactatttatagaattagtttagtcatattgatctaaaagttatttagatatgtagaaattacacaatatatgagaaaattataagagtttatttttctatggcttaaataaataatactatgggattatgatttttttttctttttttacgtttatatgagattttttatgccacatttttgtaaaagaaaagatcgaaattccatatttgtaccataataataaattttgttaaaaaagtcaccggcgtcggcaaaagtcgtcgaaaaagttagtgacatcggaaaagttagtgacatcggaaaagttagtgacattagaaaagtcactagaaaagtcacagttgcctgaaaaagttactagaaaagtcaccagaagtaaatatctcagatataaacaaaaagaaaaccggttctattacataatgaataaaaaaaatgacacaaaatatggtactataacattgttataacgaataaaaaaataaaaaaaaaattcaaaccgattataactaaaataaaatcggttatataacacaatgaatgggtatttttaaggtaaatatggtatgtgtgtaattattttggtgaattggagcatgttgaatggatgttaactagttcataaatataactagtttatttatattatatttaagtcgttgtgtgttattctttgtgtttatttattttgttatgaaaccgattcttttcatatttatgccttaatatttattgaaattaattcccatttcttttaaaaaaaattataatcgattttgtgaggtattatgtgttatgaggtattt

SEQ ID NO: 27834 - DNA, 1649 bp, Cannabis sativa
taagtctattttgttgaaattccaaaatgcccttaaaaagctaaaaattatgcaattcactgtgcagacagcgccgctgcaccaatatcccatgccacagcacctggaaccaatgaaaaactcaatctcatctatattggggtaccgcggcgctaattccaatagtgtacaattattgttatcttaaaattttacttcaatgactgatagtattttagctataactctcttaatattgctcgcaattgaacgattcaagatgttttgaaaagctgaaagagaaatatagaattttcacaatattttcctgaaattaaatgcatcatagtcaaaaattagcttgatgttttagacttaatttttaatcacaaacgaagcgtgttgagcatccaaaacttaaaacttttcacccattatatcttagaatgaaaattccatgataaattgatcatatttatttttttgatcatgttttttttttttttttttgattttaaattcatattatgaattttaccatttaaacttgaaacaagaaaaataagcataattatgttccaaaaatatgaattcacaaggaaaacaaaaattaaaacactaaaaaagtaggctaaaacttagtaaaccgtacttagtaattccatattaaagattatatacttttatacattactgacttattttatttatatagtatgaatcttaataattcttttgtacttccttacaagatcatacattctctatatgaatatggaaaattttagatatttattaattatatttctataattaacatgttcatttatcttctacttgtattatttcatatattcttcaatatattatcccttaaatattttcttttaggacataaatcctaacaattacatagcatgaattaatgctaccaatattagtacgaatagagtacttgcattaggttggtattatggttaataggtatgaacttatatctcagtggacacattaattggatgtggttaatagacttatagtaattgagtgaatggacgctcagttacaagtcagttatgtatgttatattatgtatgttttttttgctgagtctgtcgactcacagttgctttgttatgtctagataaagaaagaattaacgttgaacatcaatgagttgggagctcagtaaagattgtacaaatctggccgcctagacctgaagggttgagatatgtgggagatcagctggcacagcttttgttgtatcattagactctgcggggattattatattataaaagtattttgttattagataacaagatctcattttgtaaatgtttaaatgaagtttgtttagtaagttttaattattataaattttatttaaaattatacttttatttcaaaattctttgattagcaaatgttagtacagtaattagaaatcacataacgtgccttagatattaggacattgcacatcttcttttcgacaatccatcacttaagaactccaagggcttaacctagagcaaccttaggatgagtgatctcttggaaagttttctcgagaagtgtgtgagtgaggacaaagcatgctaaaaagactcgtgttgctttacagggccaatcgtcattcttgtaaatagccaaagtgacgtatc

SEQ ID NO: 27835 - DNA, 3009 bp, Cannabis sativa
  modified_base (1270)..(1286): a, c, t, g, unknown or other
  modified_base (1392)..(1397): a, c, t, g, unknown or other
tttatatgtaaaatatttaagttaaattcaatttttttaatcattttttgtcaaaaaaacttttttttttttaatttttttttcagctgatgaaacaatctcagcccacataaatgtaaaaatgagaaatttttctaattaaatagaaaaattaatcataaaaactcaaaattttctaatattactcattcatggataatacccattaaaggtgcactcatactcattattcaataaaacgaacttctaaatattcgtataaaaacgatctttctttatgtttgatcactaataaataaaagatcacaaatgtactattactttattcaataatataagttgttagtcttctggatccccacaacatcagtcagagatcacaaagacttggcaaaaaaaaaaaaaaagaaatacaaaacaaaacaaaaagacaagaaaactaattaattataatataacttccacattattcatttcgaataagtaatttagtagttggtatccatttcattcttcaattcgcagctgcattcatcaaaataaaaacacattagcctaaaaaggaaacaaatgaaaatgtattattatacaaaacaaattaaaatatatacatatagcataccacaagggacagcaggaatgttgcaaagggatggaagctgggaagcaatgcgcatggtgttgcaaatgcagtcatgattgagggctcccaacgccacgcaacattcagaggttgggtgcggcacagatgccccgggcaccacgaatggcgcgcacacatttaggttgcccaattgagtggagcacacctgagcttgagcagtgtggtccatcatgatcacaactactactgccatcacaaacactacaatagtagagtacttaaggccaaccatgatgatgatgatacgagatgttactaactattttgactcacactcaagttgaaggtagaagtggtaaattatctagtgatataaacccctttttatagggtagcttggtatggttaatgtggggtgtttttgcatgagtcacctataatgagagatttgtgtgctcatcacatttgtgttggctagctatgtggcgaatcaagataagggaggtaaactacatgtcacataatatttttgtgttgatgaatatagcatttatatcaaggtaaatactattttagacctagtattttgtaaaagttactaattgcattttcaaaataacaaaatagaccatgtattttctaaagttgtacaaataggaccctgannnnnnnnnnnnnnnnnataaaacttaataataatccgatcgagagatcttataacaaaactagttacattttctatatctgttcgtgttagaaattgtgttaaagttggttatattaaaaannnnnnttattaaaaattgagctcagggtcttattttaccattttagaaaatataggatccattttgttatttaacaaaatagaagatccgattaataatttttgtaaaacacaaggtttaaaatagtatttacccttatatcattccatatcttagaaagataataaaaaacaaaggaaaaaaaataaattatttacatgaatttccatcaaattagaagaaaaaaaaatgtaaatagacaaagaacatagaagaaactctttccacaacttaattggtaataaagaaatatgcactttattaaattattatgtttttctttgaaagagaaatgtccactttagtatataaaaatcaacctgaaatccacctattaattgtttaaaaaacaattcacctattaaatatgattttttttttaatgtgatgcaactacacaaagaaaagagaagaaacaagaacacaagctgcagcaacacaaagaagaaagaaaaaattaatctctcaagatgaagtcctcatctcgccgaagggcttccctagaattttggtgagcttctttgttatcattcctgggtatatgatggagggaggcattagggaaatgggagggactgactgatcaactccacaagattagacagggcaaagttatctttccagttgctgttaactttggttattagctggtagcaatcatatacaataaggctcggttgaagattagcagtcttgcaccaggttaaaccttccaggagggcttgggccttagcatatattggcgttgatgctcctggtttgggtatagagaatgctgcaaccacttggctagaaccatttttaacggcagctcccaaacctgttttgagggctttaaaatccaaagcagcatccacacacaaacaaaggtagttatggaaatggcaggggtaatgatagtgcttcctatggtcttatgttgatgccctgctcttgagggttcagaatctgcattaaaatgttgagcattcttgtaatcctgcaataatctaataacaaaatcttcaccatcattagttttagtgtaaaacaaaatcttcaccatcattagttttagtgtaatagttattaaaaatgatttgttacatgctatcgaaaaaaaaattgttacattaatgtttgagtaatttatgtgaaataacactattttaaggccatagatattaaaaaacaaaagttttgggcaattatttattaatttgatttgttgataagcacttcagcaagtgatgtcaaacacttcttgacgacaaattcaagtttatcgatctccttgaagaggcccatcttcatggtaaaaaattgagattatttcataaatacccaaaaataacaaaattgttcgcggtgcaggtgatgcggtttatgaccattttttcaaactaacctgcacatgcagattttctaatttctcaaaccattctagcaccgtgaaactaaaaaaccgcgaaaaatcgcaccgcaaaaaatagtacggtgttgtgcggtttttacagtttggactatgaccaaataattaaactatcacaaatacaacaaagcttgagcaacacctgtaaaaaataccataaggcttga

SEQ ID NO: 27836 - DNA, 1544 bp, Cannabis sativa
ccatttccatgacttcccattaatcccaactctgtcctcctcaccacccaacccaggcgccggctctggcggcacattgttaccttgtgaagccaccaagttcatccgcgaacctgtcgccgctcttctcagatcactctcttcaaacatcaaacgacttgtcgttgttcacgatgtattgatgacttcaattgtcaattgcgtcgtttctctaccgaacgtagaagcctattctatcagttgcgcctctgttttttcatttttcaccaacgcttttgctgccatgggacgaaacgacattatcccaataaagaattatcctcctctggagtcttgttactcatctgtgttcttagattttataaagactgagatgcaagaaatgaaaagtcaagctggacatctctacaatacttgtagagctattgagggaacatttcttgatcatctagtcaatggtttaatcaatgttaatcaaggagataagaagaagaataagaagacgtgggcagtggggcctttgcaccaaatggcaatctctaagaagttcagggatgaagaccaatggctattggagtggctggacaaacaagagcaaaatagtgtactgtatctctcttttggtaccactacttctttctctgaagaacagatcgaagaaattactgttggtttggagcagagtggagtgaagtttatctggattttaaaagatggagataagatacatagttttgacaatgagaaacaagttaagagaactgaacttccaaatgggtttgaggaaagaatgagggagaaaggaataggaatggtggtgagggaatgggtttctcaagtagagattttaggtcacaaagccacaggtggatttatgagtcattgtggatggaactcttgcatggagagcataagtatggaagtacctgtggtagcatggccaatgaattatgatcagcctttgaatgctttattgctcacagaagtgctcaaagtgggtgtggctgttttggaatggaagcagactggtgagttggtgacttcatcaatgattagtacatcagtgaagacattaatgttctcagaggaaggtggtgacatcaggaagaggattggggagttgggtgcagaggtacgaaactctgtagctgaaggaggagtcactcgtatggaatgggattcattcattgcacatatcactaggtagacttttgtgcaagggttagtaaaaaatttgatgtttgtcaaatttttggcatttaataaatgtaatttgcattcttctacttcttcatattcctctttgtctttttttttttggtgtgttcttgtttctttttttacaataaataaataataaaattggtgtgcacttgtttctattctacaaaattaatgcttgtttcaattcattaaaattaatgaaattttgttactatttttacgatttattactaataatgagatttgctatttttctcttttcaactccaatttatttgccttcttcctatttttatttttattaaattactagggaacta

SEQ ID NO: 27837 - DNA, 1487 bp, Cannabis sativa
ggttcccatgtaagcttcgtcgtatctgttgtaacatacagcggctgaatgaccaaatttgccacagacttggcatgttgtctggaattgccgctgctgttgaaccttcctcggcctcttcctcgattgtttcctccacgggaattgtttgagtgatttccacggccactggtgttattttgtgagctgttttgtcctcttcctctgccttcatgaggtgttctatcagctaggttgtcttttggtgaagttgtggttttgggaacaccattgagattttgaagacgttcgatcttgctatcgaagctgagcagtagttcttgtagttgctgtcaagtggtgttgatatgagcttcaatttgcagtacaataggcaaatagttagcatctaatccacacaaaacattagcaataagatggttttcagggtaggggtcccctgcaagtgcaaggctctcagcccaggctttcttttggcgaaggtattcaaccatggtggtgttgcctttcctcactgtttgaatggcagtccttgtatcatccattttcgatttcgaatgagccccatataagttttccaaagctctccaaagtgatgcagatgtggtgcaaccccatcactttcgttgctatagtctcagtcattgagctatagagccaacccattaaaagctggtcactgacgatccagtgctcaaagtctggattgatttgaacagcagcttcggttccttcttcccctgcatccacattaacataaataaattcagtaggacaaacacgtgttccattaagaaacccatcgagtctgtgacctctgacgatgatagagaccatcgttttccagagtgtgtaattgttcctgtcgagttttagtggaaatggttggtttagggtgttgaaaggttgagtgaagttgctggtgttactcggttgtgctggtgatctgtttgtagtgattcctgggttgctggagagaggggtttcattgttgtttccaggtgttcctggattaggagtttgagattgattggtggacatggttgaaggccttcgtacccgctctgataccaagatagaaaatgaagagaagataaaaaattggtaacactcagctcaaattacagttgaggaattgtattgaatttatagtgaagaatacatttagggatgattacaaagaggacacatggcagtaaataattgatacaatcataacataaaagatttgtacaatcatgagcaaatgatttcgccaggatccaataaagctgttagagaaaatattccttatgcacggattgctgaggtgtacaagggtcatagtgataccctgtggctgaggtatagcaatgtaacagtggaggctcatgtcttaacaaatttaagcaataccgagcctcacgacttgaagccaagatctttaaggtcttggctcgtcgtttgaggttccacacttcgtctcgataagactagggtttacacct

SEQ ID NO: 27838 - DNA, 3924 bp, Cannabis sativa
  modified_base (63)..(64): a, c, t, g, unknown or other
tggacttaacaaaaattgtatatattaaaccataaacatgaaacctacatgtaaacataaatnnttctaatcttctattgataataaatttagattatattgaaaatgagttttacgtagggcataaaatcctaacaatacaaaccttaatttgtgcactcctatctttgtattttgaatatggcacaaactaaatgagctatgtattttatataaatatatatattaggtcgacaaactaaacctttaaatcaatctaaagtaaaagaaaaaagactaagataaagtaattatttttctttttaacatttcaaaattaatttaatggtcagttatatcaagatcattctaatttatttgacataattttgttcaaatatgattatttgaattgattttgctttgtataatgaaagttccaatgtgatgtgttatatatatttccaagtggaaattcaatggttggtattttcaagcttcactgtattacgaaatcaagagaggaatgaaaagatgaaattgtgtaattgaattgaatgaatacaaagtaatacagagggtttatatacaatgctcaacaagagcagaaaacggaaataacagaaaaaggaaaagacaaaggtgcccctgacacataacaaactaattacacaaataaccaaacactaactgaaataactaccctaacagttaagctaaggaagtgatttcgtgttacctcactgtttcattcctataattatatatagaaaacatatatagatcacccaaggtactgaactatagtatttgcttcttttttttaattttttctgaaataactatagtatttgttaatattctgattgaactataaagattccaaaagagagtaatattctaactccaatataatataacaggattattatttgtttaattttttctctctttgaccgtgcttgaagtacttgaagaattagatgattggataaccatttttaatattatttttttggtgttgtattatacttctttgatgttatatatgtatatattcttaattttgtcatttaaaggcaactaaatccatttaggattttcaataatgttgttagataacgattctattattttcttacaataattctccaaataaaatatggcagttataatttataaatacttatttagttatattaaattttgttgctaaatttacactacatcaaagaaagaattgaaggtatggtgcaagcctcatcaccggcatagagagaacttctattcttcacaaccctgattctaaaactacctctaaatgtactctgtaaatgatatacctacattttttttatcaaaaaactgtctcaaaatatcaattttatatcaggcaggtatttttacactctttagcttccttttttataaaaatggttgaaaaacagcctctaaaggcccatattatagtagtgggggtgaggcacttgatcccagagagaaatttgtagggagccttatgaggggttgattggtatcgagtaaagggataatggttgggaggggtgtgatgaagtggttagtagccacttggacagtactgcctgaggcacttgatggggcgggtggtttgacccaactagggaagtggaatgttggccagccatgttgctcatgctagcattgaaaatggctgtaaaggatggcacaggttcaatgaattaggaagggagagatttcgaggaatgtgatgggttgctttcgctccaatgagtaagactttgttccttaaaaatacttgtggacataaatagaccagcttattgggtagaggtaatattagttttgtaatttgctaattgaagtgttgggctagaggggctaacatgactagagacacagaagccactagcagggttagtagacatgaagtttacaatagatggtggaacaaagtagttgaattttttgagctattcagaagagggttggtgaaaactagaattttacccttgatgttttttcataacagaggtatgggggagttggggattcgtcacaagtcttcaagtagttgaagtagccatcgttgtagctatggcccatcctaccacagaaaaagcaaatattggggaggttttcatgcttgagagtgagccaaactaccttgttgatactttgaaattcaatggggattccttgatgaataggttgtgagacattgaacatgattttaattctaaggtatgaaccccatgtttccttaaaggaaagtttgtccacttccagcataggccttagtcttaaggaaatcaaagcaacaagttcctcactacgtttgaaaaagggtgtgttgtgaacttgcacccatagaggaatagagtgcaaactgttaccattgaggacatcaagagaattggggatatcgatgagaatggcattattttggtaaatccacggctgctggatcataattctccttctatctccatcgcatccaaatgccacgagaagaaggtttgggggcctcttagtaatgacaactagaaaatggcaaagtttgttccaatcctttgtcattgtctctctgaagtgtttcttgctataagatttgttcgagtggagttttgcaataatgaagatgttaggagcagggaggtttggattagtttgagaggaggagccttgaaaagagttgactgtgctctttgtatctgtaagattgagagaaatagaaaggaaactagctaagtcatccatatttggtaagattgaaagaaaagacatactagagaggcaaattttgagagtgacagtagaaggcaagaagagtaatctcagcaataccaaaaacggtatggaggtcatttatacccataatagctgacgaagcattaaaaggagagtatgtttgttgggcttctcttctagtataattaataaaaccaaagcacaaatccaataccaatactagatctcctaacatactaactaatctagacgtgtacagagattaaattgggatctttaatgttcacacttggaaatcacagtataatcttctcctcgaagaacaacaaatttactacaaatgtggtcgaatagatgtaatcatgccaaaaattgaaaaaaaaaaatattgagagctgacattagggtggaaaaagaggtagagatgatcatacctctgatggattcattaaggcatgatgggaagttgggtggttgagtcataactccattgtcagaccttcaaaatcttggtctgttgagattctagttatggagaagacaggttgcgccgccaccagagtaaggaagattggagcgggaaaattccaccatgtgaacacgatgtgagctcaaaaaaaaatatagtgccttagagttttgcattgtgaataggaacttggagaaaatattggattctctttataatttatattattttcatactatataaaaatgtaaaatgtgcgactacctcttgaaactagtatatatatgggtactaattataaatcttaaaaaagtattaatattaaagataccaaatttttttttttttttgaatgatatacattttttttttggtaagggaatgatatacataattatatatatacattacttttgtaaaaaaaaaatattcattttttgtacttatcattaacaaaacaaaagcaaaacataaccgatttttgccatatacgaatttcacgcgttgcttgcacatataataagtacttatccaaaaacaaccagctgtagctgttatatatgcattacgacagatataataactgaaattataatagaaagataagcaatgcatggttgccacaacaaaggttacaaattaatatgaatagttaaactaattagaaagtaaattaatacatatttatataatttatacaaaccaccgtcctagctagataagca

SEQ ID NO: 27839 - DNA, 1709 bp, Cannabis sativa
atgcaaaattctgacctaatcttctaagattttcaatcaaccaaatcaacaatggtacgaaccagagcaacctcttctgctaccatcaccgatgatgtccctgtgatcgatgctactaatccggttgctcaaccaccatcgcaaaactctgctggtaatcgtgcttcaccaccattacccaattcaagacctgctgtccaagatcgccctacttatgaagacattagaagtccctactacttaagcacagcagatcatccaggccttgctcttgccactccggttcttaccgatcgtaattttcaaccatggaaaagagatttcatgatctccattggcgccagaaataaaactccgtttcttgatggaagtcttcctcagcccaactccgatgatgctcttctcagttcttggacccgttgcaaccagatggtcatgtcctggataatgcattcggtttctccagaaatcaagagtagcataatgtacctagaaacagcagctgctatgtggactgccttgaacaatcgatttaatcaaggaaatggccctcggatcttcgaattaaatgaatctttaatctaccttcatcagggagatgactcagtcagcacttacttcaccaaattgactgcaatttaggacgaaatcaaccagctacgtccaagaacaacctgcacttgtgctgctgcagcccaacatcaactccaaatcgacaatgaccaggttcttcaattccttactggtttaaatgaatcataccatgctgttagagcccaaatattaatgtatgatccctggccacccttaaacaaagttttttccatgatcgtgcatcaagaaagacaacgcacactaggtactcgaaacaatgtctctgttgctgctgcaactttcacatccgctgcaacctctgatgcagcagcaaatcttgcatccaaaggcaaaaagatgcgccctatgtgttctcattgtcaaaaacctgggcacttcaaggacaagtgctactttctccatggattcccaccaggatatggcaatcgaagaccacctgatgcctctaatcgcaaatctgataaatcccaggcacagaaacaaacaccagtagcttctcaagtctctggatctacctctgaaatcaccacatcacagcttacaactgatcaatgtcaacaactaatctcaatgttggcacaacaacttccatcagctgcttctacttccagtgacacccctgctgtcaccaatttctctggtaaaaattctgatttcccctataatttttggattatagatagtggagcaacccaccatgtttgctatgatagccgatgctttcaatcatttcacacacaccaacacaacaatttcgtgacattacctgatggcacacctattaaaattgcaaaaataggtactgttgtaattaacagtgacataacactcaccaatgttctctatgtgcctcagttcagatttaatttgctatcagtgagtgctcttttaaatatttgctcctctaatatgtcttttactactgataaatgctttattcaggggcattctccgacattgaggattgggattgctaacaaaatcaaaaacctatactacatacaacaagaagcatgctctcgggaacaaccctttactttctgcaatgtttcatgtaataaaaaccattggcattctcgccttggacaccctag

SEQ ID NO: 27840 - DNA, 2844 bp, Cannabis sativa
gtttattgtataaaagaaaaaaaagaggacattataaatgtaatttctgccgtgtgacagtaaaattaaaaaaatttatctaaaatttagtattttttgtaaaattttaaaataataataataataataaatattacttcatcaataacgtcacatcacatgtatctagcaggccaattgccactgccaaataatcaacttgtactttaggttgcgccagaggtgagactgaaagttgagaaacaataaatttagcctccctacttcctaaattaggtatagtgttgtaaatatgaatccattttgataccacacaaaattggcgcacacaaaaaatattagtttggatcgacacgtaaataccaataaattaatttgaaaaatacaccacacaacaagctggaaaaatatcaaaggatatattaaaaagatctaaaatttattattaataataataataaatgcgtctttattaatcataaataaaaaaaataataaaatttaaatataatattggatattagaattttatcattaaaactattaaaatatgtaaaataaaaattatatataagatgtgatataaaaatttaagtatttgtaagtaaaagtttagatttaaataatacttataattttgggaaattattgcatatactaattttatttttttttaaaaaaaaattatgattttggttgttccggtagtttctatatgggttgttatgtaaattttgattgcgatttaagttgttctgtttgttattatgtgagtttctatgtgtgtattctataaaaatataaaaaaaatgttttgtatgtgattatttgtaaaatattactgagaaattatataattataactaaagcattcaatatacatatagtttaacaacttttaaaaacaaataatatgagaaagtaaatcatgaattcgagccccaaaataaaaatgggctggcctgtttaaaaaatagaggctgacatgagcaaagcacgacacaaaaatactggagcaggcctaccctttaaaaatattggcacaacacaacacgattcatattttttctgtggcacgacacgactcgtatttaaaaatcacatatcaatatggggcgaactagcacgacactcacaaatttacaacactaattaggtaacaggctatcttatctctcacttggctttcgctcccaccatcaaatccagaaaaatagagataagagaactaattgaagccatgaaagataactttccttgatgtaagatactacagtccttgtaatgttttatattgggaatttttttggttagtaaaaggaattttttgttacacaagcccaaagtccaggaccaatataattggacccgaaagctatagaggagcaactgaagattggtttggagacttcagctgatgaggaagctgaggggaatgaagaagctgaaggaaagagcaggaatgagaaagccatgaagcaaaggaagagagaaagagccaagcctcgttggctcaaggacttcattctggctcattgagtctttgggcatattttgtagctaattttgttagcctttttggcttttgtcaattgagtgtaaataactctgctgtaagaacttaatgaattagcaagaaattactattggagacctcctctctcttgtgttgctatcattttttttgtttgtatttttattttttaaatgagaattcatttttttcaaaattattagtgggaaagaattgtcgtataacaaaagaaacttggacgaaattttgccacacatataaggaggaaaattatttatttctctttaattatttttacttttcaatattgtatgctggccccccaattttaaaattatcgtgggttctatatatacattggacaacggttgcccatttctttaataccatacatttattttttcatatatatacgcatagtttctcttaaataaattattaggtattatttgagtggagaagcaatccaaaaatatggctaaccaaaagtgcaatcgtgtagtttcgtttgcgttgttcattgcagttgcgttaccagtaactctatttttcctcaatacctctgacatttggtatgtttttttcaattgcttaattatttccttttattagaaagcatcacatcacctcttctaaacaatatctatttatttttccctttttaaaattattggtcataattttaaaaagaggatggtcatattcattcattactaaattagttacatgaagtgataaattaaataaaattcttaattaccaaattagtttaatatatacatatatatatatattatcaagacgtataatttatggaaggtggtttttaaatcaacatatacgagtcgctttattcacattcatagtcaataatataagtaggaggagcatgaaaattttgaattgtttgctagtttgtttttgttgtgatataagacacggacactagtcaagaacattaaaggaatagagaatgaatttaatacaataaacaaaattaagattgaaaactaaacttgatgctaaaatgagtaaaaacaagaataatgctgttagacgaaaaacaaaaaggaaagtttagtgaaattagttgaatcttggcttttatatatagataaaccaatttaaatcatttcaatttaggacaagggataagggacaagaaacaagggtataagatggagtatgaagaaatgagagaacaactaagttttgagtgttttagtattttgtgatctccacatgagttagtgtttttccatgtgagactttctatatagtgtatttctctatatgtgatcagtttctct

SEQ ID NO: 27841 - DNA, 3384 bp, Cannabis sativa
ttcatcagtaagtatatatatatacttctataattagtttattcttaatatcaaataaaggaaaagaaacactcatacaaaagaaaaaaaataagaggtttttatttcaatttattttttatagtggaataaataaatgaatataaaaataattaaaaagtaaacactactcctttcaaagttttgatttcacttttgaatttggccttaaaaaattgaatatatatatttatatattacttcagttttttaaaaagtagaaaatgaaaggatcgatgaggctcgttattcaaacgacgtgttttttaagcatttttcacacttgggtttacaaaataaaaaaaaatctaaattgtaagaagcctaacaaccaaaaaaaaaaagctaataaatatagtaataattaattaaattaataatatgataatgatgatgatgattaggagtcacatagagatggttaagagatttaaagtgtggagctacaaggaaggagagccaccagtgtttcacatggcaccagtgaacaacatatatgctattgaagggcatttcatggacgagatagagagtgaaaagagtggatttagagccaaaaatgctgaagaggcacatatgtattttctgccattgagtgtggtcaacatcattagttatgtttataatcccattcttaccaaagccgattacagccgagaccgcctctgtcggcttgtctacgattacattcatgtggtcgccaataagtaccccttttggaataaatccactggtgctgatcatttcatgctttcctgccatgattgggtaattattatttctcaaactcatttcaaataccccataatatttcttaattttcacttttttttattttataatattttattcattgatacgtaattctgtagcatgcatatatatatatatatatgctatttgttggagtagtatattgaagagcattgttattaggcaccagtgatgcctagtattttctcgacatgtcacgttacgattggctagcgatactttctaaaagctattatatatatatatatatattaaattatgtgagacccgatacttcgttagacaaatagcgatattaacacctaggagagtgctaggcaccactggtgccctttaacatttctctatattgaaatatgagactgctaatcaaagagaggatgaattaaagtactcctcttaattttctagataacaacaattattattagttgtatcaaatttaataaggaaagaaagcagtgaataataataagtgctttactaatataaagttagattttgttaggaaaattgtttttttgttcattgacaaaatgcttgattgataatagatgtgagaagagaactttaaataatatatatgctggattcatgtcatttattaaaatgatcttaaattataattttgtccattacattggcattgttttatatgactatatgaactaaacattaattgttattttatagtttcgatattgttaatgtgccttttttttttatacttttctaatttaaggcaccagaaatttcacacgggaaacctcaatttttgaacaacttcatcagagttctatgcaatgccaacatttcagaaggattccagcccaaaagagatgtctcacttccagaaataaacttgagagttggaactttaggcccacctaatgtgggcttaagcccaagaaaacgtacaactcttgccttctttgcaggaagggcccatggatatattagacatgtcttgttcgagcattggaaagataaagacgatgaagttagagttcatgaaaagctccctataggccaaaactactccaagttattgggccaaagcaagttttgtttgtgccctagtgggtatgaagtggctagtccaagagtagtagaggcaatcaatgcagggtgtgttccagtaattatatctgataattactcgctaccctttaatgatgtgcttaattggaacacattttccataaatatcccaacttcaaagataccagaaattaaaaatattttaaaaaaggtaccgattaaagagtacctaaaaatgtatagaagagtattactagtgaagaaacactttgtgttaaacaggccagctcaaccatttgatgtaattcatatggtgcttcattctatttggttaaggcgacttaacttcaagtttggaaatgtaaacaacatataattgaggaatatttagatttgattagaaacgatttccaactttctttttgaatggaaaaggatcaatttattaataagatgaatcattcttaacaatctctacaaactcatgtggtcagttgtagtcataaaagatacgaactgacgaacaacaagagcttctcgcaagaaaatgcaccgccttgttagcagaatgttttacaaaataaaaattaacataatttaaatcagccaaaagttgttgacagtcatgaacaagcagtccaaaagtagaaggaagatacgccgaactcttgattgcttgaacaataactaagtagtcggattcaagtgagactttttgccatcttttgctttttatccagctaagtgcctctttaatgcctgtaatttcagcaatttctagtgcaacatgaccaatttttctagctgagactgcctctattagagtaccatcactcctccttgcaatgtagccaaacatgaatgaatttgtagctttaaaagttactccgtccacattgaccttaatcgtatcattcgcaggtgtagtccaatgctcaacctcagcaacttgttcatcgaaaacaaggagaggttccataattctttgatgagcaaaactccattaattaagggtagttcttgcaaacaaaactacttcagtagctagcttagattttctattccaaacaaggttgtttcgggcattccaaatagcccaagatatcatcagtatctctttcatggtgttatcatccttacctgctattttctctccaaactaggtgcaaaaatcagcatggttgttgacactatagttgataatggacctgttccagcaagaagttgcaaaagggcagtttactagaaaatggatgatagattcagcctctatattacagaaaggcactactacaaaaataggttttcccgacgttgtaaaaagttgtttaaagtattaccgtcggtttctataaccgtcgcctatacgactgtcgtaaaatgggcataataggcgacgattcaaaaacattgctaatgtgggtttcccgacggttgtaaaacagtcgcctataattgggtataggcgacggtttataaccgtgcccttaaatcgtcgcctatagtatagggcacggtttaaaatcgtcg

SEQ ID NO: 27842 - DNA, 1369 bp, Cannabis sativa
atatttagtgtaaaatgtattggttttaaaaaaatcaaatttctcttaataaaatataatataaaaatatttttgattaataaataaaaaaagtattcttctttaatttatccttgtaaatttcctactagtaaagcatgcctcatctttatcaatgggccgagcccatcatgtcaccacaccactcaccaaaatattttgcttgcttaccatgcaagacaactactccacccctcctaattttaattttgatgtttcattgttcctattaaattaaatatagagatttttacaaaaatattaaattgtgggtacaactttacaattttattgtcacataattttttttataaaaatactgtgttcttataaaacaaccgtaaaataataaacaaaacaattaaaagcaacaatggaacaactaatagacaatagcggaacaacatataaaacttaacacagtataaaaaatacacaatattttttaaaaaaatacagtatttttgaagaaaattccgccctacagttcaaagaaaagttgaaaatttgagtatgtggtgtaaaaattcctcagatatatatatatatattcaaagaatgccaattgacaagtcgtacttgttatttttttaagattgttttttactttttttttttttttttaattctattttttttagttttgttttttaattcaattttttttggtaaataaattttttgtacttgttattagtactcttaatatgcttgaatccatgccatatggtgcggtactaatttttttgtatttttttaaatttattttaattctatttttttggcaaataattttttgtacttgctattggttctttaaatatgtttaatgtcatatcggtatagtactcaataattgatttgtaatttttttttttttatcttttgtattttttttatgtatggatgatctttgtactatttactattatttttggcaaataattactaattagttagtaattttttatgaatgatctttgtactatttaccttttttgttatcttttatgttttttttttattaaatggttttttgtacttgctattggtacccttaatgtacttatgacatgtttacttaaagagaatgagaattaatggtatggtattaattctcatacaattgtttactaaattttaaaaatggagaaaatagtggggcccacacaaattagagagaaaacaaagagaaagattctcccctatttttataggaatacttttccatttcctaacttagtttattttaattttaattttattaattaaaaatgaaaaagacaaatatgccctttaaaaatttataaatagaaaataattacatgtt

SEQ ID NO: 27843 - DNA, 3277 bp, Cannabis sativa
aaatatttactaatacatattaataattttcttagaaaattttgatagaattttagttttattaaagggattttttcataacaaaatgcttccctagctaacctttttttctgttccaattttactaactcaaatttttaaaaatatagtttttaaagttttaaaattaaaaaaatatatattattttctcattaaaaaaaaaaatcaataaaataaaataaaacaaaaggtagaaatgtaactaaaaaaaagacatcaacctcattgcaatatgtaaattaagtagacattaacacattgcgtcaactaaaaataaaatacaaataataaaacaacgtgtttctgacacatcttttattttattttatttttttcattttttcagcattcaattttttaaatgatggtgtttaagttataattatttatgatcattgacaaatttttaaaagattctaaacaatttattgtgtcgaagtaaaaaaaaaaaaatcaatacatatataagtagtaagtagtgatttaaaagaatcactattgaataatataaatataaaactctcacccttcttttatttcaatctcaaaaagaaaaaaaaaaaaaaatacaatgaaattaagagatagaacaaattactttggactctaaacttgctgtttagaatggaaattggaatttaagtactatacatcaagtaataaaatgaatattgttacttgcaattcaggatggaaagtactatacatgaagtaataaacgaatattgttactaataattatgagttacagatatattttcaatccaaaaacaaaaaataaaaaataaaaaattatttgtatatactattactctatcgtcatcaccaataatttattgaaagacctaattgattgatatgaacaaaaagggagacaaggcagagaaatagtgaggcagtgaagaaggtgaatccaagagtacctccaacgattgtagccaattcaagcaactgctttaacggcgcctcatgacctgatctctttctgtaattaccatttccattgctgcctacctcataattattattattattattccatccgtaatacttatcacttgatgaacaacatctctctagtttttctttcactttaatttcttctattctcgctcctagaatgcttaaatttgcatccacaatatcattatttcttgatcttgatgatggttctgtagtcatcacaataaggtaatatatttataattaaatcaagatgaaatatatattgtacaatacttattttatttttcaaaaaaaaaatataactacttagcataatgctgaataatagataaacaataacaacaatacttttaccttcacgatgatgatgatgatgatgatgatctctgtagctttgagctttaatattaatagattggatgagtttcttattagatgaatatttcaacattggagcagtacttaagaaagaagatagagaagcagtcgaatatgaatataacatgattaattaagatttattagatatatatttatatatctggctaaatcacctggttttatagtatgaggtagtttgttagatggtcttttcaaaggtggctgctggtgtttggtttagtactctatatatatatacaaaattacaaatgtgagataagatgtatcgatcatttcctttcacgagatgagatatacatacgttattatatcttattattatttatttatttattatatatatatgagggagtgtgcaatatgtgttgaaatcatatgaaggcttgtccctttacatgattgaatgagtcttcatcaaaagagggaaaaggtttaagcagacaaaaaagccatcgtctatataaagatttagtatcctaatattattgtttaattagaaaagaatatatgtatttttgtatagttgtgcaggccagctaatagagaggagagcatacaaagaggttcttatcttacatatatttttattaaaaaggttgattccaaagtctaatccacgcgttaacaggcaatacaatgtggagatttgtgtatggatttattacaaattcaacatctcatttcgatttataagggaaaaaatggaaaatcacgaagacaagattaaataaggttaaatttatatatattcttcaccattgactaattgttgacgctcaaaaatagtcaatatcaactcgatagattggcaagacgaataatgaatgtaagtatataacttagagagactcacaaagtttatagtaattcatttcccatgtcgcgatagtaataaaattacatctacttagagtttatatttctcaagatggtattacagaaaaggctaagtgtttaagctctagtttttagagagaagaattagagagagatgctctgactttgtaggtagttttttgaatgtgaaaaatgagctaagggagttctccttttataggtgaaggaggaccacaaaaaaaaggaataaaataataaaaagtacaaattaggtattttagactgtagatgatgatccaacgatcaaaattaatttatgaagttgatagtcattttcagagttcgaatggacccattgcaggtaacccggagcttattttcgtaactcccttggggtaaaatttaaggtcgataacttcaaaattgtgattgaagtgtgagatatgaattgatggagcattgaaatatcttcgaaacgcaagtggaatcgtgtcaatcaaaccaatattgagtgagttatgactgttttactgaaggttattcatgacctagcccacaggttgacatcccaagcccaagttgacatctcgtgcccaggttgacatcccaacgcccaagttgacatatgacatcaacctggatgttggataagtgaaaaactatctagggagtgtactttatggtgcctatgtgatattttgacatcacttagtctgtttttgtattctggcgaacttggtcaccagttctcggagctgttgttgttctgcagaattgaaagactcgaaactcttcatttccaagtgagtttcccatgttcgaaatgagaaatacaaagttatgaatttgacttctctgatttcatggatcttagctattgtgaaaaactagatagacaaacaaaatagaatcaaaatcagataagcagaacccaacgcactaggccattgataaacctgggcactgggtactcatttagagcttctaggatgtcattttgatacttctaagtttctagaatattaggacgag

SEQ ID NO: 27844 - DNA, 3471 bp, Cannabis sativa
tggttcttgcgctcatttatctttgtcgagatctgctctggaggccgagcttctctctattcgtttttccattgcttgggctatacaaaattcttggaatgatgttcatgtttttttggattctcaaatttcagttaggaatttagatcatcaatgttgccctccggattagagctatatgcatgtctcgttatctattttagacttagtcaagaacttcaatctgtgtaagttttcttttatgagtcgtagtttgaactgttttgtagatggtctctctaaaagagctagaatgtctagctcgggtgttggtttgtatcaaagggagggaattttccctatgattcccatcctttgttctttgttttgatgaacttttagttctttcaaaaaagaacccatcatataaggttgaataaaatatttatatttttataatttaatctaatcctgcttaattagttataattttttatatatatattgttttgtcaaaatcttagtattaagaaaagtgtgtaaaatattaaaaaaataataatctatatttatattttatataaagaaaaggggacattttagtaaaaatattaacaactacataatacatgaatttctaaaaaaaatttaaaaaaattgtgatatagttgttagttattgtttacggttgacagttagtttcctaactatctaatgtcttaggattagttagcatagtgtactttgtaacagactaaggtcaactaatatataaaggctcttaatctattctagttatgttaatctagtcctataaaaggcatatgtacatagtgtaattcaacacaatttcatcaatacaattcgaatacatttcttattctctcatactctattttttggttttactagtgtgtcagagttctgtccaagaactcatgttgtatagctaatgatcgagactgcattcctaatagtttggtatccgagatggacgggttcttaagcttgatttaagaaaagccaagcgtgatagagcgtgaacaacatccagggaaattatgggaagtgttaagtttgatttagagaaatttacagggaagaacgactttggactatggagggtgaaaatgagagctttactggtgcaggaggggattcaagatgctcttcttagtgctgaaaagatcaaggacaagactgagaaagacaagatcgagattctggagaaggctcacagtgagattatcttgagtcttggtgacaaggtcttgagggaagtttcaaaagaaacaactgttgctggtcttttgacaaagcttaaaggtctgtacatgactaaatctcttgcaaatcgtctgttcttaaagcaaaagttgtactctttcaagatgcaacctggaaaaggcattgaagatcatctcgatgatttcaaaaaaatcattcttgatttagaaaacatcgatatcaatatagaagatgaagatcaagccattattgtccttgactcacttcccggtgaaagctatgaacacttcatagacacaatgatgtatgggaaggattctttgacataagaagaggttcaaagtgctcttatgtcaaaagaattgaagagaaaattttgagttgaaggaagaacaacctggggaagggttgttaattgttcgaggaagaactgatcaaagggataaccagtataatggtaatcaaaagaaaggaaaacaaaaaggcaaatacaagaagaaatgctacatttgtcataagacaactcacttcaagagagattgtcctgaactcaagaatttgaatttaaatcaaaggtacaatcatcacaagaatcatggcagtgttgatgtggtcggtaattgggatgacagtgatagatatgaaagtgttggtgtgatggttgttacaaatggagatttaggaggagagtagattattgattcaggttgctcatttcatgtttgcccagacataattcatttttttgattacaagaaaattgatagaggaatagtgacatcgggtgacaatagatcatgtgctattgtgggaattggatcattaaagcttcaatcatcaggaggaactcatagtgagttgttgcaggttagacatgtaccaaaaataaaaaagaacctgacaaagatggatgctcaatcaagatggaaaatattgttctcaaggttcaaaaagggtcagaaaataatcatgaaaggcaccataatgaatggtgtctacatcctaaaaggtaacacttcaaacaacttaatttatgttgcttctagagagatgaagaactattttactatttggcatgaaagacttggtcatgtgagtaaaaagggattagaagttctaagcaatagaggtttacttggaaacaatagaggtttacttggaaagaatgtgtttacttggaaagaatgtaattttacttggaaagaatgtaattaacttggaaagaatgtaattaaggatttagatttttgtgagcaatgtgtttatgaaaaatccataaaagttaagtttggaatttgtatacataatactagatgaaccttagattacattcatttagatttgtggggaccctcaagtacaatgtctcgaggaggggctagatattttcagactcttattgatgatcattcaaggtatgtttgggttcacatactcaaaaacaagaatgatgcatttaatactttcaaggaatggagaattttacttgagacataaactggaagaaaaataaagaaactaagaattgacaatggtctagaattttgtgcagatgatttcaccaatttttgcgggaagaatggcataacaagcataaaatagtacatacatacactcaacataatggtctttctaagagaatgaaccggaccattcttaagagagttagatgcttgctaatccactcagggctaccaaaagatttctgggcagaagctatcatgacagcttgccatttgataaacaggtgcccctcatctataatagatttgaagaccccaattgaggtatggattggacacactgctgactatggaaggctcaaaacctttggatgtatagcctatgctcatatcagacttgacaaactagaacaaaggggtaggaagtgtgtgttcttggactatccaaaaggagttaaaggttacaagatgtggagcatagagccaggccatcatcaaaaatattttgtcaacaaagatgttgtgcttgatgaaagttctgtctataattaaggacacattgaggtctgtaacaaattctatgaatgagcaatatgcagataggtccaggcttgaggtggaacttggttcaagttctaaccaacaaatgcatcatcctaagacaaaagatgacgatgaaactaaaaatgctgacacagaattgcagcattaccaattggtcagggacagagccaagagagtgtcaaaggctccaagtagatttggttatgctgacattgtc

SEQ ID NO: 27845 - DNA, 2290 bp, Cannabis sativa
  modified_base (996)..(997): a, c, t, g, unknown or other
atcctttttctttcattcttctttgaatagttcggattttaacacattttcgtacaggctggtgtgaagatggcctatgcctactctcgagccaagtcgactgctgtcaagaatcttaccacttccagcgcgatgcaaagggacgtggacttggccaagaaggacgctgaagatgtgcgggcccagctcgagatcgtgaggaacgaaattggagaggcaaacaagaaacttattgctgctgaggccaaggttgttgagttgaccaaggagctgcaagatatgccctcgaccacgcagcttgaggtagaccttgtttctttttcccaagaagttaccagtctctaagatgatagggagggtctccggactctactttgcaggttggaggaggaggctaagaacaagaagattagggaggaggaacttgaggcagaggtcgaaggactcaagaaggagattgagagtaaaaagtccaaggtggaggagcttgaaagggaggtggataccttggagatagctggtcttgaggttttttacgacttctggaaagccaatcccaaagggaactttgattacctcagcgcttccaaagatatgtactttaattactacatggcccaggcagccaatgagaatcccaaggcaaccacctccaatgctcatatcgaccgaaatattgatgctccttccgtccagatcgatgatcctccggctccttcagacctagtcaatccttaccaagagcctgggactcttgctgtttgattgccttctctttatcttttttttttgtatgtgtatgttcgcccagtaggccttcctttgagacaaggtgactgcccaagcagtctttatacttggtatatatttttcattttttggacaactagctgaccgggcagcctttaatctcgggttcacatgctttgttatgcttaatgaatttcattccttgttatgatcattgtgcaactgtgtttgttttttttttttttnntgcttgttatttgtttttaccaaatactttgtataggtatagatgccccccaagtgatcgagcagacttttgattcttggtcacttgcttttcacaagtatgtctttttgtctgttcgggtctatgggtacgggcagaccgttgtatgcacttaatggtaaatttataacttgctaatagaattgacagaatttgaatttaaataagcttctttattcatttattggtcaaaacgcacttattaccatagtaacttacatagaagctattatattgatctaatccgatctttagcttaatataaacaaaataaattgcataaaatagaaatgaaatataacttttcgaagtggttaccggacctaagtactttgtcatttcattcgaacctttgggcgtagtccgcgcagaaggccacttacttaagagtaaatgttcttttgttttgtacttaagatggtcatccgacttggtactcttactggtagtatttacttaaatgttccccgttccaataccttggtactaggacgagttgcatatttcgttgtacttacccagcttgtatgctcttgattctagaacttcaaccacttgatatggtccctcccaattcggttcgagcacacctgctgtgttgtctttagtgttcaagaatacccttctgaggaccatatctcccacaaagaatttctgtgctttcacttgcttgttaaagtattgagctaccttttgttgatgagccaccagttttaggtttgctacagttcacttttcttcaatttcatcaagtgattctgcaaggagtgcatggttaacctcttggtcatatgtcaatcttctatgggatggaggttctaattccacgggtagcgtagcttcataaccatatgccagggcaaatggagtctgtctggtcgctattttctcagttgtgcggtaagactataatacttctgggagttcttccagccagtttcctttagcatattcaagttgtttcttttaagtgtcttattgactgcttcgacttgaccgtttgcttagggatgtgtcactgcggagaaactttttatgatcacaaggtttgcacagaaatcagtgaaggattgattgtcaaattgtttgctattgtctgagactatcttgtacggtaatccgaaccgatagattatattttttaccacgaagtcttgcactttcttggatgtgatggttgccaatggctcaacttctgtccatttagtgaaataatcaactgcaaccacgacatactgtactccacctttgcct

SEQ ID NO: 27846 - DNA, 4626 bp, Cannabis sativa
tgttctgcctttgtgtaaattcaattcatccatttagatcaataaacactttctttttcttttcgtaacatggtatcagagcaggaaagatagtctttcctatccgatcctcttccccagctgaatcgtgttcttcctctccgattaagctgtgtatccttccgctgatctctctctctttctcttgcttaatctcaatcgtttcttcttcgattgattttctgcaatgtcttctgataatcgaacgattcaaggtactcaagatgagtccacgatccaaactgccattggagatgttcaaagtccttctctgcaaatttctgcttcaagaaatcctcttgaagatccagcaaacccctactatcttcaccatggagacaatccaggacacacattggtctcacaacctctcacgggacaggacaattatgtggcttggagcagggctatgcagctcgcaatttcagtcaagaacaagatcggcttcttggacggttcaatccctaaaccttcaccttctgatctaattctttacaatgcttggataagaaacaataatattattatatcatggattttgaattctgtttctaaggaaatttcatctactatcctctatgatgaatcggcatctgctatttggaatgatcttaagatccgtttccatcaaagaaatggacctcatgtatacaatcttagaaaagatttaatgaaccttagacagaataatcaaacagtaagtatgtactttactaggcttaaaactatatgggaagaattgaccaatttcaggccatcttgcacctgcaacgggtgtacttgtggaggggtcaaaagactccaagatcattatcatatggaacacattatgtcttttttaatgggtctttctgattcttattcccaagttcgtggcagcatacttcttatggatcccttaccagaaataagccgagtatttcatcttgttactcaagaagaacaccaaaggggtactcaatcgagtaacaacaactcgaaccctgcaatggcatttgcctttcaaggaaataaaagtgcaggccaaaagactgataatcagacttcaaagactcaacctccgaagaagaatcgacccttttgcactcactgtaatatactaggacacactatcgagagatgctatgaaattcatggctatccaccgggttttaacaagaacaagcctaaagatgccaatacaaatcaggtacaaaccagtgaagaaaatggcagcagtcaacaagaaaatcaggccctatttccttaactaaccacaactcaatatcaacaattgcttaatttgcttgcctcacagcaatctggtatgaataaccccaatccatctacttcatcaggaaactcaggtatcatactatcacacaattctcaatctcctttacataattcttggattatggactcaggagcaacaagacatatatgtgctaacattaaactcttccaatgtttatgtaagatacctgctacaaaactaatcttacctaatagcaattgtctttatgttcagcaaagtggcagtattgttttaaatgacaaaatcgttcttgctgatgtactgtatgcaccagattttaaatataacatcatctccaccagctatatgactaagaacattcctatttctgtgattttcgattctgatattttttatatccaggacaaaaccaacctgaagatgattggaagaggtagcaacatgaatggtctctacatccttgatgatacaactgaaactcatcaagtcttgtcaatctcagctgaaacttggcactctcgacttgggcatccatctcaaaaaagactagatcttctcaaagattctttacattgtaacactactattttgcataaagataaaccttgctatatttgtccaattgccaaacaaaaaaggttaccttttcagaataataacaagttgtcaaataataactttgatctcatccattgtgatatatggggaccatatcatatagcttcacactctaatcacaagtattttcttacacttgtggatgaccactcacgattcacttggatctacttaatgcataataaatctgatgctaacactatcattccccaatttctgtcttatgtccaaacacagttcaattgcatcttcaaaacttttagatcagataatgcacccgaattggttttcaaggaattgtttgcccaacatggaatcatgcatgagtttacttgtgtggagacacctgagcaaaatgctgttgctgaaagaaagcaccagcatttgctcaatgtggctcgagcattgtatttcaagccaaatttccaataaaattcttgagtgaatgcatcttggctgcgacctttttgatcaacagaattccaacgcctcggcttaaaaacaaaacaccatttgagtgtttattcaacaaacaaccaaattatgaacatctaagaactataggatgccttgcatttgcctccactctctctgctcacagaaccaagtttgcacctcgcgctcgtacatgtattttcatgggatatccccacggaataaaagtatacaagttatttgatattaacaccaatcaatttttcatttctcgcaatgtggtttttcatgagaatgtttttccttttcgcaggctcaataccgacagcaacaccattgatcatttatctcaaattgtacttcctagcaataatattcacgacactcatgtatctgactatcccacagaacaacatgccactacttcccttcctgaaccagttcatacagaagagaacaacaccaattcaaacacgcatgtggcttctgatatagcagatagtactactggtttgacaacaccaaatcctacttcaaatcctccacgaagatctactcgaaccaccaaacttccatcatatctcagggactttgaatgttactcgacaattcaggataaatcgtccacacctcataatatttctaattttctttcttattctcaaatatcagacacttacaaagcctttatatttgcagttgctaccatgagggaacctaaaacataccaagaagccattcaatttgaacaatgggtccatgctatgaatcatgaactcaaggcactcattggaaacaacacttggagtatcgtacctttacctccaaataaacgatccattggatgtcgatgggtatataaaataaagttcaatagtgatggaagtgtggaaagactcaaggctagactcgttgctcaaggatactcacaacaagaaggacttgatttttttgatactttctcacctgtagccaaaatggttacactaaagctattacttgccatatctaccattaaacaatggcctattctccaacttgatattgataatgcctttttaaatggagacctacatgaagaggtatatatgtctctccctaaaggactaacaataccatcttcttttcctataggaacaaatttagtgtgcaagctccataaatccatttacggtctcaaacaatcttctcgacagtggtacaagaagctctctaatgcacttcttgacgaaggtttcaaacaatcccaggctgactacacattgttcacaagaggaaccgaagatacattcattgccctcattgtctatgttgacgatatcataatcactgggcctaatctctcccttctgcatcagctccaagactctctacaccagaaattcaaactcaaagcccttggtcatctcaaatatttccttggatttgagattgcccgtgctaaacaaggtcttttcatctctcaacgaaagtacacactagcaattcttgaagacacgagatatatagggagtaggcctaccaaaactccaatggatcccaaaatcaaattcgacaatgatcttggacaaccacttgacaacccgtcccactatcatcaactaatagaaaaactgctctatctcacactctcaagacccgacattacttttgctgtgaactgcctcagtcaattcatggcaacaccaaggacaccccatttacaagctgtccatcatctcctcagatatctcaaaggcaatccggggcaaggtcttctttattcatcaacatctgctctcacactttgtggtttctcagattttgactgggcttctttccccattactcgaagttccacaacgggatattgtattttccttggtgacagcctcatatcttggaaaacaaagaagcagcccactatatcgaagagctccgctgaagcagagtatcgtgctttagccgctgctaccagtgaagtcacttggcttcagtatctacttcacgactttcaaatcccacaaccacatcctgctttcctctattgtgacaaccagtcaacaattcatattgccaacaacccaacatttcacgaaagaacgaaacacatcgaattggattgccattttgtacgagacaaaatcaagaattccaccattcgcctcgttcctatctggagttcacatcaactagcaaacgtctttacgaaacctttatcctccaccatcctcacaaatcatatttccaagatgtccacatatgatatctatgctccatcttgagggggggtatta

SEQ ID NO: 27847 - DNA, 2688 bp, Cannabis sativa
ttagggcataaaatccaacactctaatggtagtctcagatggaagtctccaatggtggtctccaatagtaattctctgatagtggtgtccaatggtggtctccgatggtggtctctagcggcagagcaatggtggtctcaaattatggtaccagataaaagtttagagaagaaaaaagaaaaaatgaaccttgtcataaaaaagaatagaacttgttgctagcctcttgatgtagtaatctgaatagagcttgtataataacctgttgtacgtgcatgttatctctttgaggtctaatgttcatgattttttcattctgattacctaaaataaatattcagtggttgatttaacttgtgtaatttgaaacgagtatttgttaaacataccaaacaacagtggaacaacccaaaaacaacattacaaaaatcatgacatccccagtattattatgtttaagaatttaaagtgctcaaacaacacgttaaaagaattttgaaatctatgtttgagcattatttgtaattttggatttaaatgaatttgagtgggtttaagcttctaacatttttgatccgttgatttatgttattgacaaagcttttgagtgttgatttgatgttgatttcaatgtttttacttcatctcgccagaattaatgattttttttttcagttgttttggtattgttgtgatggtcctggccgtgggtttgaaagatagaggacttgtttgtgatttacggtatgtacagtataaaagaaaaaaaaaagatcagggcaatatttttgtaaattttgccgtgtgacaatataaatataaatcctacccccaaaatcctgtatctttgtaaaaaaatctatttatatttgatattaagaattttattcattggattaataatttgtgataaattatatttgtaaaaattaaatatatgataccaatcatgttgatcaacatgtattgtaacataaatatagtcgacatacgaacacaacagatcagattaaaattgagatttcttgatacgaaatataaatgagtctggttaaaagtaacaaataaaacatgtcaatcgacatacaggaacacgaatataacatgataacacgaatttccacccgggttggaaaccaagagaaatcaagaactctctggagtttactaaggcatcatcaaaacagtttctattagcataaactataatcaaacacatgaagtatctctacaaaattcattatttagtaaaaataactttctcttccataatatgatcatcgttctccttctctcttcttcctttgattcgtaatgttaatagatataacacttattaaaaaagttttaaaaagaattacatagttgaagagagtagaaagaacccaaaacccagatccccgatcggaacaatgtattatttcaaagtacaaacttcccaacttaaattaataaaccacaccgatcagtacatatcatgagttaaacatgggccggacgcttaagaggagtaactgctttctttatccgttcaaaagctgcttggagggtggtgagagatgtagcgtaagagattcggatgcagctatcgtctccaaacgcactccctggaacagctgcaacctgtaaagcaaggggataacctattagaaagaactgagagaagtagctatcttttttattattatttttcaaagcttcaccagcttaatctaaaactatcacttcactaatatcaaggatttccattattagcttacctgccccttgtctagaaggtaacggcaaagagactccgaatcatctattcttccaaatccttcagcctctgctccgtagtaagagctgaaatcaatgaagagatagaaagctcccttgggttctgcaattttaacaccctccatcttatcaaagctttggaccaagaaatcacgccgctctctgaatgctttcaccattacagctacctcctccccaccagcataacccagtcctaaggcagcaacagccgctttctgtgatatactacaagcaccggatgtgaactacaagaataaaaatgaaattagtccagtctctctgcactcttctaattcatcccagtctctacctacttgcaatgcagaagtaatggaacgcagcaatttagtccgtaaattgtaaaggaaaaaaattacaaacttctaaacagaaacactaattatttgcaattttcctcttatcactcaaaattcccatcgcgtcttttcattgatctcacgaaggagacaagagagacacttgacaaattttggaatgtaccaggccgtaagtgaaaaatgaaaataaaagtggaatgacacttgcaaataacgaagcagataaaaatggattttatatatatacctgactctgtagctttccacatgctgttataaaatgtttcggaccagcaacatatccaagtcgccaaccagtcatagcaaaagcctacataatatcattttaggaaacatcaaacatcataatagatctgaaatatgttgttattttataatgaccaattttttggaaggccatcgttttacatcttgacaattaaactaggtgcatccatttaatgcaatgaaagaaaaggcaaatatgaaaatggaacatataagttgccttagaacaaccattgaccaattatactagtttttcggataa

SEQ ID NO: 27848 - DNA, 2442 bp, Cannabis sativa
atttaatctaagcggtctttacaacaagtgggccacttctgagattaatgcggtagaaggaatggtttccaatatgacggattgaaaatctaagtggttttacatattcaaagtaggaggagttagggcagatttcaatcgtcaacctagtacgtcgcgtatctcaacacttagtttatatttttgttaccttgtgaagttgccaatgttttgttttttgttgatcacagatagaccggctcgacctgtttttgaccctgctcgcaaagaaatcactgaagttctcggtagcttacctgttcaagatcgcgattggcaattcctgtgcacgactgccaaattacgagaacataagctaattcttgagaacgccagcctccatcgggagacagtatacaaggagccatctgagaagcgaaaaaaaggaatagataagcgtctatctaaacaggcatcaagaccagcatcaggtaatatatatcgaatataaacatgttcttttatctaataaacgtatactcatctcttggcttttcgtagaaatgaagttcctgaagcatgctcctatcctcaaccgaaagcctaaggcaggaactgcgacgacttcccctatccttccgcagaagaggaaaagcgaggttatcgtaactccaatggctcactcctctaagaagcatgtcaaaattgcccaagacaagggtaagaaagtcatgattgatcctgctatttgggctcgcaactttataaccctccaagacaagttcgtgagcgatgactttgtgtcgaaggtcgaaggggttcctgccgaggaattgatgtcgcattctgcaaaactggcatcgtagtttatgaccatgttcttgaaggcgtttgtcgctggctccaaggaagttgatcttttgaggaaacagaacactcttcttcaggagaatgtgcggaagttgaagctggatgcgacttccagggagaaagatgtcgagaacctccggaaagccaaagagaatgcggaggagaaggcaaagcaggcggaggataaggccaacctctctgaatcgcgagtttaggaattgacatgcgatcttgagactgaaagggagaatgggaagaaacagtacgaacaggctgtttttgactatatttatacgacgttatccaaattgtcggactttgacttctccttccttggggcagaagcaactgagatatccgaggattttcgtgctatgtaacctaatcaaacacaaggatgcggaggaaacctttttcctaaagaagcagagaatgcggacacagaggaagtcgctgatggagctaccagcaaggtcccagacgactccattgctccagcttcttaatttatacaagtttttattattattatcgaactttttaactctttagcagtacatgggtactctcgttttgtacttggaacaaatttcaactttttcatttttcgaacgatatatatcctttcgaggatattttcttttgcctatttacattaagcggtacaggggtactcgcataattataaactgcttttatttaatctatttgcaatgtttttaatattacagcttggtgtaataacttacaaatgttaaacttggaaaaaattaaaactttgagaattcgagaattttaatcataataataataatcaatagtacaaaggtaggcgataccccctatacttaaaacatttatattacagtgccagtactattgataataatactttaagctttcgccattccaagcccttttgatcgtagttccatcgaggtttgatagtcgataggtcgcactaccaattttttcagcgataaggtatggtccttcccaattgtcaccaaaaacttcatgtgttgagtttcttgtgtttagcatgaccttccgcataaccaaatcacctactcgcaaagtgcattctttgaccttggagttgaaatagcgaggagttcgttgttgataggtcgcattcttaaaatgagcttgatcgcgcttttcttctagaagatcaagttgaagcaactgatcttatgtgttaccattaaggttaaaaacatctctccgtagagatcctaccccaacctcaactggcaccatggcttcgccctcgtaagagagcaagaagggagtttcactagtcgtggatgtgtattatatgacatagaacttggggaagttcttctgaccatgtacctttgcgttcttcgagcttacccttgatggtatgcttaatgatcttattcactgcctctgtttttccattactttgtggatatgcgaccgctgaaaatactttcttaatccccaattcatcgcatagctagcacatttccttacagtcaaattgttttccgttgtcaaaaattaacttataaggtataccaaacctgcagatgatggctctgtatacaaactcgcgcaatttgg

SEQ ID NO: 27849 - DNA, 1388 bp, Cannabis sativa
  modified_base (1324)..(1330): a, c, t, g, unknown or other
attcttcgcaataattttaaatcttattatattgaggacttcactaagaagatcaaaactctattgggattataatattatagtaattgtaatttaatagaataagaatgtgatagaaattaattacaatattgtttgatttgttgttggaatcaacactgtaatttataggaaaatatcaaggaagttacttaaaagaaaaatgctaaagggtaccaatagtgcctagcacctttctatgtgtcaatatcgctattggtccaactaagtattgtatcccatataatttaatataataatttttagggagtatcgctggccaatcgcaacatgatatatcgagaaggtactaggcattactggtgcctaatagcaatgctctacttaaaactcttgattcttaatttaaataaatacctacatattcacatttgaaatggaataaaaaaaaatatatcaaggtaattaaaaggtcgggacaattttctaaaaatttgagatgactatcttattaaattgattatgtcatattacaatacatgaaaattattttgcgtaaccggttctacagcatctgagctcgaaataaaatagtcaagagatcaaaaatttagagatgatgagagcagttgtaagtgctaataatagtcacaagggtaaggaagttattgtattctttatgaacaaagaagatctgatgaaataacgtcacaagaacattaaatgtaccgtttcacttaaagggaaagatagaggttagccaactgagaaagcggagcgtagctcaaggaaattagaagtagtagagcctgaggagctttagaaacatgagcaagtaagaaaaacacgcaaaaacgagaagagaaataagtccacgtggaccaatctaaatgctggaaagaaaggggaccatgaatgatcattcatgcctataaataggagaccatcgttcaataaggaggatgaattcttgcttacactagattagtcagaactctatcgaaatacatcctcaaaacattttgagttcagaaaataagggaatcagagagtaattgtagaaattgagagaggggatggtgtaaattgatagaccaatgtatctcgactagattaaatctggtggaaagaattttatgtcagaatataaatttgttgttgagctaatttttagcagcaacatttgagtaatgaattcaactataataaactatgtaaacacacaacagtataatttgtaattgtacgtcttgtgtattatttatatttgttgatttagtaaaataaatatagggatatgattttgtcctgttattgtactttnnnnnnntgtaatccgtgatgtacggcagccgtcaaatgaaggagttatttgatttgacggttga

SEQ ID NO: 27850 - DNA, 3252 bp, Cannabis sativa
ttggcttgataaccctcatttttataccactgtcaaagattcctggatgaattcctctagggtctcatcccatgaaaatgctctcagcaagtttcttttttgtcaagattcctgtgtctctgcattaaaatcctggaataaatctactaaagtgattttccaatctcgaatccaggatactcagaaagagattgctaggattcaagcttctgcctctaatagtagagactctagctttcgtgttaagtatcttcaatctcagctggatgttctcctttacaaggaagaggtttattggagacaacggtctcgagttaatttgctttaagttgatgacaagaatactaagttttttcataggtttgcttctcataggaagaagaataatactattaaatacttaaaagatgattttggtaatagcactaatgatcctgaggctatgtttgatattatgtcttctattttcaccaatctttttagctctgaggtttgtgatgctgaggctactaatcaaatcttggactgtttagggccttccctgaatgagtctgacattgattttttggctcagtctttcacagctcaagaagtgaagaaagctatttttagcctctttggggacaaagctcctgggttggatggcctgaatgcttttttctaccataaaaattgggacactcttggtgctagttttgtccatgctgttttagattgcttaaataatgaggttgatttctctgatattaatactactcttattgctttaatccccaaaaagcagcatgccagttctctaaaatattttcggcctataagcctttgtactactatgtataaagtcatctctaaagttttagcgaatcgacttaagttagtcctggataacattatctctccttttcaaagtgtctttatttctgggcgtattatttttgataacatccttattgcccaagaaataattcatgccatcaataatagaaagcatggtaaacgtggctgggctgctcttaagcttgatatggctaaggcttttgatcgtgttgaatgtcactttttggaaagtcttatgttccactttaactttcctctcaattttgctaacttaattatgaaatgtcttactactactaatctttcttttcttcttaatggtgaagtttatggatctcttaagccttcgagaggtcttagacagggagaccctttgtccccctatctttttatcctctgtgcggaaggtttatcctctcttcttagaatgcggcaggaagctcatattcttaatgtattgctatctctagacatgctcctgctatctctcatttattttttgtggatgatagtcttttgttttgtactgctgataggaattcttgcctagctcttcaggatgtgtttaatatttattctaaggcatctggacaggtcattaatttctctaagtcatttatccttttctctcctaacactgaaccagatattcgtgctttgttttttcaaacttttaaccttgaggatcggccttttggttgtaaatatttaggtcttcctcagtgtcttacccgatctaaatatcattctttcacctatctttgtgataaagttgcttctgttctgagaagttggtcctctaagtgtttttctagggctggaatggaggttcttttgaaggcggtaattcaggctattcctgcttatgctatggcctgttttaggcttcctgttaaaatttgtaagggaattgtgcgtggctaagattctggtggggttctactggggaaactaggaaagttcattggaaatcatggaagtttctttgtcagtctaagtttaagggtggtttggggtttaggtctcttgtgcacttcaaccaagccatgcttgctaaacaggcttggcgtattttccaaaaccctaattccttgcttagcttgatccttaaagctcgatactttccacactcttctattcttgaggctgtccctggtcatagtccctcgttttcttggagaagcattttatggggtagggacctgatggcttctggacttatttggaaagtggttaatgggtatgggattcaaactctgggtgatcattggcttcctaataatagattcaagtttttttacttcaaataatcctcccccttcttcccattctttgtccttctttattactgattcgggaacttgggatgtgggtaaattgcagtcttgctttgatgagtccatggtccatgatatccttgcggtccctgtttttggaagttatggtcatgataagctgatttgggaaaaggagagttctgggtgtttcactgttaagtctgcttatcatttggctttctctaatcaggaccttccgtcttcttcttctttttctgattctaagaagttttggacaagaatctggtcttctactgcccctcctaaggtttaactttttgtctggcgtttgttgtctaaggcaatccctgtagcttcttctttgtttaaaaaatgtgtgattaattcttctttgtgtcctgtttgtaagatggacaatgagactattaagcatgctttgctagattgctccagggtcaggaaagcttggcgatattccaggtttgctgcttattatgatacatttaaaaatttggatattgatgagttttttcttggtcttcttcaaacattggacaaaaatgatattggtattttgttttgctttatatgggctttatggaatcaaaggaatagttttgttcataatcagtacacttttcctccaaaagaagtgtatgattggagtcttaattttttctttaagtttttggatgcacagcaacatcatgtcacaggttcccaatctgcatctccttcgactcaagtgcagctacctccttctacagggcttagaatattcacagatggagccattgactcagctaatcggaggcatagtatcagagtggtggttttagatgctgataatgcagtcaaagctgggttttctactcctttccctggattggtgccgcctgctgttgctgaagctaaggctattttccaggcaattcaatgggctcagatgatttctctccctgtagatgtcttgctaacggattgtaaatcaatagtagaaaagcttaattcttgtaattggaataataatgtgttggatgatgtattggttaatgtcaagaacttgttatcttttagtccgaggctagttatttcttatgttcctagggaaagtaat

SEQ ID NO: 27851 - DNA, 2477 bp, Cannabis sativa
taaacggtctgctaatggtcttgcgcatgctttggcgcgggcttctctttttgaggctgatcgtattcttagtggggattctttacccacttgttatgcttccattattttgggagatttgatttaataaagcttgacatgtttaaaaaatattttaataactaaataaaaataataatttaatgaacaaattttctaatcgtataaaactgcatataattttttcaatgagaaaaatatttatttctctcactggttctgattcattatatagggaatgcacataaggtagtaacgagaagaaagacgtttctgattaacgtagaatcatgagaacaatgctgaaaaatcaggacgaaaaaatgcctttgtttactaaataattaaacatgtttaaaattattttaattacttaaataaaataataatttaataaatacattttctctaaaaaataacgtgcacaccacaccagctcgactcgaacgcaggcccgaccctaagcataggcgggttaggcctgtgtctagggcccacctagcctaatggcccacaaaaaaaaatcctttttaaaatttatatttttttactgatttttaaaaatattacattttttttttaaataagggctcaattttttttctttatgacccactatatgtcaggccagccttacttgaacggcaatgcgcgcgtgtttgatgagcctttgtgtgactcatctctctttcacaaaagtgggtaacccttgaggcccaatccaattactcatatctacactatatatacacttttttttccaaagaaatatgagactagtcctccaaggacttcgaaaatcctttccaattttttagtaataattcacaaaggttccaacatttattaatttcttctatcaaattacactaacttggtctatatatcatatcaataaatagtatatgcctatatggagtactacttactctagtttattgtaatttagtgagaacaaagtagtgaataaaatttgttcatgaaaaaattagttcaaaagggtagtgaacaaaattgaaaacgttataataggctgcttctcattttcgttacataaaagcttcttcacatatgaaatgtttttgtagcatatgtaagtccgtacataaagagtagtctaaactgtaaggataaggtttatgagttttgccagccacacataattttggcattgttgttcgcaagtatagcctgttatgcttagtttaaagatacaatttcccgacaacttcttcttcagaattctatctaagagtcacgaaatcctattactctaatctcttcaaatggggtgcaaggtaaaccattcaattaactctctagcacttttcaaagtctcaacaaaaagagcaaatctttgccccagaaaaatcataactttctcatcctctcccaacagtcaaatccagcaaactcaagagataaaaactgaccattacactgtcaatttcaagactttgggagcttgtaagcttggaattgctaaatatcctgattttggttacaatgctgaaggtgggaaaggaactgggtctgcttcgagaaaggctgaagaaaccacctctgatgatgatgaacttttggtttcttttgatcttaacacactgtatattccaccattgacgagttcaaccactaagttcttgggcttaccactgccaccatttttgaagatcagtatcgacccacagcactttaaagggaccatcaatcaaaactctggccaggcacgtataatgtatacatagatagaccattattattattattataactactttctcactatacatcctgttatacataggttgatcttgaattcaaagccaagttttggtttacaatagggagtttgtacaaagcgccagcactgatagtggagacggtgttaacaagtgaggagtcattagttgggaaaatgagaagcggaagaggagaaaggttggacaaagatggaaagtgcagattggtgggagtggctaccgttgatcctattgatgatttcctcatgaactccttccttggacttcctactgagtgccttgccgacctcaatgccatcatatccattactccaccatattgattgctttgtcaatatatttcccaactatatatatatatatgtatctatataccttttctttgttcatataaattctccacacggaccacacatacgtgtacgtaatcattaattgcaatatgagaaatttcaattactgtaataaaattattacttgttcaatcgatattgtaaagaaacagagaaaaggtactaatggtttccttccttctagttagtcattctgttagttgattaggagtttgttaaatctacaattgtagctcttaaagtcaattatcccatacttctgtagttgtatgtaatgagttattgctcttatttgactattcaaatctgctttatctccggt

SEQ ID NO: 27852 - DNA, 3297 bp, Cannabis sativa
ggaactccagttcaactttttgaggtacgtatttcatgaatcggaaaattaaagtcaggacattagttttatgtgaattaaatcagatttctagttgaattttagttttgtagtagtttttctacactttttttatgaattcgaaatagcacatgttttgattgattctagtcgtcttctcaagtgaagtcacgagaattaatggtggttctttttcttgttggttttgtttcagttgtgttgggttgctgagttggtcgattgaaggttgtgtgcgtgaggttgtttgtttcgttccgtccagttggagtagtagaaaaaatggtattttggtaatatttaattgatggattgtattttcgttccgtgcagctgaagtatttttgtaatttaattgtattttttgtatatatatgaaaaaattcaaaataaaaatagcttttatgtaattattatttaaatagaacaatgaacataatgtaaataaatttatgtatattactagaaaattaagagaacgagagaaatgatatttctctaattaatgtttatgtacaatacaaatctacacattaattatatcacaacttgacatctacttctttcctctttggaggtataccaattaatataaagaatgattaactaagttatattacacattacaaaaagacccttattttaataaaaagaatttctaaccatgtagttctgtgtggtgttcagaagaattacatttacctaaggcttaggccaataatctataaatatcttctgtttttttttttttttgatatcctataaatatctaatcttggagttttgtaacagagagtttggagagaaggaaaatacaagcagaggaaataaaaacagttgcagcaaaacaagcaagatcgagtccagtaaccaaaggaatactctgaaatttctccaacactcctacttggagtagcatcatcacagcatgtcctaattttgattttgcctgtgaaaccgattgcatttcaacccaacttggaagactctgcaaaattatatacagtattattaacatattttaattaatgtcagataataactaatactacaaaaactcaaaaaatatattggtagacacatttttgaagactttgtatatatatgttaatcgaaaagtacgtaccttcatatagaatagaccaaacaagttagagccagcaagccatggccctttttctttcacagactttgagccaacaaacatagtatatagcccaaatccgaacataagcatggccattcctactatgaacatatctgcatataaatgttacatattgtataagcaaacttgaaaaaaaaatctgatggtatatatatctctttgatatttatataccactgataaaatattgaaatactaaattataataagtgattaatttctttattaccagtggcttcaattagtgagtgcatcgcatgtccttggtcagccttgtgtgacaagttatgaaaatactggaaatatgactgtagaacgagaaagcatccctgtgtatccatattaaatacttttttgaattaaatttcagtataagacaatattaattaatacacatatttgaataatatatatatatatatatatatgaaagaaagtgaatttagattagattaatacctcaacaaaacacaatattgaaccaagcaaggatccggcgacagcaaataacgcaaagaatcgacagttaattatgccctgtattataataaaaaatcaatattaaaatttcaatagtatttaatttagtgaaaatatttaaaaagaaaaaggaaatgtctttagttttaccctttccatgaacatctgaatattttgttttaaagatcttcgtttgaagtgttctctgaacagaatcaatagagcattgttcgctttgctcgaaagagatgaaaccaaatcgaaaatcgctccatcgatcctctccttgggctcagacgtaatcaaaatcaagctccccgaaccagctaccgcgccggcggtagccaaggatggcttcgcagcttgaagaagatgacgatgagtattagtagtccccatttgcgaattcttcttcatctcatccccattattattcttaaccttcttcttctgatactcataatctccactcggcaccgaacacctgaccccagacgaagaagaaccagatccgagaaaattcaattgtgggttactggagacgcgcaataatctagtggttgccattgcaatgttgcaacttggttagggtttttgggtagtttggggaggtttagagtggagtatttatatgtgtggaaggaacgaaagagaagaagaagaagattcgcggtatattatagctatttggacttgacggtggcactactttttgccttttcttgggaaggttgggtttgattgtttaaatcttgaaactttcagtattgaacaaactaacttaacctcatgtgatgacgtggatgtctttacgtgtgggcccagttttgttatgagtcgaacacgtgtcagtcatagaagatattcgaagctctattcttcatcgccgtcctcgacttggggagcacaccataatattcgcactcatgttttttatttttattgagtaatggtcagctcacgtgattaaaatttaaattaaggcgtctttgtttttacatgggaagtaaaactgaagtgaataacttaacaatttcagtctgtaattaaagaaattgggagtcacttaaatttattatgaatgctcaaatttatcggggacacgtgtcatgccgactttgaatatggagcgcaatggttaattaagtaggcgcaaccgcgaacgtaattgaggagtaagttgaaagaagaagcaaaattagaaaagggatatatagtgaatcaacgtacgccactgcaagctgtacatatatatatttttcttggagaaatttagagaggttcctagaaaattgttatgaaaaaccaacggtgtatagttgttaacttattataaaagaaagtcaccaccaacactcgaccacattaggagcatatgtttaatgattgcatgcattttgctaagagtgacgaatgcgatgtaaaaaatgtaaaactatgacaacatcgaatgcacaatattagctgtttggacttatatacgatgatctaaatgagggtcatttcatttgtcataaataattgtagaaagaaattaaggattattaattgtttatcaaatcgtataaaccactcccactacacaaaatataaggtttgataaatttata

SEQ ID NO: 27853 - DNA, 5379 bp, Cannabis sativa
acttatagttgattttacatgtttcatttttgtaactacatatatattatatatatatattcaaccaaaaaagaaaaaaaaaataacatgtcataataataatatccatgtaataacaaattacgtacggctctaaaagcttgatggctaactaactttccttaaaattaactcaacctcccacaaccttaaataataactccctaattaactctgtaaagatctcttttctcttaaaagtaataattaaaaaaaaacctatagcaaattagctctacgtaaatcaaaaaagaaaaagaggaaaaaaaaaaaagaaaaaagaaaacatatatacgtacatataaatttatgccggagatatgcccggaggacacgtggcatcagcacagatcctagaggtgaatatcttatcggcaaatgacttagctacggtggccaaattgatgaaaacattcgtggtcgcctgggttcaactcgaccggaaagtgagaacccgggtcgacccgaacggacatactaacccgacgtggaacgagaagctcgtttttcgaatcaactacgactctctcatcctcaacgactccgccgcctctctcaccgccgagatctactcaacctcggcacgtggcgtcgacacgctcgtcgggagcgtggtcgttcccatcagcagcctctttcctccttcctctatcgcctcacattccaagatgcagttcatgactctccagattctccggccttcgggtcggcctcagggggttctcaacgtcggagtctctttattggaaggaaccagacgaagcttcgatcttagctccgtcgcgcaatcggatcagatacccgacccgaaaacttatcataacaacaacaacaaccataaaaaccagttcgccaatgggtcaaaggcgacgccaaaaaatcagttacggcactcgaaaagtgaacgatcgataatgagcggagctcaggcggcggacaaaaagggatcgatgtgttcggacgtgggaccatcgccgtcggtggtggcggcggcaatcgcgatgggattatatccaagaggagcggcgacggcaacaacgatgacggaggatgatcagacggcggctagaagctcgatcgttctgaataattggatcgaagatgatagcgtggaagggcttaagacgaaaatcgagaggtggcgatcggagattcatccgatttacgagaggaggcagcagcaggtgaataaaatcaattacggaaggtcgagttatcggaggaacaacaacaatgaggcggcgccggtggcaaagaggtcagagcacagacgggccgggtcgggtggcgggttgttctcgtgctttgggacggcttatggttgcgagttttcgatatcttgtggtggtggtagccgtaggcataatagtaagaagtttgataataatggggacaagactcatcttagcctatctgaattttcatacgatgatccgtatgtatagactttcatcaattctttcattttactatagagagtttttcttttttcccttcttaaacaattttatgtatataacatttgatgatcatgatatatattatgcatgcacttacgcaatgtagagacgagtcagcttagcttagtttacttttttattttttataaatttaaaaaaaacaacaacattattttaaaaaaaatatatgagaaatgctaaagggcacccggtgcctagcaccctcctatgtgttaagatcgatattgatctatcgggtcccatataatttaatataatagattttagagagtatcactagccaatcgcaacgcaacatgtcgaaaggtgctaggtggtgccttacacaatgttcaaaatatatataaatatgggaagtagtattctcacatggatgtgaagcagcatagtcaattttgcttaaacaaacccttccaacttcaatcttgactcttggcttgttatagaaggatattatagtgatgatgaatactatttatagcttacgaagttacttattttttagaaaaatatatgatacaataaattatatcaataataattaattatatcatgatattttaaaataattatagcagtaaatgacatttgtctaagaaatcgatgttaaattgattgttgctttaattgatattgtttatcagagaatttaacctaataacgtggacatcatttttgaaacgtggcgatagaaggagaatactatatgagagaaacagagcaaaaataatttttcgatctatattactgaattgattaaactgatacaaatgcttgaacatgtataggcaaatagagtcggttaagataggaacctaacagatttaaccaaatgatgttaacctctaactaactaatagacttaataaatgttgatgacaccctcaagatggagtgtaaatgttgatgacacccatcttggatacaatattgttgaattgagaagggagaagagccttggtgaagatgtcagctaggttgttttgagagagaacatgcattagttggaggaaaccttgttggaccttttctcggatgaagtggcaattgatttccacatgttttatgcgtcatgatagacagggttctcgcttatgtgaattgcagtcgtgttgtcacaatacattttaggtggtgtaaggaggtgaaaacacaaaagtctttgagaagagcaaggatccaagtgagtttagatgcatttttcatggcacggtattcaacttcagcagatgatcgagatacaacttgttgttttttttatttccatgagataagggatttgccaaggaatacgcagtaccctgaatgaaaagcatcagcaaagaatgaaagttgaacattagctaaggagagacttgtttctgcaaaagcagtgatgttggggacagtgttggaagggaaaaaatgcattggcttggaggcttcttgagatattgtatgaccctatgagcggcttggagatgaggaacccgtggataagataaaaattgactgagatggttgactgcataggtgatatcgggccttgtaatggttaggtagattagttttccaatgaggctctgatatgcagtcggattagtgagtgttgtacctttgtctttgctgagtcttaaatttgttttcataggtatggaagcaggcttagcacctatgtagcctgtgtcagtgagtaattgaatggtgaaagattgttgagagatggatatgccttctttagtatgaccaatttcaaggccaaggaaaaatgaagtttcccaaggtctttgagctttaatttttggtcaagcgagttgttaaattgagttatgtttgagatgttgttgctggcaacaattatatcatttacgtaaataagaatggctacaaaatttgattttgttcttttgatgaataaagaattatcagatttagattgttggaagccatcttgaatgagagtggtactgagttttgagtaccactattgcgaagtcttttttaggccatatatgctcttgtttaacttgtaaacattgttgggaggtgccttatatcaaggaggtattttcatgtaatcctcttcaagaaggtcacaatggagaaaggcattattaatgtctagttggtgaatatgccaattgtagattgctgcaagtgccaagaagattttgagtgtattaaacttggcaactggagaatatgtttgagagaaatatatgcctttcctttggttgaaacctttggcaacaaggcgagctttaaacctgttaacatccccatgttggttgtattttactttgtaaacccatttatagccaatgactttgtggccagggggagtttagtgataacctaagttttatttttttttctgaggcttgggtttcattatccatagcttgtagccagtgttggaatagggaagcttcaacataattttttggttcaatttgtgagtatgctgctaaaataacagctcaaaattggggatttaatttgatataaaataagaatggttcgattggatgagtggtggatgttgtgtggcagatataatcttgtagataggcttgttttttactggtgcagccagtggttgaaggtgtagcaagtagctgctggtcttgagattcagtaacaggaacctgtgtagcctcagtggaaactattgttgtagtatttggattaggtgcattaagtgtagcagtttgctagtttgaaacagaaccagctgtgacagattctgatgctggtgtggcgaaaattggtggctacaaatgtgttattgtgctgcatcggcctaacagtgggacacactatgtgagagaacaagttgttgaccttagatagggatgttgaggaaaaaagagggaaaatatgttcataaaacacaacattcctaaagttacaaatctgtttagtctcaatatccataagtatataagccttcatgtcatgtggatagccaatgaagatagaggatctacctcttggtgtgaatttgtgccttttggaaatgagagtggagtcataagctaaacagccaaagctttgcaagtggtcataatgaggagcagtattatgtaatagttcataagaggtgaggcctttgaacaactttgagggagttctattgataagataagcagcattctgaactagaagtggccaatataccaggggtaaattggattgaaatcctagtgagccacatttaaaatgtgttggtgtttcctttcaacatccaaattttattgtagtctttccacacatgaatggtaatgtattatgcctttggaggcatgaaaagcttgtagattcaattctttagcattgtttgattgaattaatattggttaagaattgagtgcaaaccatgttgaaaaaattaggtattaaagtttgaacatcaaacttgttttgaagcatatatatccaagtaaaacgagttttgtcatatactataatgagaaagtacttgtaaccttctatactaattatgtggaaagggcccaaaatgtccatatgcactaaattaaaaatgtttctggcaaaattatggttagaaatgaagggaaatctcctttgtttagccaattgacaagtgtgacaatacttattagtaaaatgaagagagttatcaatctttttattaaagaaattggaaatgtacatagaggggtgaccaaggcgattgtgccaatggtcaacatgtttattatcaagctaaaaggaaataacattggcttctggtgtatcttgttgcagcaagtatagcttttcatattttttagaagtcccaatcacaacaaggattttgtggccatttgacagggtaacatactgagggaaattatgatgtgagaaagatgtaaaa

SEQ ID NO: 27854 - DNA, 1322 bp, Cannabis sativa
tgtcggtccccttactgacactaccacccacactagggctcgatgtcgtgacgacatccttaatagcctattctttgatcacatgttgttctgcctcttcagcaattaacgctaacttgaccactttcttgtataatgtatcgtgattggtggtaattttcaagttccgactgatagtggcattcagttcccttacatatttttgtttctgagtgaagtctgttggcactagatcgctagtgaacttggataaacgatcaaattccagtgtatactcacctgctattctcttctcttgagtccattttacaaaatcttccatgtgtgaggttctaatggcaatattataaaatttttcctcaaatacactcttgaattcatcccaagacatgatactaacatcttaagtctgtcccacaatatttcaccagacacgggcatgctcttaaaacatgaatgcaacacaattaactcgttcatcgttactcccatgttatccaggatgcgaataatagtgttcatccactactctgccttaatgatataagtacctcccaaaaatgtcaaaggttgtagcttgacaaaatgctcaaaaaccgagtctcgatgtggtattataaatccagggttacccaccactagaataggagctggtggtaacacttgttcaattggagctacctgggccagttgcctaaaccgatgcaactcatcttcctaacaaagtataatgctttgcatttggaggaacatttgatgccagtcgccaagtggattagcgttattaacccccgcattatcccctggattctatggaggcaggcggtgccaacggattggtttggtcaatactaggctctacaaactcaccccgtggtctacctgaatgattagggtctattttctctcaaatagccctaaaatcaacaaccccagcgagtgaggcaccaaaaaccactcttacgcacttaatgccttaaccctaactcacacatactatttttttttttaaatatttatcaatttaattactaatcctgcttttcatataacattttattttctagatgctcatatgctgcctataacagaaagcggtaaatatttaatcacaaaagtagttaagcatttactctcaatacttcctgcaccacaagttgagcttgtctttggcgatgattatacatgttcagccagtctacagaaagtttaaaaaccttggcgctttgataccaaattgtaatgcccaaacaataggaatgccacgaactgcaactaaacatatgttaatccagcttaagcgagatttactagagctaaga

SEQ ID NO: 27855 - DNA, 7250 bp, Cannabis sativa
ctaaattaaccacaaaaaaaaaaacaaaaacaaactttttttaacatcttgtcgataacctatcgagaatctgtcgataaataattgagaacatacataactaccaccaccacactacatcggaaaacaccataaccaccatacaaaatcgactataaattaagaaaaattcataaaaataaaatgtatttcaacataaataatatataatctctctaaattaaccacaaaaaagctaaaaataaactttttattaacaataccttcttgctattgaaaaatatcttgaaggtcaagggctccttcacgatgtcatctgccaaatccacttttgcaccggcgaagaagtacgctacgactccgaaagcaaaggctccgaaagcttgttgcgagagaggaaaagcagctaggggaggtagggacgcggctgggggaggtggggacgcggctgggggacggttgggggccgaggctgggggacgactggagtacgactgggggatggctggttgacttggggagccgaagaagaaaacgagaggggcggctggagagagagagagggattgtttttgagtttatttaggttttgaaaataaataaataataagggtatttttggaaaaaaaaaaagagaaattaataggttagtattgtacaaaatatttaagagggtattttttgaaataggagttttttttttatatttattaaatgaaatttccctaaaaatattatgtttcaatattattatttggccctttaaaaaatatataacttaaaagcataagtccaaatacttttctgaagaaattattgggagaacttggatttgcaaactttcattttagctatgaaggaaaatatttcgaagtagggattttgacctctttgtgatggtgtcttggcagctttggtgtagtaaaaatttatcgttgcacaataatttctctcctaaatatggagatgttattgaggtagctacaaacattcttgatgagtatcaaagtcgatggaaatactaattcgaagcacatacagcaggatacagataggcagcgttggatttctccaaaggtcggaaagcttgatactaatgtggacgctgctattgacattctaaatcgcagcaacggtgttgggggcattgtttgagatcatcttggcaggtgtgttcgttcttatcacagattctggtatacttctctctccccttttgtggctgaacttaaggcaatcaaaaaggctatctctattgctagagatacagatatcaacgaatttacatccatttcgattctcagaatgcaatctctgctgtcaataacaaagtttgtggggatgttgaatttttggccgacgacaacaagaaagtccgagcttcgagtagctgtttaagggtcatttatgttcctagactttgtaacaggatggcccattgtgtttagggatgcatattttcccacgatgatggggctccgcgggggccgctcctaatgaggcggggattctccacctaaatggggaacggagcgggcacagggattactttttgtccccgaatgttaaacggggtgggacagggatcacactccccgcattgacagggactcatttagtattttatcttatatttttagtaatattttataatttataatttatgtttgtattttttttcgtgtattagtatcttttttttttgaattttaagttgtgttttggataataattagtttattgaataatattagtttattgaataataactttattgaataataactaatgtataatattttaatttttatataatttaatatttttgtatattaaaatttttattataaactttttttttctattaggggatttccggccctattcccaatggagaataagtggggatgagaattaaaatccttaacgggaatagggacaggaggagcactccttgcaaattccccaccccgtatccctaattgtgttgctaagaatgccatacatgttaaggattctattttgtgggatggaggttttccttcagttgcctatcatgccttcatggcttgatttggccttcccttaagttctgtatcaatgttaattctttataaaaaaaaaaaaaacaaaacaaaacaaaaaaacttaacaccattagcagattgcaaattaacattacatgaaccacacaccatctaatcaagtaataacatcatcaataaaacctgtccattaattattggagagtttaagacttaataagcctaaataattgaaccatatttttacaattgtaatgttttattatcagttgggaaaaaggtcactttgtagctaataacataatttcaaattcctactatatagaattgtaaaaaataaaagagaaattcaattaaaatcaatcaaaggttaaatattaatgagagatcataaatatttattgaatacgttttcatttgttaaatataaaacattacatttacaagtaagccagcaaaatagaagacatgataattcaacatataatttctcttccaacattcttattttccaaaaaataaaaatgaaaaatgaaacttcgacaaagtaaacaaaaaggagctcatctctttagaataacctaaaatccaggcaacactgaaaggtcagcaatgcctctaggaaggtcagcaattttgttgagcagcgcaagcctgttattccgaattctttcgtcctcctgaaatatgttcaaaactcattttcattttcattcataacttgcaaaatgcaactaattatatgatgccatgcctgttgggtcttaatttgcaagacaaattgttaaaatgtgtaaccttttacatggacaatttattacttacaggcaaggcaaggatataattcttctatctacaacttaggtcttagggtgactaaagtaaagttgattaaaattagatttgcataaaaatttcgtaagagaatgaaaaaatagaaatcataactgtataatcattttatctttcttttcataatgatgtgagtgttttagctagcaagataagtgttaactctaattactatcaaaatcccatatgcataattttgtaaaatcgacacgagatgcataagctttgaatcttgtccttcaaaatccatcagtgtgaatcttactactttctccttgctaatatgccatagaggggtgatgaaagttaggagtcctttgaattttaagtatttatcttgaaataataggttatgatcttctattctctccctcgtatacatacagaacaaatgagttgacagtgaagaacacgtaccaccattacaaagacgttattgaagaaatcctcgagtggttgaagaagctctgacgatgcatcaataaagtcatcaacatcaacacctgttagacaagaggtgatatattaagactagttcaattcgccaagcattattttgttacctgatgagctttgaaataaaattgctctgcaaaaagttgaaaatgtaaattacaagtacctgtatttattttgcttctaaccgacaagaaagcactccatagagctttctcctcttttgtctcaaagatagcctcatccacctgaattaacaaaccaaaaagcataaaccatactgtagactcattctaaaaatttaatagaactaggagatccaaatatgcttgggatgatgtgtaattttagcaacagtttctaatcacatttctagagagcaagatagtttttaatcaaattaagaaataaaccaagaacaagctaaagacatgcccatgcgtaacttttaaacacaataaaatcagaaatggtacctcaatttcagtgtcaacattctttccacgaacaattctggtggggcgagaatatgcttctatcaccttaggaaaaagcttcccttttgacaacgtgtccatctacaaccaatcatttggattaaatatcagattaaaattacaaaagcaagaatataaaattgttagcgaatgaatttgtcaacgatagtattcaatgatttagtggaccccaaaatctgatcctacactatgatttttgccccagtcttcatttaaagttaagaaaacagaatcttgcagaaatgcatggcatcagtcccttccgatactaatgaagaaatgcatggcatcaatcccatcagatactaatggggaacttaataattcatacaaggacctatgaacaatagaaattcaacacccaaggagtttaagaagccgattatgtgtggtgcaatgcagatgtcaccattatagaatactgataggccttaggataaataaaaggagcaaaatggtaattgtcatggggtattgggagtatatataagtgagagtaggaaaggaaaaaggtgtgaagaatttgagtttgttttgtaaactattttgggagagaatcaggctctcaaaatcctcggaattaatgaaaggcaatctaccattttttatccaaacactactgctctctctcttttctctgctattgaactaatttggataggttgttcctatcaaatgcttaacctcaaaaaactttaatagcacaaagttacacatgctgcatcaagcaactaattacgaaaaaaaaaaaagaggaagcaaacatagtcacttactttaattgcagacttcgctgccagagaaggaatgttggctcgctctgcgagaatggaacgaaccacttcagaacttatacccttatcaacctgtatccaaaaggtaaccgatgtacatgtaaatcatttcatggtccaaatatacgtctccccatccagaatgcatctatacactaaattagagagtgaatagaggcagctttccaattataaatcacaatttgaaaaatacttcatggtttatatccattttagattgaggggaggtaggctgggggaaaatcagacagaggtaacagaagattggtattatagatatatctttatgcttcctttattatgtacacaatagcttaaaaaaaaatcatttcatgttcactcataagtttttcagctttgagacaaatcattaaacaattgggggatataacttatttggttttggtttgaaatgaggtagcctatcgaaagcaacaaaaaaaaaaaaatctgagctccaaaaaccagactttagatcagccacaccagtagactatgataagacttttttgttttaagaaacaaatcttaagtaattaatatgtaatttaaaaaaaatatgcattatgttcagatattaatgatggggctctaaaatggaaaacacagcagtggttaaaaagtaagtttttacacaccaaaaattgctctaatcttcggatgacaaattgatgcgcctgcaagaaaataggaaaaaacaatgggtgagcaatcatcaaaattgaacagcatgaagcatgacaaataaacacagtaaaatcaaagcagcaacaataaatttaggcataccgcttaaacttagggtgaaactaatctcctacaattacaggctgagaagcaatgaccatcatattttaaagctaattaatcaaaatggatttattgagaagacaatttctaattggcagactagtccaacctctgtcctacttctttctaaaatatagttgctgaaagcattgagattaaaactgtcacaatattgggtttcacaaagtatctacaatagtccatttctcacattatctacaatatcagcttctactttaaaggactgcacatctgcagcaagttgcaaagcttctttcaagtccagatctttatctttttcaaccaacacttggacctggagcaaaaggcaaaggatttgtaaagtgtttaattagtttacacccaaaatatcaaaatatcatgaatatcataactactttttttgaaaaaagagaaagggaccgcttggcttagactggcccccactcgaatatgaatatcataactacttacaaggccatatgagattcttcgcaggctaaatgggtcattgctagagctaggctgacagccagcagcaaatagaccaactagactatctaatctgcacaggtattccacgttaagattagcaagcatctcatgtgtgattcacaaaattggcatttttcactccaataatttatccaagcaaaaccacaaataagtatttaaataatcagcttataaactgattttatcaggaataaatagaaccaaaagcttgtaagacatgtgagcgatcactaaagtttacaataaaacatgttttgtaaacaatgaactgcaaaaatcaaagattagagaaggaacctatcaagtaggtattacctgtcagcaatagacagaacaatcccaacatcagtcttaggaagtagatctcctgagaatctaggaagagtgatctcaaacaaagcctctgatatctgcaattatgaaatgcaaaatcaaagaggattaatccttggctacagatatacattaaatacatataaacaagaacattagtgataaacaacctgctccgaatagccatctctaagagcataatgacgggccattattccagaaagagacgtaaactctgtaacgactgcagtagcaagatcagacatagcaagtgatgctgcatctttggcaacttgaagcatattgttatcaattttcagggccaaacttagtttctcaaccatgttttgtacacgaaacatcttgtccagcattgtacctagcttctcctgtttaatatcacattttggaatataatacgagaagttagatacctttgttctttgttttaatattcattcaacaattaagctataagaaaatatgttttcacttaggaaaatagctttacatggaaaagaatccccttaagttgacttcggaattctgaaaatctttttcgcgtgtctaactcgtaaaaaaattttgcatcttcgtagcgcgctctgcacacagttattgatcgcggtttattggtaacacctcatggattactcagccatataatccaataatgttgaaggttaatgatgcaagccaatccatttcaataagtaatccagcttctcaatgacccaaaacagaattaacatagtgaaacatttcaatcttttaaataagcaaattaaatgcttttatgaggtccaaaacttttggctgaaatatgaaacttcttttaatattgggacaaacaaaagatgttatgacacactgtttaccttagtacagcttcatttccttttctc

SEQ ID NO: 27856 - DNA, 3655 bp, Cannabis sativa
  modified_base (3373)..(3376): a, c, t, g, unknown or other
  modified_base (3501)..(3502): a, c, t, g, unknown or other
aattataatattaatatagttgttcttttacaacgtacctctctgtttgattctcgagaaaatatttaatgcggttatagctaaagtcttcatataacactaaccacaatccacaagaatgaattaaagctccaactatagtactgatatttttaaacaatatacagtatatatataaaaatataatgatataataaataatttgaaagagtttattgtccaaaactatcacaatcgagtataccttgtccggaaataagcaattaatggatgaagacaataattgattataacgagaaagtgacgttgagagcattgctattatatatagatgagtattcccaacagtatttctactcactaaaatcctatttttttttttaacttatattaaacttttgtagtacattatacatcaatttttatctatatattttcttttaatataatatttctacgacaaaaatttacataataaattaaaaattttaaaacaatattatgaaaatatgttaatataaaaaaaattatttttactttttgaacttttttatttataaaaatacttttttagtaaaattaataaactgttttttgtttttaatttatagtttatttatagttatattataattgtcatagggttattttttataatatgtttatagttgatttataattgttgtgagttggatttctcgttattttttagttgttttttaacttttttctaaacaaagtgtatttttgtaattttaaaactttacaagagtattgttgacctcccttctagccaacgacagtgaattagataataaaacgattaagtaatataataaaaagaaaaacaataaagtaaaatgaacaccatatattttaaagaggttcgcccccgtgagtgtggtaatagcctactcctcttgtattgtattgacacaggagaagaactaagtgttcttcctcttgaaagctcttacaactgatctctgtgtgtgtttctctcttagatcacttttttctctctagaatcgcactctgaggcaattctttctatcctttcatagtgaggtgtcactatttataggggcttaatgaatgagggatgatttctcttttacttaaaatgcataaaataggaaattacaatgattctataattataaaatatgaaatcggaaactagaacaagttggcatatttctctgactcaatctcacgtttatagggatcatcttcgtatttggacataacgagattattctgaagttgctatctcttgtaagttgctcggcgcgagtacacttctacctggtcggataattggattatagatgctgactagtcaggtattagagatatcaacttcagaataatctcgttattagagatagcatacctcggcgcaagtatgctactcaggtgcaagctactagggacatttccctccactcaggtattagagatatatgacatgtgtcattttatcatatcgccacgtcaatgtgcaaaaaaattgaataacaagtatttttataattaaaaactttaggctgtaaaattataaataaaacaaaaaaaaaaattacctctaaaaatttctcttcatataaatcacatatatagtattttcattttaaagaatatataattatagaacatcatcacttgaaactctttctttaaaaaaaaatttatcaagggttttgagagttttctctccagggtttgaatttgctatcgccagtggtgttcttctgcctctccgaccatggctccccagatcctatatgggtttggttgtggctgaaagttctaatatctccgaaagctaagtaattaaacttaaatggatatcttgaagaattaagactaggaagctaaatcaatgaacatcagatttacaagcttcctctgcattagaaatacattccaatcgagtagtgcttgggtccccaagaacatccactataaaatcgactataaaatcaattcaattacatacacgagctctaattttacaaatcaaactatataatttgaaatgactttacacgatgttacctaattcttgaacaaaatcatgacaacagatctaagcacacttagatccaagaagacaagctctccttgcttccaccaagctgaaattcgtttagcagtttagtttgaactctccgcagacattgtagattcgaactccttcttcaacctcttgaagatttaatgaattaccatctactacaaataacaacaaaaaagaaacacaaaataaatattttgccctagcagagcaagaatcataagacgactctactaaagatgagagttagttagaaaaagtaacatgagcacattatataccaagttgtagaaaaactgattcagttaactaactcaacagctcaagccagctggcaccgactcacacttgaataaaatatataaaagctaaaaagctgacatggcatacaataaaatataagagactaagtagatgcaactaagaccaacttagatgatcaattcaaaggaccaagacagcaaccaagaaaaacaaaaacctaaatagttaaacaaccacatattttgccatacagaaaacattgctcttacattggccatagttgggggcttgctattaggatgtttgaagaaggtttctgatggagatcaatgtttggctttagtttttaggggttctgtttcatggtaattgggatcgggattgaccggatctggtgtagggttggtgttggtggatagtctatgcctgatgattgtgacggtgtctcaaaatctgtggtggcggtgttttgttttccttttaatcttcttcaatttttttattttcctttttcatttttaagatggttttttttttttaaattttaataatggtgtgtttacatttgatctccaatcctttatgaatttggatacacatgttatttcggtttttttcttggtgtgttttgacaccttatttatggttcatcgacatttaatatcgggaattttgaataggatatgtcgaacccacaaggatagattattaaatttcactaattattatactttttagttttatgctttaattaaagaattcaaagtaaataatgattgagaatgaaataataaaataattaaaaagtaaatagacaaacaataattttaataagaaagtaaagacctagagtatattgatttcgtattttaaactatgaatctcaatttaccgattatctcaatttattctataatttgtagtttcaaaaatcttaatgtaatttataaacctctctcaagtgatgatagttataacttaattaactaacaagatatctatattcaatgttaatcaattaagcaatannnnagcaatatgattctctttaaataaaactcatagaattacttcaatctcacccttttcccgtgtcatgtaattctatgtccaattttagattacttctctcaagtgtaaaacctaaaatctctatnntaattaatggtgatcaaacattaataattaacacaaaattacataaacaaataggaagaataaatatgagaataatctaaaaactttaattcataatttaaaatagttccatcaacactctagaaagattatttagttcataatcacaaacat

SEQ ID NO: 27857 - DNA, 2748 bp, Cannabis sativa
atcagcccgacagtaaaataaaagccacctagattaaagaataaagaattctaaccaaaaataaaactaacacagtacaatagtacaactggactttgattcacttttatttctcctcttgtagacaaaccataccggtggtctatcattaccccaaataaccttcaccttgtcctcaaggtggaaggaaattgctcactaatggtgcgataatccttccatgtggcctcaagatcaaataaagtcttccattgatgaggacttcactagcaatagggtctgtcatgtttgacttatgctggagcacactttcaggtttaaccggcaactccaagtcagctgtaacttgggagacatgaaacactagatggatagtggcttgtttggcagcatgagcttgtaggctacttgaccaatgcgctgaatgacaagcaatgggccataaaatcgagtagaaagcttctcattggtgcgtcgaaccacaaatttcgggtggtagggacgaagtttgaggtaaacctaatctcccaccttaaactctacatggtgacacttggcatttgcatatttctgcatctcgagattccaacaaggaatccacatctaatacaatggatgtcccttttttgtatgggaggagagggggtggatctcgaccatatagagccttaagtggactgcattgaagtgaggagtggtaagaagtatatcaccaaaattctgaccacgcaagccatttggaccactgttttaggttctcatatgtaaaacattgaaggtaagtttcaaaacagtgattgatcacctcggtttggccatttgtttgagggtgataagttgtgcttcgctgaagagtggtgccttggaatttgaataggtgtttccaaaaattacttaagaaaatgtagtcacgatcagaaattatggaacgtggaaggccatgtaagcagacaatctcagtcatgaaactctcagtcactatggtggctgaagggatgtcggagtgtgatgaagtaagcatatttggataagtgattgaccacgaccagaatggtgttccaactgtccgacttaggtagaccctcgatgaaatccatggtaaggtcatcccaaacttgagttggcaacgaaatgggttgtgagagatcggttggtgtagtgttcagagacttatttcgttggtaaattgtacactggcacacacattattccacatcagccttcataccttcccaaaataatacaacctgcaccttcttgtatgtcttaagctctctggattgtcccccaatcggggtattaatccctgcaaaatctaacgaagaagggcagatttcttagtaataactaggtgattcttgtaatataaaaccccttgatgtaaagtgaacccatggtggatttgaccttgctgaatattagttgtgatcctagtcaaaaagggaccagcaatcatttccttttccaactccgaccaaagtgtccatttggcagtgaccaaaagcgattgtagctgatgctatggctgtcgagacaaggcatcagtgaccttgttgctggcaccacatttgtactcaaatcccatcaacttggaagcccacttttggtattctgaccctatgaccctttgttgcaacaagtattttaagctttgttagtctatccggactgtaaactttctgctgatagcttggatcccccttagaagaaatgaggtgacccaagtatgcaatctcatgctgtccaaaagcacattttttgaggttaacatggagctgttgcaaagaaagaatgctgaaaacctcatttagatggttcgcatgctcttgttgcgtcttgctataaatgagaatgtcatcaaagaagaacaatctaattttgttaagagaagtcgaaatatgtccttcatgagggattgaaaagtggctggagcgtttttcaatctaaagggcatgactaaaaatttggagtccccatcatgtgttcagaaagttgtcgtacacacatcttccttcttgacaagcatttgatgatatcctagttttaagtcaagtttattaaatatcacagccttaattcatcagtgacggggatggggtacttatctagtctggtggcttgattgagtgctcgataactacacaaaagcaccatgagccatccttcttcttcaccaagagcagaggactggaatgtgggctacaactgggttgggcgattccaaaagtaagcatgttttggactatcttctctatttcagctttttgataataggggtatcgataaggcctcgggcttatggggtctatttcgagttggaggaggatggcatgccatgagggtggtaaacccttaggtgggtcaaatatttcgacatgcttgtggagagtgtcttacaaataagatggacaattgggggtgtgtggagcctcttcccatgaatgcaactctatcaaaagtccactctgccgcccataacgacttgtacatggtatttggggagactatatttctgcctaaatatgggtctcctcttatcatgacttgctgattttcaattaggaacttcattgtttggagtttccaatctttgtgtgtcattcccaatgaggctcaccttgcagccccaaaataatgttgacactcccttactttaatggtagaaaatcctcccattttggaaatgaacatgtagttgtttgcataccccttatgtttttattaattctccatttcccatagtaactc

SEQ ID NO: 27858 - DNA, 3717 bp, Cannabis sativa
taaaataatttatatttgtaccaatagttcttattattttgttttaaatgaaaattattgtgcatacaataaattttgctttctattctattcattttctcttctaaatttgctcttccgcacccaagataatgttaatgaatgggtatactatcaacaatcatgctaccttgaaacttgaaagagtcaagtccaaccccaaactacttccaaatgatttggctaacacatacaaaatggccataaaagcaaatgatacctaaaaaccgaacaaatttttcagtgacagatggggaatgaattgtgatatcaagtatcaaccctcttcaggttccacaagttgtctacataatactctttatattttacacttgtatttagcactgtgatgaaaagtcactttctatacatctttcaaataaatgcctcagatggaagagctttcgcttgattctaattctagacttaggacatggcaggctaggctcttcacagtttaaatgtactctgcaatgcatagttgtcctcggctcaaaatatttgtgttccttgtaaaggccacagctatgtttccccaagattgatgaggtttgttgtaaaagagaccctattatccataagaagtttgatttattagttagtgttatgaattagtttagagtgatgaatcagttgccataaaaattaaaaacaatacgaaaaaaaaaaaaagatggacttgtacctagctgcaattgacgtttgacgacttcttttgtaataatcttcaactcaacatggctgttgtttttgggaaaccataagcagagacgaatactgaaaccaattcatccatctcagtcattatcattaagacaaacatcaatgaagctgctttctatagtttataacatcagtagaatttctgtaaccgacaaacctttgttccagctatgatggaaccattaagaggatgaactgcacatgaagtgacaggttccgacaatggaacaaaccggttttgcttggtgactccaggtgcattcccttcatcctccctacaacatcatgcagcaacagttacaacaggacaaaaactacaagaaagttgagtcataaaaatctcactctcttgaaacagcaagcgaaatgaacttttatccaaatacaaaacagaataatatgatatctaggaaaatgtatgggagttctagggtcgagctaataaacatgaaggggtcaaatttatataatggatgaaatcttttatcggtttacagaggtaaatgcaatatattcactctagacaagtaatattagaccacgaaaatcacattcaagtggaagaatgttctcacttaaaatccacatgacttggagaactgtggtctgggtagaaatctagtaaataaatgccaatgtcagaggatgatcccactgcatagatctgcaccagaaatatcaaagggaattttcagagactttactcagaaattgaaaaatggaaaacaaattctgacttgaatctcaaagaaataaatatacgtgtgaaccttatctgaaaagagttccggttctccaacttcaaatttttataataccaggcagcctaggtctaatactgctgaggtgtcttagtggctgaggggtcatatttgtcttagtcctaatactataaatataagtctagttcagctgtaaggaagatttctgttaaaaatgaagtctagaactcagggagacaccaagcatcttgaatagcttcgaaccaattctacagaatttcgctcaatatcaaataaaaatatcaatttctttcaggaactgagttggagatttggctatcatagttttaaactgatatattgattgttcatccattagctctaaactaagtggaaggaatcgaagaacaagtttgtcgattgaaaagatctttgtatggcttaagcaatcaactagacagtggatcggtttgatgattttgtaaccaaatctgatttcaaaaagagtgcttattataacagttgtgcgtatgttaggaatggaaaggctttcgtatatctatgacatgcttattgcaagcaaacatctatgtgaaattgacaagaataagaagttgttgaaaagggaatttgagatgaaggaccttggttcagcccagaattttcttggctgaaccaagtaaccgctaattatggattagtctatggtgctataactgataaaccagaggtggtgggatatgtaaattcagactatgcaggggatagatttgagatttgaggagatccaaaacaggctatatttttcaacctaatggctgcactataagctggaaggctaataaacaatccattgttgcacactatccacaacagaagcagaatacattgtctgcttaaagaagcattgtggctgaaagggatttcaagggagcttggtttgaattaacacttcgtgactattttatgttatagtcaaagtgctttgcatctaagtaagaatcaattctttcacaaaaggactaaacacagatacgttagactaaatttcatccaagacactatctcagaaggaagagtgaagctttctaaagtttcaacaggaggaaatcaatcagacacgctcaccaaatctctactaacagcaaagtttaggcacttcctaaacttgccacagatatcactgatcacggagtcttctttcttattgaaaattcagttagatgcattatagtcagggtggagaattgtgatatattgactgttaatacattagctcttataatatttattagtattaccattggctatgctataaagcctcttaaaaccgttaagatagttacagttcaagtacaggacctatgcctacaaatagcttccttattcattcggatagaagtgaacttgtgtgtacaaaatttctaaaagagcaataaagattcagagagaggtttccctgtggatgtaaattggctgaagacaagctgaaccatgtattcctttagtttttttttttttttgaaactaggatccccgcctaaccctatgaccaggaaactatagcaattgctatgtaggtacccaagaaggacttgaacctcagaccttgtggaagcaaaccacatgcctgaacctttggactaccccctcttgggttattccttttgtgttttagtgtgtacgtgtgtttttgagtgttgtgaggttattgttctaggaggttatttgtataacataaacaaagtataaacatgaaaaagataaaaggtttacattctgcactatacatgaaacagtagacaaatattaagcaatgaaaattgaataaaagatctgcatactggttaaatgataataacaattaaaaagaaagggaaaaaagaaaaaaaaacaactgacggtccttactgaatttgtaggtagccatgatggttttcgcaaacaagatgaatcagccaaatttgactcatttctgcatctccaaattgaaacaattattagttcatgcaagacattagaagctaatggttatcaagatcgatataatacactaaatcgagttcaacttacagccaagctggaggagggcaatgaatatgtgtcacatcaaaattaaaggtgtccaaaacaccagacctacatttaaccaagatgtcactgccatatggtatcactcctggaaactcttttgataagcagataccatttaaatgtaagagcaaataaaaca

SEQ ID NO: 27859 - DNA, 5228 bp, Cannabis sativa
  modified_base (49)..(64): a, c, t, g, unknown or other
  modified_base (221)..(228): a, c, t, g, unknown or other
  modified_base (525)..(535): a, c, t, g, unknown or other
  modified_base (3294)..(3295): a, c, t, g, unknown or other
ttaagtctaattaataaatattttaaatggcaattttatttaataattnnnnnnnnnnnnnnnntaattagttttggcatttaagttgttgaattcagaaaatgacatttttgagaaaataagataaatagttgaaaaaatgacaaaattgcaaagtggggcccatatcaacggccgaccacttaataagcaatttaccatttattttttaattattttannnnnnnntaattctaacctaaccctaggtggattcctatatataggtagtgatggcctcaaagaaaaagaagatgctaacactttcctttagtcaaaaaatttcagtcatcttctctataccaatttcgaatcctactctctctctctctttctctcttcaattcgtaccctatagtgattagagtaagttcctacacacatcaagtggtacccaactatagtgtgtaaggctgtgaagaatccaaattcaaggaaaggagaattgggctcagatctttgtgatactctgctacagaaaggatnnnnnnnnnnnagatctgagcggaaggagccatttaattttgttgcaaccactataaggtttctcataccttttatgtgtttattttatattgttttagaagttcatgtttaggattttaaaaacatacttgttagtaaatttagagcctggtaaaatatattccaacacttcgaggggtagaaggcaagaaggcttgacgagaaccacctccggacgagaaccagagaatttcacttggtgcaccgacctagtgggttgttcctcgacattccctgtagtagcaacctcaatccctaaaggaaagacctcattccttgcctcgggagacttagcagcctcgattgtaagctggctcaaggattttttcttgtaggccttggtcttcgtccttttgggttccttgatggaatctgaggtctcatccgcttaaactaccctattcttggatctcttatcggcttgaggaggacctttaaacagattctccaagtccacgtccatatctgcgaagcaagaaaacctcattatcactaagttgaaatgaataagaatgtggaagataagaacagattcttcattacagtattcactaaactccctagatcctgtaatctgaaatatgtcatgagggtttagtgaatctaagtcccagcttgaatcttgttaacacagattttcgttaactatatttgagcctaagttgtgataaacttgcacagaaaattaaaaacaacaaagaaaagataagaagataaaggtttttacattgctttgctgttaaaattttgcactcgtccacgagtcaatcttattagatttttgatacaattctcaagccttttctgtaattattttttcgtcccctttaaagtgtaacttgcccctatttataataacataggagggtagttaattacatacttgactgatattttataataattatctcctgaagccgtgggatttgattacataccacgtaaaataaatgtgattaatatttgaaaatcacacagctgtgatatgtgcacttttactgggtcaatatggacgtgtattaaatcgtaccgttctggtatgcctagccaggaacatagcaacaatgaccttattagcacacgggagcatttccatgtctttctgtaagccttgtcgatgctgcgcttgaggacataatgcttcatctcaaggtcgcagtttttggaaacaaggtgaacttcagcagtcaacatcatttatatgtcagcttctatctgagggagctgtctcgacggagttatgaaccccattggaagatgtctggaactaattagtgaaggtatcatgagtgtgccttcctatagcaagatggttgcctcgctatcaattgtttggatttacctaactgttatacttagtatgtataatgtgtattgtacactaagtgtcttaccagccgttacgttttgtctcttaatgcgtagcgaggttgatacctcgctttgtacatttgaagtcgtatggtttctcgttaatgcttaaatcaacagtttgtataactttatctcgcgtaagaccatacagtcagcaagttgtaaatatactctgtcaatttccacattttatgagttattcactcttaaaatataattatcattacattcgttgattcgtattgccccagtttgacacgtgtcctcctctgacgtgctagcgaaatttcaagtataccaaatctatgtgactcgttctctccaacatggttccatgctgtttttcaatcctgtagaaagaactgttacaactaatttgaacgtgaaattgtgggtaccaactatcgaacctatggaagatgcgatctatgaggagagggttccaaatgaaaaaattataccgactatctcaagaggagactaaggtatcatattcagccctaagcactatgagcgaccacccacattgattacctcaggatcttccatctacccgaggacggactctctcgagatagtgtgtgcgagccacaaagtcgtcactttcctcttcttctagcacgacgacctttttccacgaggtatacttggatactttataatcacaagtatactcgtccaaagcaaggaggccaacgttctttaggttctactcgtttaccaggaaatctacagctcacaacccatatggcaggctcagtaaggttttgtgacgtttgactatctctgtggtaggagctggtctccgaggaatcactgaaaatagataaaaattcagtatgcaactttaaaaactacaaattgatatgaatgaatttgcgaggaaaggaagtgacgtatgattggaaaggccgtagtgttgattggagataaacccatcgcctagaagtagtgatctttaaaatttgtcttgttgggcaaactaactatgagcttgcagtcgccagtataggccccaagataatagaagccccccgcagcgttctttctcgcaggaacaactttgatagagtaaaattgggctatctccagaggagtaggacactcccagcctaagatgtaatacagaaccttgaggctcacaaggatcctgtatggtaggattcagctagaattgggcaaccccgaggtagttgcagtagtccttaatgtcgcaagactgtaggatgccaccaatgtaggccccaatagacctaacctttgtctcgataaatatagttatgatgattggggtcctcaatagacctaacctttcgataagttctgcctcgaaggtaacattggggtcctgagggnntttgatttgtggggcttaggagacatgatttcaaactcaaggtcacctggttcaaaagtaatagttttgttgggtaaaaacattggacctgcgagtggaacagaagataaactcatggccttaggccaggccgcttctcgcaaaaagcgacacttgcccttggaaatttcttccatgaatcgcctataacgactagcagtctcgttgaaccaaatgaagtaatggaatttaagacaaatcataagtctaataaaagcaaagggggaacgagatacttactgtatgaagtcgaaaagttggatgctggagacttctgcagatggagacgtgacggccagcgggataagttttttgagcaacgggagttgaaaagcaagtctgaataaatttgcaggaagagtgtcaaagatagggatggcatgcacgaattcaaaaagctcgagtagaagtttcacaaagctcaagttttttggagaagatgaaaatggtagaaagtttgatttttaccgttttatactctatatttttcaaccatcagatcataatatggaagatctaattgatgaaaacagaagagaaatggaaaagacagcccattaatgcaattaatgtgtattggaaccataaaactgccaaaatcaaagacatgcattttttcaaaagggattatgacaaaattaccctctgtaatcatttaaaaagcactttttatcaaaaagaattttttagggggcaattgttatacccaaaattcggctggcacttcagaggaggacaaatgtcaacttgggagaatacaaatcaacaaatataatatcaattatatttgtagatgctaaaatggaataactcattaaatattgaactgacagagtatatttacaacttgttgactgtaaggtcttaaccgagataaagatatatgaactgttgtctcgtgtgttaacgagaaaccttacgacatcagtagtccaagacgagtcatcaacctagctacgcatgaagagacatagacgagacaagataaatgttaagacagttagcgtataatacacattatacaaactaagcatgacagccgaacgaatcaaaacaacgaatagcgaggcatccatcttgctataagaaggcacactcatggtaccttcactaatcagctccagacatttttcaatgagattcacagctccatcgagtcaactctctcagattgaagctaacattcaaatgatgttgactgctgaagttcaccttgtcaccaagaactgcgattgttagattgagcgttatgtcttcaatagcttaagcgacgagagttacattattaacctcgctaagacatctgaaaagctctggctcgctactagggttattattgctatgctcttggcgagatgacccataacaatacgctttacaacgtatttaatacacgtatggattaacctagtaaaaacggactaatcatagctttgtaacttacaattaataaccgcatttattttacgtgggatgtattcaaatcccacaatttcaagagattattgttgtaagatatcaatccaatttgtaactaactgccttcctatgtatctataaaaaggcacaggttacactgaaaaagggacgaaaaatttattgaaaaagggacgaaaaatttattggagaaaaagccctagaactgtatcagaaatctaataagattgactcgtggcctgtgcagaattttaactgcaaaaccatgtaaaaaattgtgttttttatttttctttactgctattattttctgtgcaaattcatcacgatttaggctttaatatagttaacaaaaatctgagttaacaaattttttttaggaatctagtctatttaaatatccatgataaatataattcctatatgcatctaagcccaatagcaaacatataggctc

SEQ ID NO: 27860 - DNA, 6011 bp, Cannabis sativa
  modified_base (5031)..(5032): a, c, t, g, unknown or other
cagatttcatgtgaatgtgatatcttataatgccaataaaggatgatatgaagttgggttactaccctatatcctagatgtattaaatattaatgttgtacctgaaaactgtggaaatgtcgataatatgatgttgtttgaactttaaaaaacaagccacttaacttacttggaggaatttcaaaattgtttccaaagtttgcatgtgatgctttattattctaagttataaagaaattatgcgagcaagtaataacagctatgatgatcagtcttggtgacacgcatgtagcttatcagcgtatggactttcctcttgtaaaactgagtgttgttggtggacgaccattttcttgtggaggagataggctgtttcggaaaaaactactgtctgcaaggtactctactttataaaagtggttttctcttgatgtctgacctttcttcagttatcactttacttttgtaacatttgataattatgaagttgatgggacccgagaactccaaactcaagaacacgataaaacagtagcaaatagcacaaacagcagcaataataggagtagaacagtagcaaaacaatggaagatgtgtattgaatgtatgagaaacccaattacaaagtatgggagcccttaggcccctttgatgcaaatagagatttactcaatacattgcatacccaccaatcctccttagtattctatatatactattgtaatctcactcaaacactcctcttaatacaataacccaaatacccttttatttaatatatgctagcacaccacactaatcctaggtcctaacagaagtacttgtgtttctcactctatatctagttatattagtatggttttctttatgtttacttgtcataacaaactcaaatatgcataattaagctgcatatcttgttggtaaagcaaactccttagttgacataattgagattgttgatgtgatatcttgctcggagaaacatgcagtggccgatgtttgaaaccctggtagccatttaaagtcaattatccgcttgaccatcaagaacacacttaatcagatttacttttcagatgcagtgcaatatttaaaaacaagaagggatggagcttcatggttgattaggttagtgaatatatggaatcaaggtgtgggaaagggtgaaaagttttgtaaattaaagagggaaatctaggtttcatgtcaacttgaacttgtatggtagtttctgtttgctttaggtagataacaggctttttattagttcatacagtacaatgatttgttcatgtctggaattgatgactgaatcatgcaaacaattcaattagaagatcaaattaagtagagatctggagtataggcctgtccttatatgatgattgagaaagtaataagaaagaaagaaagtaaaataataaagaaacaaggaaaatgaaagaagaaaataaaggtagattgcttggtaggagatataaagaaacaaaaaagaacagcaaacttggtttattttctttaatctcaaaacaaaaacaaagtaactattaattatgtgagatttttagcatcgtttgtaacttgtgtagacaaatttaacatccttatcactaacactccattttttttttcaattttaaaaaataatgataataataattgaagaaaaaatgggcttctgaatactacaataacatgttctttttttagggaagctacaacaatcctcccttccatattagtccttgttatattgtatttggataaaatcatccttgttgaggaatattatactagaaaaaatacagctattacaaaatatcaacaaattttggcaatcaaactctctagtatttagctctttattactcaatgtagctaaaatgtaactaaaagtattgaatattctcttagatatggtgttgaggacatggatagaagtgctaaaagaatctgcaaagcagctttgagtgcaccagaggatcatttagttatacttcttgcacataatggacccacaggtgcaaatttgcataaccaaaagatcattcctttcaaaaacatgatattggcattgctttacttgaaagaaaaaataatttatggttcacttcacactttatgtaggtcttggttctaattttgatgatatctgtggaaaggattgggtatacggaggcggcgaccatggtgatcaaggtatttttttaagttatgtgcttgttgttgttattaattagctctttgattgaaaatttgcttctgttgtgctaaagatgattattggaaagagacacagacacctgttgtgttatcagagagtaacattttatatcttctgttacagatttagaaaaggcattatcaatcataaaagagagcagcaaagtctgtgtcccgttaatagtgttcggtcacatgcataaagagctagcacatgggaaaggtcttcgaaaaatgatagtgattggttccgacgacacaatttacttgaatggagcggtggttcccagggttaaaacactgaacgataaacaagcaaccgatgttagcttgacaaaagatgaagctcatccttctttaccagaatctgaaggaaccaaacgagccttcactatagttgatattttagatggaagagttgataagattactgaaagttgggtctcagttgttggggacaagtccacattggaagaggaacatgagttatttaaaagaagtgcctgagattggatcctaagtttcaaccatgttgtattattatttgctgttacactagtgctaaatgcaccctcatccactgttcagattcacctcaataatatagttatgcaatgtaaaaactagaatagctgtgaagcccctctttggtgtatatttatgttgcaaagcattttcaatagatgaaaagtcataactcaacatacccaatttcccttttgcttggctactgtgaaagtttacattaagtttttcttttgagaaagtttacatgggctactgtgatatgattaaccagttgtcaattgggtacaatggttgagtcaagaatgtcatccatggcttttttttgtgcttgatgtgactaatcttttgatgaattgatgcccacccttttcccttttccaaaagatcaatggaccttaccttttatctttctttaatctttgaccctcattatttgtgaatcaaagttaaattacataatacatgtttatagctaagtgtttatccacatggaagtgatgatccacatcatagatttcctcaataatttatttatataatgctaaaattgacataaattgcattatattaaagatctttcttaaacttaaagcaactcttcaaccttaactgctggcattacatattcattttgagatttctgtcttttaatgtctttataagtctagcttttttttcccttttctttttccattgattgctgcaccaacttcttagcagtccatgagcattttttttgactcattctcttcctttggactaaagtttacactagacaacatggcaaaagataaaggaaattaaacataaagttacaaaattacccctataaacctctcctcaccaaaacaatttagaagtaaacctaatgccaatcttattctatgatataatgatgaactatttgatcaaatcaactactttgtaatttggattgtattcactactttttctttattggttttacaaacaacaaattatatcaacctctttatttccaagacattaattttatttccccatttttagttgtccaacacattataaaaccttatcttttaaatactcaagtttttgaaaaggaatcaaaattattactttacatcaatgacatgcatctttcatctaacacttgaggaataatctctttattcctttctattctagtgattcattcattaggtcccctattctaaataagaggtcccaaaacttttaagactagtcaatttagtttcttagatgatgaaataacaataaaacataaagaatagagatataaaatacaaatcatgctatcaaactatgcaactcatttaatatttctcaattagttaaaaagaaaaaaaaaccataccatttgtgttttctttttagtatcaaccaacaacaacaaccttcccattaatgtgtaccaaaaccaacaaatctaacaagattttattagttttgtattttgatgaaatcaatgtaacaaacaaatactcaaatagaggagaggaggagaggaaggagaattaaagaattagcccttttaagaaaatagtaattttctttggatcaaaatttggtatccaacagtaaatttataatattttaaataaaattgataaaaagggtcaaaggtattatagaagaggggacagttgtgagaattgactcaaaatctttaaaagaggcaaacccaactgtcatcttttggtaaaaacattggctgagcaaagcaaaaatgtagaatgtctgattcttctgacaaaattctgatacccctaatctcctacttctctctcttagacaatctaacaaagaccactctttgaccaaatcttagccctccattttctgatctctctctccctttttaagctaaagcactttaaatctacttattcttctttcatatttaggtagaagcatccccttgttttggataatggggacacacacctaaatacccaatttttttttgttttttctaaaatcccaaaaaaataaaaaacaaatctcactttctttcttataataacacatcactaatactataatacattatttttatataatttatattcatcaaaataaattatgagaaattgagagctttgttcttctccaggaagaggtccagctcatcccggttagatcggatctattgttcagccacttttcttttcttcctttaatttcatctgacgccactagtttttccctttctatcatcccaagtttttttttttccttttttatttttattttaattatatatataaataaatnnaataaaataaaaaataattaaaaagacccatgttttattcatcatcaaaatccattgtctgaccaagaaaaaaacaaaccgaaacgaacaaaaacagaaaaaccaaaaaaaaaatttaaaaaaacaaaaaattctttgttctattactacacacctctcttttaagattttcttttgtatatgcctgagattgaggttgaggttgagtcagagccatttttggttgttgggtaagttcgtatagctaaaaagataatatttttattaacaatggggaacgtgacggcgggtgtggctgcgaaattcgccttctttccgccggacccggcgacgtacgatgttttccgggaagaggatggaagattggtgttttccggtgtgacggcggataagaacgtggacgttcatttggttgagacgaaaggcgggaataagattgttgctactttctggaaacacccatttgcaaggtttactcttctttactcccatggcaacgccgctgacttgggtcagatgcatgagcttttcatcgagctcagggctcaccttcgggtcaacattatgaggtttttattctcttcttctcttcatttttcaagtttttgttctgaaaaatggtttgatttctgggattttctttttgggggcttagaagggatttggttgaattgccatgtttagagattttgatttttgtgattattattattataataataatttatcatattttttctgttttcaataattggaaatgggtttgtttattacatgtttttaagtattattatgagtattaattagttttgatgatgataataatacttaaatggtttaatgctttataacgtaattacaacattgttttgtattcaatatatcattctgattcaactttgaatttaaatcaataagataagaatgtttgatattattagctgtctttaacaaggactgcttgtaaggaagatatatt

SEQ ID NO: 27861 - DNA, 4159 bp, Cannabis sativa
aaaaatgaaaagaaaaaatagagctaaaattgactaaaaaatatataaaaaaaaaaccaaaaaaaaaaagctttttaaagttttaataagtaaaaaacgtaaaagagaaaaataaattaagaaaagtataaatgtaaaattttccttgtcaaattataaatgtaatgtttgaaaaataagttattatttagtgtaaattttccaaataaaaaaataaaaagaaaccttaaaatgtaaatgtaaaataaactaattaagctagaaataaaaacatgaaatatgggtttggataatagatttacaaaaagatgacctatcaaataccataaaaaatcttaaatgtgaaaaaatatcataaaagagtgacaagcttttaaatatcatatttttgtaactttttttataaaatctcatctttcatatatttgatgtcatcttcacaaataaaattctcatatatggaacatagaaatattgaaaattatcatttctatgaagagattacaccgttaccacacaagtcgtcgagttattgtttttcttttattttatttttttagaagggggaaaaatctcaaaagaaacgaaggataaaacaaaatttaaatttttaagaaccaaataggaaaaaaaggttaaaaaagaaaacaatttataatttaaactacaaccaaaagtataaaattgggaacttgatgttagtcaaaaagaaaaatcgatttgattagtgagatttggagtatagatctttcaataattgcttattttaaaacctgttgggtgatcaattttccttttttaaagaatgaaactgtgaaagggaatggaaccataggcccactaaagacatattggactgattgggcttgctttgagagagtttgaatctccattattattcagaatcctcttaaacttttttttattttattttattttttaatgtaaattacacattttataggttaaaaaagatgttttgttataaacaaaaatacaacaaaaaaaattaaaatatatgtgaaaaattatataaagtaaccggtcacccttttgcaggtaatcggttattctaaattttctttattccatctttttttttttaaaatttttctcgtagaataattctttcaaaaaaagttgtatttctgtaaactttgacagaaaataaggtgcatcttgtttttcgatagctcatcatgaaagaactcaacggttacgcgtgtttgacctaaggcaatttcaggatggggaccttcggagaagttttcccaggaaggtacgagtgaggacaaagcatggggaacactcgtgttggtctgtagggtcagtcgtcattccatgaagcagctaaagtgacatactcgtgtataaaatccatcattttatcagtgtgtaagggcctaatggaggcttaaagcagggacgttacaataagctaccataagataacttaaaaataactaattaattaattagatgtatacaaataagttttcaaggtaactaaaatgtatctcaaattatatgatataaaaatacagttttttttttttatatataaaagtaactaattggtttctaatcaacactatcagtaaccaaaaaattacttttaaaatgcatgaaaataaaaaataaaaaaccaaaaaatataagagatcgtcaaatttagctgacgtgacatgttagtaaaagtagtaatgttattattataaattagatgcaaaaatatatattattataaacttccctaaatcaattgggtaactatctattttctttacaaaatttagtaaaataaccaaatataataaattaaataataaaaattataaaaatatccttaccattgaaatgtattatacattattgttgcctagaattttttccaaaatacgtggtagcttaggagtaagttgtatggcactaagatccacgagtgtgagacacgtcaccctgattactttcgaagtggagtaatgacagattagcaattgtgctagcaaagaatcccgtctttcacgaaagaagcaaacacattgacactcgctatcattacataagagaatgcattagaagaaaagaagtagtagtagaatatgtcaaatctcaagatcaagcaacatatatttttaggaagccactcaagagagaaacattcatcaaactattaaacttgatttaatatagttaatttttagaattttcttgttgttactaatgtttctagactattcttatatttattaaagtgtctagagttttcttatttctttgagcactcttaaattttagaattatctttcacttgtgttaatagtggaaattatgtacaaaaataaggaagttagtcatttaataatatttttagattagttcatatagtcctataaatacagatgtatccaacagtgatagactcttgaagagtttttaattatattataaatgattgaagaatgaacttttatttctttttgtatattaagaaatattaaatgtatatagtttgttcattagtaaaaaagtcatgaagtactttatatgcatcaataattgtagatatatcatcatttgatattgaaattaagattatacaacaagaatggaacaaatatatgattttggagtatcattattgtcacaaataaaagtttataatatcattaatgtattatgttcatattacttaaaatttcaaactttagtatgaacaacattacataaacacatgcatgagtaatccaataagttagataaatattaatgctccagaaactcctcatccataatttaaaagtccacaaatagtctagaggagttatagtaaatatatggttatagataatatatatggtgatattttaaaagtaataaataatcttatgagatatattatcaccaaaataattgtggatcgtatgtgcatgagcaggagacatattcatgttgtactcttttttccttagattaggtttttgtctcactggattgattttttcctgactgacaacaagatttttttttaacgagacaacttccaaataattatgaatatgaaatatatatatatatatattgcactcttttttctttagcttaggttttgtctcactgagttttcctcacaagattttgaacgacataaccttaaatcatactaacatacttgcactttataaagcaaatagaaaatgtgtggaagtgagatctttgacataacatattcgggaaacatggattacactcaataaaagagtatcaacacagttctctatgaagataattctgtttgcatcgttcaactaaaaataaggtacattgaaggagatataattaaaatatattttaccaatttcttttatacatttcaagagaatgcataatagtgtccaacgtattcaatcaagtatcaatcttgcagatttattcacaaaatcattactaacattcgaaaagaatagttcacaagattagaattcggttgattagaagatatctatgaatgcctaaataaaaatgagttaattcatgttacactttttttttcctttgaccggatttttgtcctactagatgttttagcaaaatttttaatgagacagttattatgaacatctaattaaggtgttgtaaaatattatatatatgaatgtccaattcacttaaatctattttattaatagccattaattgtaattattttttctgtcattagtttcctaatatatgactcatatttattgattcagtctctttctctctctttctttttttctattttatttataaaaaatttataacatttatatatatcatagcaaataccatcacaaaaataaatgaaatttttacacaaaaaatataaaataccaattttattacatatatacaacaacacggtcacatcaacatttttaccttctctcttaattttattacacatatatcacttgcacatcaaatccatgcacctatcaacatcaatcaactctcaatcacttccctttctttttttttttttcatttgattttttatttctattcattttttttttgaatcaagtaaaatctatgcacctatcaaccatcaatcaacccgtaatcacttcttttttttttttctttttttttcatttgattttttatttctatt

SEQ ID NO: 27862 - DNA, 2169 bp, Cannabis sativa
atctaaaaagcatcgttaaaccaaaaattctgttatatagccacactttatatagaatagatatatatatatacatatatatttaaaaaaaaattggagtacataaaaggagagaaattttcttttagaaacaaccaatcaaatttaaagaaaaacacatgataaaaaaaaggtaagaaaatgcatgcaagactaaaaacatgatatttcttttagaaaaaaaaaaagagcaaaaaaaagctcaaaaacagtgagatttttattttaaatatatatatatatatatatataattgacattaaaaaaagattgatatttaaaaaaaaataaaattaagaaaggattgagatttatatacatactggtaaacgtagtcgcgcttcgcacgattatgtaaaagaataaatataaactttagttttatgatttaaaaattattggttgttttctatatttagttaaattataatttagatattatgtttctcaaaataaagtataatgatacactctttctaattggaatcaaatatttttactctaactttaaaactttctcttactaacctttaataacgactgtgatccaatttatgatctaattacactaaactaattcaattacaccgaaccaaataaattcaatctaattacaaaaaatggacatcaagttaccattggattggattgaatgtgagtagttggattgaatcgttttttgagaaaattttaaaatctaattaaaaatcgatctaatccaattacatgtaatacatattaaaaacaaatttccttattcatatataataagaaaaatatttaaattttatttttatttgttgtttattaaattttgataaacgtattacacctaactaaaaaaatccttaaaaaaccctaaaaactcatgtatagtttagtttttatgtattttgtttagttaacattaaaattcaaacgttgaatagaaataatatttatgacgtttatccatagtctaaactatgttttcttttactaaggtgtcaaatagccaaataaattatgaataaattaaattactataataattctagttaaaaataatttatatacctaagaattttgattttgatattttttttagctaattatgaatattattattcttatttaaatcattataatattttaaggagtattattattctaataaaaaatttatattaataaattattataattttaattatttaatgtaaataataatattatgtatattaaataaaaattgcaataaaaactgtaggaaaaaaattacaataaaaaattctaagataatacttttcatataaaaataataactaaaagattattttttattattcaaagttaaaaaatacaaaaatgttattgcattcacttaaaaaaaaaatacaactattgggcgatattaattttatcaatcacccacataaaaaataatacttattttgagacaagttaaagtgaaagattagatatctatatataacctagaagtataaactcactatatagtttctaaatcatgtgagactttttcaaaaatactcaactattattaaaattatagagattgttgaaaaagagaaaatgaaatgaaagaattaaaaattctacaaattaaaaaacatggattattagaatgagtggataccacatggcctctttatgattctgctttatagatttatatagatatttatataattgagtttttttttttaaaaaaaaaaaataatttttcaaatatagtacaatttttacatctattattggagatgttcttacaaatttatatataattaaaaaaaaattctaatcaaagttaattaatatatgattatatgtacatattaataataaaaatgttaagggcacattaaggttttaagcactacaaagttaacatattgttattggtacatttcacggttcttacaaattttaatttaataaatgatttagaaaaatagatatagtattgagcatcttaaggtgtcatataaaaataataatataaaaaatcattaaaaaaatagtacaaagatttcataaaatattaaaaaaaaaaacctaaaagaaaagtacaaatatatgtacatattaagaacaaaaaatttaaggggcatattaaggtgtcaactg

SEQ ID NO: 27863 - DNA, 2034 bp, Cannabis sativa
ttcatctttagcagcatagctactctcgccgccgccgccgccgccgccaccatcaccattttcttctccatcaccgccaccattttgtccatgatcatcttcatcaccatcaccgttttctcctccagcatctccgccattaaaactattttgttcatcatcatctccgtcaccatcaccaccatcaccgttttctcctccaccataatttgcgccattactattattttgtccgctatcattttcgttaccatcaccattttcttctctactttcatctctgccaccaccattattatttcctccattatcaccatccccgccacgattttctcctccaaaatcatctccattaatagtaccaccaccattctcatctcgaatagcaccaccaccttgttcgactataattttgcatccatcaatattttttgttacacttctgttgcggtccgaacaatcactaccaatactatcaaagagagctctagaggcataagtaccaataaccaaacccaataaaacaaacaaaacaacacttattattgtaactctatgagtactatgcatagccattttggaaatgaattgttacatgcaagagattaatggcatttataaatagggaaggaaaagtataatgaattaattagactaaaattaatcaagtgatcacgatggtttacttcatgacaaaatatattgaataaagaagacatgaagaacaaaatataagacacagttttataattaaaatattttgctcaacttgccatttacaacaagttgatgctcctttttttattattatattatcatttctctatatataaaatggattaattattgagatgttaacatatcttgaaattatgtgattctaagatatttaataacacattgtgaaaccatcttctaaagatttaaatttttacagcacaataattttggattttgtgttaggaaaaagttatggttaaatatcattttggatcatgtgttttgaaaaagttatcaattagactccttgttttgttaaatgataaaattgaccctatattttccaaaatagtaaaaataagccccgagtcatttttgaacaattttattttttaatataactaactttaagacaaaatctaacacgaacagatacaaaaagtgtaaccaattttgtcataacatctttagatcaaattatatattattaagttttattttgacaaaaaatcagttcagaatcctatttgtacaattttgaaaaatacggttggaccgtgtggaagccaagtttgcaataacaaaggcaagactgacacttggagagacagaagtgggctaaagctaaatctgataatgttcaaaagaatacatgccatttttgtcaacaccagtcaagagtatattgtgtatcatttactttttaacatggaaaaagtcagcatatgaaattcaaagaagacatctttgtcttcggctaatttagagatacatagaaattttttagtaatcttaggcaaatgaaggaggttatttaagatgagaagttgagtagaattggataaaatacaagattgaccaatgtgtttaatggacaaacttgtaccacctccaacataaaaattgtcctagacattgttttttactcgagtcaccaggttttgaacatttggggtgcaatggtttgtagcttcagaattagggtactagcttgtgtcctgactcgtagaaccttgaatcaagttggcctacggttgtgcttgtagtgaggatccttggccaaaacctataaagctcttatcaaattgatagaagcagtctattatagtgtgtccatgtaatgacaaagttggcattgagcacttaagggtggagatggaaatcgacctcctcttctagaaaaggatcttccatgagtaggagtgtaaatgagttgggtcggctctgatccaactatgatctgacctgatccagatcatgtaaggatctgtcccgcctcgcctcgctagattagatactcggatcggatcagat

SEQ ID NO: 27864 - DNA, 2990 bp, Cannabis sativa
gaaaagaaaaatgtatcacgccaaaatattctgccaacaccttaatataatttttttagttcattgtatcgactaggagataccttaattaatgggaaaaggcttaaatttatggtgtagaaacgtcacaacataatctgatggccggtgacggtgcgaagggttggactttaccacaagaaaataatattaagataaatattgatgcagcattatttgttgaggaaaattgttttaaacatgggattcaggaagtgtgtgcatgggcaggttgagcctcatcttgctgaagttataggaattaaaaaagctttaagttggattaaatctaaagtaggtctgcttggaatcagattgtcttgtaataatttaggcaatctgtagtgatgtcagatggtgatgttctttatttggcatggtcattgaagattgtcaaaaattaatgattgagttacaaaatgtgtttatttttttgttattaaacgatcagttaatttgatggctcataaagttgctagagcctcttttttcatcctgattgtaagtttagtttggggaatgctccaactgatttgttatctattttggtaactgagtttgaagtttaataaaatgatttttcattaaaaaaaataattaaaaatatatatttatctaaatactatcaagaaaactccattttaatgtcaattagatgtaattggtcacactttctatggtggtgaatagtactataaaattggcttatagtgttatccaagttgggacgtatgcttgaccaagagaatgaaagaacctcgtttgtcaaaatttctgaaaatgattgatgttaatacaccttttaattaacttataataattattgcatattttcaaacttgataatcataaatttacacaacttatttcatatttcttcttaattaattataggaagttagaaacacaatcaacaagcaatcatagctgtgaatttgactaacatatagatttacgtggacagccactcacaataggacattttatgattatttatatattcagttagagaaatgctaaaagaatcataattaagttgtatatataatatattgttattgctacaatttagtattgaatctcacttattttaacttaataaacaatataaaaaattattaattaaccttcgtaaagtgtcacttttgcatcatttagcaccttaaattgcttaataactaatacataattagtgattaaatcaatggaaatgtagactaggtgaggcggttgctttagatgaaaatattatgactgatcttaaactatttggagcttaaatctaaataaatttttcggacctttatacaaatatttttctggtaaaataatattaagtaagtgtttagttatttaacactgtttgaaaatataaatgtcattctataaaattcacttttattctataattcttattaagatattaaaatatcaatatgatataaaaatatgtaatcgcctcacttcaattttatttttaatttttccactagagtaaaatgaaggtaacatgacttagaaaaatatagttttagaccccaaatttccaaaaccaagttaccttccttccttgagtcttatataaattgataccaatatatgcttttcaagatatatttccagctcattttcacaccaaagattcaatccaatattattgtctttattatcctttctccattgagtaatacaccaactattttgtttaggaatattatataacaatttaaggaaataatgttcatttaaaaggtttaacaaacaagcatacataaattgttctatttatatattaattgttaacattagaatatgtggctttatatcatctaataagttatattttttaatgttgtaaaatcttgacaatcaagtgctatgaaattgaaaattattaaaattgtgaaagaatattttgagcgattaataacatttaatctagttataccatttcaacgaacgtaattttagggatataagaagaaaattaatatgatgatgataattttagttattagatgctgacttttttgtagtttctaaaaaaagaaaaggagagaaaaaatagaaaagaaaagagccaaaatgattgactgtcagagtccacatcttcatcaattggggcatttttgacccttagattacggggttggattggcttatctgttgatccttttctttggttaaggccaactctaaagagactttgtatatatagagtgggcttcttctccaaagagataccatataggggtgttcaaaaagtttataaactgtccaatttcaataaattgttcaaaattaaagagaaaaccgataaaaaatacaatctgaaataatacaataaaaattaaaactgtccagtaaatatattggttggtttgtaaattattttaaaccgttcaattaacctgaataaatcgaattaaattgatttatatattttaataaaaatatatataatatattacataaattacattcattagttaaactattttgtatttaaaatttagcttttatagtatttaatatgaaatttagattttataattaataatttttattgtattttgatattaaaattgaaatttaaaatctacactatattattacttttttatttttattttttatgaatatttttttaattattctatgttcactcaattatatttattttatgttaaaagttcttaaaattagtttagaatatagcattttttagcctaaaatataaataatgtatttttattttttaaaatctcattatttgaatactagaaactaacaataacaattattaaaagaataatgaagatcgatttggaaggattaacccgaccgaacagataaaattattgggtgggttaaactttttttaatttttaattgagcgggctacaattaaatatttgtaacccgatatttatattgagtttgtaaaaata

SEQ ID NO: 27865 - DNA, 3256 bp, Cannabis sativa
ttcgggtttgggtttgggtttagggagggaagagaaaagtgatgaggcgttggaaaaggaggatgggtttggaggtgactgtggttgtggttgatcttcttcttcatcatctgaagaagcatagttggctagtagagagtccatggaatgggaatatctctatctctgatgtgtttcctctcttattatcattattattattattattattaaaccagaatgaccaatcctaattcattaaccctaattccaaaatccaaattggactcaaatcacctctcaaatagtgtcttaagttttatttaaataattattttaatttggtgtctaataaaaatatcttttcttagtggatagatcaaaactttcagcatctctagaattttcttttatttttaaacttttggactcttccattaacgctgtgctagggtttcttcgaaagttttccatgattcagtcgttgtcgtcatcaccggctctcagcgttcttgtccgtccgggatttgcagctcctggtgacagttcttctctgttaatgcccaaccaaaggatgctggttcacgccgttaacagtctaccacatcagattgtcactgcagccatcattggctactttgccattacgaagctaagcctcctttgagcacgtacgcattacttccaccattactctctgtattatgtcacttctgccattaattttcattttcaaatccctaatctaaccactttcaatccatattgactttccccctttctcttcggaaccctctttcgaaaaatagaaattaattaccatcactcctctacacctccctggctaatcattactaccctaggattgatggcgtgggcttgaaagtaggatctcagctttatagaggcaattagcaagtaaaatgacaatttttctatcatgggatagctggactccgcgcccaacaaccttttgcttatgtaatacattggcagtcagttggacccttccctcttctcgtagtaaggtggcacttacagcatgaccaaacacttccaagtaaaggtataacgactctctttccactggttttgataaaattggagccgtagtcaaattttcctttagtttttggaaggcttctttgcattcccagtccattcaaattttttatttccgcgtaatatgttgaaaaatgagatgcacttttcgtagacttagaaacgaatctactgagggttgaaatccttctggtcaaactctatacatctatgtgcttcttgggagaaggcatgtcgacaaatcctttggtctttccaaattagcttcaatttcccacaagctggctgtgaaacccaaaaacttcccagaggagactccaaatgtgtatttcgctgggttaagtttcattacatacttccgaataactatgaagtattcctttaagttctcaccatgttctatagaagttttggatttaacgagcatatcatctacgtatacctccatgtttctcccaagttgatctttaaacattttatggaccaattgctgataggtagctccaacattcttcaattcgaatggcataaccacgtaatatacacacctttatccatttagaagcatgtgtgttctttgtctgtgatatgcatcttaatctgattatagccaaagtaggcatccataaagcttagcaatttgtatcctgacgtggcatccaccatttgatcgattcgcggaagggggaaacagtcttttgggaatactttgttgagatctttgaattcaatacacatcctccaggtgttgttgggctttggaactaagaccagattggccaaccacactaggtatagtgcttttctcaaaaactcaatggaagttaacatctcaagttctgcttttactgctttcactcttgtcgggtctaaaggtcttcttttttggcacactgggatggcattctcatcaatgttccgggcatggtaactaacatttggattgatccatttcatgtctgagtgactccactccatgatatctttgattcttttttaccgtcgccacaattttctctttcagcgttggatgtaagtttctccccactttgattgttttggttggatgtgtatcacaaatgttgacctcttctacatcatctagcagctctatcattttgtctatcccaactgctatttgagtaaagatcttcaggctttcacctggctactgtttgatgatggtgagggatctgacttccatatcatagtctcttgcaactataaactgtttctagaaggcagatcgtaactctttctagctataaattgatccaggagctatcctcttccactagtcttccatggacttggttagcgttaatgaaaaaaaaggcacttggcatcatcactcactcttgccactttcatcatcttgttatatttttacaggtgggtgctagcatccgtacgaccatcatataactctatttatgacattttgaaagttttaggtaatgtggctttcgtgaacagcctgatacacggttttgggtattcatcttctgaatctgagacggccccactttgcttccagatgagcttagtcaaagtaaaaatttgttcttcaaaccttttcgtgtcacaatctagatggtcgcgtccgtgaggctgatcatttaagtgattccttaggtcatttccacgtggcctttccttctctcctttagccttttcatactttgcgtcaaggcgcctttgaaggtctatagtggaccatctgtctttgatgaatttttcttctttcacaccatcttgattaacagaatcactaggttagtttttccttcccttaggcttaggtactttcgcaccaggcccttttggcgcaactttgccttttggagcaaaagcgtgtccaagcccagaggcatcagttgccttatgcatttgcgagggttggttgactagattcatgcctttttgaggaggtaagggagttgttttgttttaaggctcacccactttcttcttccccttatcctttgcaggagctgaggtttcgatgttggtagggttcgctctattgtctccatcaactagttccattgaaataacttcttcaaaatcttcttctaggttttcaaagttcgcatggaggcaggccattatcttttccatcttttgaagaaatcttcttgatgggttaacttctattgcgtctcaagcagttcattggatactcgaaccagatctggatcttgcttcataatga

SEQ ID NO: 27866 - DNA, 1536 bp, Cannabis sativa
taattttagtattaacatatcaaccgtacaaacgaagcagacaaaaaaaaaggtaaaatcaaagtataaggataatatttgtaatagattaccttaaatttgctttgtgcagttgaagtaacccttactacaatccctgcctcagcttgttgttcattgattgttacaccgaaaaaatgagcacactgcttttcaacctgaaacaagaaacaaataagaataaggaatacaaagaaagaatgtgaaatccatcatgatagcaaactaaacaagcacctttccgctgactgatgttccaattggaagtggtctgacagtaacagtcccactcatagcttcttcaagtacattagcagatattgtagtcttgatagggacaccaagcttgctatagacaaaaaaaaacgattgaaataatgttattatggaataatagccaaaccaatctatttatgaatcaaaataaatcacctgaacaaagctgcaaacattgtattgactgttccaagatttgacaagtcaatttccatgtccatgccttcagcatcaagagcctgaaagaattagagaataattatatgacaagcttttggtaacttcaattactaaagaacatgtgtgcagaaccaaattaatcctaatcaaacagttccttcctacaaattgtacatatgcccacataggcatgctttaataaatgatcatgtcagaggttagtatattagcaataatgatcatgttcatgttaagaaatgaaattcatacaaattaaatggtaaaagcacctcgaaacctgcactatcatactgtcttctcttctctggatcagctaatatgctataagaataagcaacctccttgaaaagttcagaagcttcaggattgctagcattcttgtctggatgatacctatccaagattcaagtaacaaacaattaaagaaataaaaataaaaggagccacaagaaaaagaattcaaacatctacacctactattttcactaattaaaattttctaattatattataaaaacaatagatgggaaaggtttcttcacacaatcaatcagctcaaaactatttcatcacctactttaatagagatttgaacatcacacatcctatgagtatttcttaagaaaaattcacacctattatcacactaatcaatcatattattttattttcataactctgaaatcagtaaaagaaaaaaaaaagtgttcttttcttttctttttctcacaatctgcaaaatttatttacaataattaactgaaatggtcctcatataagcaatgtttggcaaaccccatatctcaaaattaattcaaatcaatactaaaagagagagaaagagaatttttcatcaagaaaaagagcttacttgagagcaagctttctgtaagcagatttaatttcttgatcggttgaatccctcgaaactgagagtacttcatacgggtctcgtctatttgcaggggcagaagttccttccattttcgaacctaaccccatacactgcaatccctctct

SEQ ID NO: 27867 - DNA, 2133 bp, Cannabis sativa
ttttgatgatcatttcaacattgacttttatttttgcttgtgtgacttatcactttttaaatttgagtaggacaatttggaaaaaactatatatgtaccttatatttatttatatgtagcatccattagtaattttatatatttgcttgtattgcaactaaacaaattatttgtttctaatagctaaattgtctaatgtaaatgctcacaacttctaatgagtttttacattatttataaatttttgacatctctagagcgagaatatatattacattaaggagaattagatgtatgtagacttcaattgtatatatttatttgtttacatgtatttaatgtcaataaataatttactttctaattaatgtagtcttgcactagtggcgtaaggaatattcaacagcgtgatcaaggttatatttctggatatgctcctcgaactagtgagaaaagatcagaagtgtctgatgatgtcataaataatcgtgatagttacatatctggatatggttctagagaaattgagaaagagaaagaagtgtctaatgatttcataaacaaccatcaaggttacatatctggatatggttctggagctagagaggcagaggtgtctaatgatcttgtaaataatcatcaaggttacatagctggatatggtcctaaaactagtgaaaaagagcaaaaagtgcatggcgatgctataataaatcaacattacactaggcatcatggaaaagataaagagaagagtgaaggcccatgcacaactacaaataagaatgttcaagagactaatgaccatttatacataacaacatatggcaaagttgaacagaagaatgaacttccctacatgactcaatacgggaatgctaagcagacgaatgaaaagccttacatcacatcatatgggaaagttaagcagaagaatgaacttccctacatgactcaatacgggaatgctaaacagacgaatgaaaagccttacatcacatcatatgagaaagctgaacaaaagaatgaacttccctacatgactcaatacgggaatgctaagcagacgaatgaaaagccttacatcacatcatatgagaaagttgaacagaagaatgaacttccctacatgactcaatacgggaatgctaagcagacgaatgaaaagccttacatcacatcatatgggaaagctgaacagaataatgaacttccctacatgactcaatacgggaatgctaggcagacgaatgaaaagccttacatcacatcatatggaaaatttgaacagaagaatgaacttccctacatgactcaatatgggaatgctaagcagatgaatgaaaagccttacatcaagcatatccatgcagtttcatcatcaaataatgttggtgacaagcacattggccatggaaatgatatacaacagtcttcaatagatagtgatcgtgcaaaagcttttaaacaaggattttttaccccagatgacttgagtgcaaaaaaagtcatggccctcaattttcccatccaagaacattctcgcttcttaccgaaagaagtagctgactctataccgttttcactctcccaactccccaaccttctccaactcttctcaatcatagatggctcttctcaagccagagacatggaagaaaccatcaaagattgtagaattaaacccattgagagtgaggtcaagtcatgcgctacctctctggagtccatggttgaatttgttcacagtatccttggttctgaggttaatttcaatcttctatcaaccacccatccaacaatgtctaccgctcttacacaaaactacactatcttggaagttcctaaagaggttttagcccctaaggtggttgtttgtcatcctgtgccttatccttatgcaattttcctttgccaccactttgggacagagactaaggtttttcaagcatcgttaggtggcaagaatggaaataatgtagaagcagttgccatttgccacatggacacttctcactgggatcctactttcatcttatttcaactactcagagtcaagccaggtgtcacctccccaatatgtcattttctcccaacaaatcaccttgtttggataccatcaccactagtagc

SEQ ID NO: 27868 - DNA, 2487 bp, Cannabis sativa
ataataataataataaaaataaactggatattacagatgtacgttgctcggtttggtcgtattatactacattaatcatttaatccaatataaaaatcgggttacaaaaatttaagtgcaaccagttcaattaaaaaataataataacataatcaatgagttagtcgggttagccgggttaacccacccaaaccgaccactaatattgtttttattatctaaatttaatttttatattttaatcaattgtgatactgagacatgtatttatagattaaattcaaaatttaaatcaatcatcataatacaaacatactggtttaaattagaatgtgtaagtgtatggttgaggaagtaagaataagtgtatagggttccatttcaaaatcaattgataataacaggtgtaacccatgcatattatgtatagtatttagttacataataaaaacacatctatataaataaaactcctcttaacatgatcgggttagttcatgttgattaagtgaattgatattattttcaacccgtccaatataaatattaagcgagttacatctcgttgggcttttcaatttgtattttttattcagttatttcgatttagtttgggtgagtattcggattacgccgtgtaaaaaaattcattatgtagagccctaataagagcataattagtcaatttaattaattaattagtagaaatattatatgtagcaagagttatagtaatactgtacctctttaataactatataagcaatagttatagtagttaattaaagggtttttagagtcattaaagggactatcatcaataaacttttaattttacgatctctttctctcaaaacaattagtttctcataagaaattcaccaagaaattgcttaatttattttgaagaattcaaagactatattgtcatgacaagcaagcctctataaattaaaagttgaaataaagaatttggaaagagttattaaacttggtcaaaccaactttagatctctacttttctcttgtgattgttatttcataattactttattgactcaatctctcttaagtacaagcattctaaaaaaattgtaataccaaatttccataaaaaaaaaatgaaaatctcaaattaattgattaacttataattaatagactttatttagacttacattaatttttattgattttattttagagtttttatcacgaattttctactttttttcttttatattatgaggcagaattttttttaaaaatattgtatattttttatacgttgtattgtgtcaaattttcactgttattctactgctgtttttaattaatatgttttgttgttttatggttgttttataaaaaagtaatatttttgtaagaatttctgtgtggcagtaaaattataaatttttactcaaatctagtatttttgttttctttgttgtgttagcccatattatttgtgattaatagttatttggcttagcatatgtgtgtgtaaaatttagttgaagcaaaagtgtaggtttttctattaactgaagtctttgatgagtaggcccagtccaactaaggttacgtagctaagtctcatctctaactctataaatgcatattgtctcatcacaattgtatacattttgatataaataaaactgcttttgatttagagacctagaaaaaaaaattagttgatagttttacactattaaattgcagtaattgctatgggtcaattatgtatgtatacctaattcttatatattattattgtattctaaattatatacgaatttatattttgaaattatttatttaattttctaatacaactaaatactaatattaagtctcacacattttaatttaataaaaaatatataaaaaattactaactgctcacaatccgctacatcggtcaccttataaactatacaaaatataaattaaataagtaaatgttgtggttatcttgaatttttttcccttttttgttactatatgtatatgtatatgtatatagaaagaagactaaagagtaatgttttttttttcttggattgaatttaatttaattgaatggaccatatatatatataggggaccaaaattaaagcatgattttttataatggggttttcccacctaagtttaattctatgtctttagattatagtcattgtcaaccccacttgctttgcttctaataattgctagtacctataacaataaatatatatattagtttatatatatggtaataggtacaaattcggatcatcttctagaacattgtcccatatggattaaatgtaaaagtattgaatcatatataaaaatatgggctactccacttataactaattagttttgagctgagaccccatgattctcatcatcgtatcagagccatattcctagctagcgggctttcagtccacacctatctagatagttagccagccgcacgagatccag

SEQ ID NO: 27869 - DNA, 5415 bp, Cannabis sativa
tttttatttctcccttttggtttgtgttttggtaataaccatgaatccaaaagactttatttttttgaatggaatagtcatacttcactaaccaacagctgggacagcacatagagggaaaaaaaatacatatgcaaacaagaaaactttttatatcaaaagaaaaaaaaaaagaatgataaatatacattaaagtaaacaatcaaaatcctttacatttatttctatatataatagaacaggaaaaaaaagaccatttctgtttatcatggatccttggaactactacttactcctactcaacaatatgattatgcacagtgaaatgaacttaaatggaaaatattatcagttaatgattacccaccttccaaaaatgagcagaatgacataaagtcattaaggagacaccaaaatgagcttgtacagctgggacctcagagattgagctgcaataaaaacaaaagacacaaaacacaacaagaggatctcatattgaatataagagcaattgttataatcatttgtgagtaattagtttcaatgcacaaaatagtggtattttatttccagagtaagctgaaatttacaaaaggagggagagctagcttctgagggagtaactcagaagagagcaaaaatgtaccagctatttcgaaactcgataataaatattacaaattatttaggtagaatacatgtttgtcgatgaaagatgatgcaccagaatctggtttttgagtctgaatctgcaaaatccttcagtcttttttaaagtttcaaagacaaactcagatgacaactacttggtcctccttgatgggaaaaaacaaatgattgtacaccaccaaattagcatatggtattggcttacgttaagtagttttcaaagactgcacttatactgaaaaataatcagctatattacatgagggggagttggtgatttagtccttgtgagcccacaccagctaggatgaatatagcaagccaaaacaagtagaatatcaatagcttgatccaaatcagtttgcttcagttcaagtttgatctgtaactagcatcaaaaatcatcctcagggtaggtaagacaaagaagaagtataagtgagcttagtaatattatgtgtcaataacttagtcaagaatactctttaaggctcttcgacgaattggcagttcaagaacaatcaagaaataacatctctctgattctctgatatactgaacttcactttccatgagctttaaaatcttcctgcacatgctcagccctaacccctcctgagtcatccatctactgctgtggaacatgtcctgaaccagctcaggaggcaggccttccccggggcataccatccttttgccataagcaacatacaatttttgtaaatgttaatgatgataataagatacttattgttaccaatatgagactccaggacagattattagatgctattctgttttactctaattacatgtgctgctgaatgattagagctcataatttttacctgaattcagtatgaagtagagtctggtcatctggaccgttcttcaagctaggacgaacaagaatctccacccagccttcagctggcgcataacgcaccatattcagtaggaattcagccaatacctgttgaattctcacctgatcaccataaactgtcactgttttgatttcttctgggatatctcgaataagctgtagactcctttcccttagcagcatcattacttggctaacaacagcatttattacacttccaagtagaaattccgccttctcaagctccaatgaactgcttcaaaataaaattagaacatataagattgaggctctctctattgaaaaagtatctggaagctcgtatccccaaaagatgtaatcttacaactacagactcaacagcaacatatatatggtaatacaggaaagattttccccatctccctggaaaatgtgtggcaattgaatttacatttatcaacaaaagtaaaaagccaaagtaatcctctacttggatccaaacagtacaacaccataaattgacacaaagttctaacagatcagtgaatcacatatcagaaaaactagttaaggattccaaagatacatgtttgcgagaaattgataactataatgaagaacattgctttgtcaatagagaaacagataagttgagtagtaaaaaactaacccatgctcaatactatccagatcaacatctcttacgatcttcaacatttgcttctcgcaagcagcactagtctcaagaaactgcctttgatcttctgttaattcggttgattccaagagagagttagtgaagcggatgccatttaatggattttttatttcctgacaaatgtaagccaactctttcaccctagaaaaatctttcttctcctgttgcctctgaacttgaagagcttgctgcaactcaggactagcaatttgcaagaagcagaaagctccaatcacttgaccctccatattaactctcttatttgctgtcaagagaacttgtacgaatgttccatttcgatcgaagaatgaaaagggaaatttgtctgcatccttccctccaatggcactgtgcagtacaatcatgaactttgtcaaagtatccggacccttgagccgacaacaactgccaaagatctccccaaccaacattttcccattgacttcttctttagtccatccagtgagcttttccatagcagtattccattctgaacaacatgtgttatcatctgatgcaaatatgggaggaatcagaggattaggattgtgaactattgccttgtaatcgccttgtaatttaatgaatttgtccatgacaactttctgaccagtaacatcctgaccaacaaagcaaacaccaactatattgtttgtaaaatccctgctagagcaagcattaaccaccaaaaaaacaggatcattatggtgttccgggccaaatgttctcatctttatctctatattcttatcttcttttcctgcagaacaaaacattatgtgacaaaatgagcacaatgctgttctattgtacgaatgagagggagaccatttaatttataaaacaaatctgtcaaattgatataaagaattgaactttttttgatggctttttttggtaacataaaagtttacttccaagaaaaaagatcatcatataaagaattgaacttttagtagaaaacaatttatataaaagaatcttgactctactctattgtttgatataacctctggaattcagcaataaatgagacaaaagacaattaaactaccttctaaagcactgttaaggagttcttcaacagtttctttggattccttataaacaagatcatggaccaaagatctcccaatagcatcatctgtagagagtcctgtcaactctgcaaccttagcattccacccatttatacggccatcaacatcaacagcaagtataggagcagttgcagtctcaatcaacctaaccatttctcttgcaaccgagcttagttcatcaatcccgtgcaactccatatccccctcaacctgggcctttacaacagccttagaattacttgccttggcgtccctaaatgaatctcgcagaataagctgcaaagagtgaattgcatccatttctgcattctcccaaggtaaactacggcttttcaccacttccagaaacgccttgaaggaagaacgaggatgcatcctctgtccatcatccttgtcctcgggatggtgctttgcaccaccccatttgacctccttagcagtgtgggatctgaaccaaaaaagaaaatctttttttgtgatagaagcaacagccataccacaaacttcatcaccaagcattgctgcaccaggataccctgcatcagccaaactgtctgtactcaaaccagttgagtctccatggtgagccaacaaccattccacaatgtcctttatctgagcttcagttggggtaacaccaagtggataatacttcccttggtaatacagtgctgcaccatcacacttcaccaagtccataatgctaggactttgagtaacaatcccagtaggagaatcacgaagaagcatatcacacaataaagtttgagtcctaagaacatgtttttcagacaactgacaagccaattgcaactccatattcaactggagtccaaaagcttgcataagaaactcacaagcataccttaaagggaacggtatgctccgagctgaagtatgatgacaaacaacaagaccccaaagcttcatagtgttcctaccaccaccagcttcctcctcatttccattgatgataaccgccattaccaaagaagctatagaacccatattagccatgtattgagtgtgacaaccatgaggagctctaagagtagaaccaaccaagcaaagaggctgcattagtccttcatcttgaattacccgaaccaaagaggcattacaatcaacgatcattcgaactcgattctgcttgaacaagaacctggaagcctgaggaatatcagtggctggatagtgcagcccaatgtagggttccaaatcagccctcttgctctcagcaacaacctcaccatgttcatcttcatgaaacttgtaaaccatgaccctatcataaccagtaagctctctcacactcccaactacagtatcacacaacagcttgatatcaccaccgggaagagactgcaagtgagaaattgctcttacagcaagcttctgagactgtacggctccggctatggacagagcagggtcctctgtcctcgcgggttccaaatcaatcacaatcccaacatcgattcgatgaagaatcgcataaaagggctttccagaattcttggaatgaatccaaactgggttcaagagcgtgatttcccgagctcgaaaagccttctcgagcagtgaagagctcgaatgagaaaagagtgtacggatatcggttccgatagttaggatctcaggcttttcgaggcttggaactgattgaggggttagacccaacaaatctcgagcgttctcactgtaaccaatgatccgaaacgtggattcatcaacggccatcatacacccaaagggttggatatgaccacctctctggattctcgtcaagtaagctgtgatttccttctccgccggcactgagtttgaggtagtggttctaacggattttgagtagtcaaaagacttaccagactcaccggattgttcaaaggcggcatggagtcgagcatcaagggtatactgagcaatggctttgttcatggactctgtattttgagctcgtatattacttgtacctgaagactgagcttgttgttgttgttgttgctgagcataagctgctttaccaccagaagccattaatgggtcttcttcttctt

SEQ ID NO: 27870 - DNA, 2098 bp, Cannabis sativa
gggcataaaacccaacagttaatatcacctattacacaccgtgggagagacgactcacgagcaagaagcttcaagagattccaagtttgggacctacggcttcgattgggttctctatagaggcccgtaagtctccaattaacaccatctcccataactactctcatgtcaatattattgtgagaaaagcccaacaacgtaccatcattttccttcttccataacattgtaagaccccctctatgtcctttgaccttgaccacagagataccctcaaagcccaacaaatgacccacccattccactctatttttaccacacttggtcttacataaaatgacaaaattgggtttttttttttatgagaaataacctaattaaggaattgaacaatccattggttcccaagtccccaacaattctagcacaagatattcataatgcttggcaggcctgagaaacagaacccgtcccatataagtttgttagattaatgcccactttagataccgtaatgacatcatcatctccctcaatgatgttcttaccactaagcccaacactcccaggcccaaactgtccatagtccccgttcataggctgctcttccataagcccaacatcatacccttccacttgagttcttctccttttgactttagagataattaaagcaaaatttcctttagtaatcataacatttccttttaaagcatttactacaccatctattgattgtgttgtaatagcttgattagaataaacatgaattattgtattattgtccaaaaaaatcaactgaattcgtggccaattcttgtgatagctcctcgccattaatctgtaatcttccactagtcaacccagcctcagaacctgaaccaccatttgtggttgccggaagccaagggcccccaatagtgtgctgtcatatttgtggtgctgcttttaaagagagatcatagtgtttctgaattaattatggtggtgtatcaaacaaacactcacaaaaacgttccgagtggcctaagacaccacatataaagcaaaaatattggcaagtcctcatacttaaactgaaccaaacatgtttgcccattctttttctccaattgcatctttcttttcaaaagtttttcaatattaataggggtgcatactggaagatagtcttgccaaacaccagtgaagttgttaggatcagatttaacaaactttcccacataattgaccacattacaaatcgtgctctcggacataaatcctgaggacatatcgtggagttgaatccagatattgagtttattcagaaccacttggtgcgagtttattcctagtttcacacgctcaaagattaaagggacacgatcaaaggtccatggactcccttcaataactctttcaatgtcgatttcacgatagaattggaagagaaaatgatttggattcaattctttagcatacatacctctctcaggttgccaaaacgatgccattttatgttgcatggcctgaaagtctatgcttcttttagtgagaaacgaccaactaaacactatcgatcatctatatttttccttctccatcatcgatgagtaatcttctatcattctcatccataaagtcatttttttgcataatgcatatccatattttgatcagaaacattcacaaacgtcatgtgacaaataactagacgcaaacaaatagaacaaagacaaaacttattcaaactatgttaaaacacaagacgtatatgcatgtaatttattttattttacttcaaaaactcaaaataaaaaaataaaagaggagttctgaccaaattttttatttttatttttttgcaattgttatatctttttagaagttacaatttttcttaaaataatgaaaacagaaattaggactgagcataaaattcagaaaattgaaaaaattgttcaaatcaacttgtcaaacacggttggaattgaacaattaaaagaataagataattaaattttgaacaattaatttgtatagtttttttttttgagctgaaaatgcattttatattaaatgaacaatcataatacaaaagcatttaacgggggag

SEQ ID NO: 27871 - DNA, 2619 bp, Cannabis sativa
aaaataccgcctgacaatatttttataaaaaataacaaaagctagtgtaccatgtaaatttccctttattttattcatttcacttgtttttttctaggaaatagaaaaacatagttaataaggaattttagtatttggttaagttttatatttttaaataataaataattttaaatgaaaagaagaagaagagaaaaatatgtaggataagagaaatggaaagagaaaaaagaagtatagaatcaaaagtaggaaagaagtagacatatataagattatccaagggaacatatgtaaaattatgctttaacgaatttcaataacaataaactatattgggaacccattcaattacattgacatcaatcatatcatatcaaagtttaattaacattaatattagtcttcttacttatcaaaaaaatatacatctttattggactcaaccccacccccaccccacatttataaatattttcactttatttatatataaattgcctcttaaaattgtacataaatataaacccctcaagccctgaaattttattataaggttatataatgttgacaagaaaattataattcaactaaaagaatgtgcatacaaatataattattagtataggagtaacctatttttaaaatattatagattatttgaaagattattatttgtcatcaaagagttttaaaagaaaaaagaattgtgaaaaacaatattatttagcaacaatgaagattgtcatatcaccaaataatgtattcttttttgtaaaaactaatttaagtaagaaatgaacaacattattaatatatcatttagcacaatattaaaaggagatgtcaaattattcattacaaataatgatattcttagtaatagaccataaggtgtttaatactattattagtataattaaatattaattcttatataactgaagaaaataatttttaaaaaatatcactaactaatcataaaataatataagcattactaatatttaatagcaatgcagcatattattagtgccttgaatggctagaggttggagagaataaatctctctaattttttatatgttatctatataggtacctatatcattgaaaaaaatagcattttattgtaaaaattattattattattattattttgaaagaatagtgatatattaagatattattaaccattggattctcctgattgacctaatcctaatgtgatatgtaaacttttaaaagtaagtatatgcattcgtaaatgcttctcccacttctctctacctctatttcaatgcatatatatatatatgcttttaccaagattcttatctttttccctacctttattttgttggtttcaagggatagaattaaactgttttttcagtttatatatattattacactttcactttctttaactttcaaaggatatatatagtatacaggtttcactttctttccttagtttaattatgtattttattttcaattaatagctactttaggaccagatttgtcaaactactcccttaactcaatattaattgattggtaataataattttctccattatagtgactagaagtaagtactaataaataaacttgaaaatggatctcatcatatgcaattaattatatgtcttccactaaaatcacaacaaacttattttgatgaaaaagaaaactctccacttttctattaattatataattgtgatttgtagataatgattataatgtaactatatataaaaaaataaaaaaaatagatcattacttgatttcatagccatattactcgatatttctagatgataaatttcgttttattaatacgaaataaagtaaatatcatcgacttgtacacgtaaattataaaactaaaattttaaagtttttatataaatttcggtctgtagtttttatttacaaaaatattaaaattataaaaatacatttttttagcaaaaaaataacaaaaaattaatttcacaacaattataaatcaatcagctataaaacaatcaaaaaatgacaactataatagaagtacaaagaaaactataaaacaattaaaaaaaacggttattatttttacaagatttattttcgtaaataaaaaatttcaaatagtaaaagtaaattttttttataaagtaaatttttttttttgtttgacaatgaacataaagtaaattttttttatgttaacgaatttttataatttttttaagtttttggtgtattatgttaattttaatttaatttaacataaaaaaatgattcaaatttgtaaaaaaaaaaaagttattgttatttttattttgaaacagtaaaaaaatgtattattaagaattttagttagaccgtattcttcattgattatttgggcctgatgtatgcaacttcaaccatgcttttgtggttggcccaaaattcttgtgttattatggaccttatttgaagcggaggcctggacctaatttggaaaatgtaaaatgacgaaagttataatttacatcgataaaaatcataaaataattttttttttttaaaaaagaaaaacataaaataatagatagaaaatgtaaaatcacctcatat

SEQ ID NO: 27872 - DNA, 2699 bp, Cannabis sativa
gtagtttcctatttcctagtctcctagctttgtatataaatatgtactattctatgaaatacacacataattcgattcactattttctacagggatgatgtctaaataggcctgatgtgaatctgatataggttcgatgccttttaatgtcctgatggttagtctgatattaagtctgatgccacttagaattttattttatatcccatgtccaatgggtctgatggttgtgtccgataggtttttgttgaaatttcttatacgggatctgatattggtttgatatgggtctgatggttgtgtccgggagttttttgttggaatttattatatggggtccgatataagttcaattgtgtctaatgcttgatagatttatggtttttttaaaaaaaaatttataaacgtcaaccacaagttcaagaatgacgtcttcaagaatgacatttacacatgtgcctacatgtattcaaaaataaagtttcacagagaatttgagaagattttggcaataaatgttgcggttacattatatcttgaggaaattggatttgataaatgggctcggtcgtactttccaggggtacggtacaataaaatgacgagcaactgggctgagagcttcaacaacacaactaaggacgtaagaggctttctgatcactattttgtagaattcctaaggttcaaagtccagtagtggtttgctagcaccagaaatggaggaggacttggcattgcagtttgaaaaatctcggtatttgaacattgacacatgtggaccttacatattgaatgtccaccctggaggatcagtggagactggtgccgtagtggacttgcaggaacaaacttgcacttgtggcttgttccaaatcatgaagttttcttgtcctcatgcatgtgttatagttcagtgacgaagtattagcatgtgtgcactatgctctccatattacacaacagaatattggaggagcacatatgaaggcacaattatgtcaatttgtgacgatgatgattggaaatcacctgatgacataaagaacatgacagttagggtgcatgttgagaagcaaccaatagggcgacccaagaagcaaaaagttagaggaattaaggcaaatttaaatgcttgtaatggttaaaggattgtgataaaatgaacctatagcaagtgtggtgacaaggggcacaacaaaaattcttgcacctatagagattaaaaatgactgttgaattttagtaattgtattgttatgtattgtagtgttacatattcttgttgaactcttgttggactttgttaaatattattatttgtggcatgagcatatttttatcaaaaaaaactacattttcaacatttttttcttgtaaaaaaatgactggcccgatgctagtcggatgtgagtccaatgatttcttgggttatgatggaactcaataaaagcatcggcatgcatgagactagcatcttcccccgggccagtcaataagtttttaaaaaagcaaaatgtaaccttactgtcatcatcggatgacatatcggaccacatatcgaacccactaaaaacctttgaattatgtatttgcaatctagcaaaaatagttctggttcgacgtatggaccgataggttttgatgtatatgacaatcagaccctattagtccatacatctagctagaatcggcccttttggaaaaaattataaagcaaggatctataaattagcatcggactctatcagtccatgcatcagtccagtaggctaaagaaaactttttaatgatttattcttttggttgtgttttttatccgatacttcataaaaaaataattaagataaattgctaagaacataatcaaaccaacaaaaaaaaccaagttacattgccataccaataaaaaaaactaagttacattgccattccaataaaaacgtatatatataaatatatattaaaaaaaattcatgttaagttttggtagaataaatgtacacatcactgctctttaagttgcttcatattgtcatcgtgtacattatcaaacagaaattgtagcatgctatgctcgatgtgctctattgtatacatcctgcaatcactacagtatgagactaaaaaacaattaagtaaaatattgaaaattaaatcaagttacttaataaaaattcacttgtaatgaaattaccttaatttcatctatcatacaatgttgcggtcgatgacggttgaggcaaaatgtctaatcttactctctaatgctgtcaactgaggcataaagatcatttcatgattctcaaatcaatgagtggatcaacaacgttgggaacaacttttctcacgcttccatgtatatcttcaattcaacatggagaatcgatccaagactcaagtcaaatacgcgctcaacagccaacaatccaagtctacctttaaaatcacccaatacttttggcggtcaaatatctaactcttcaagtattggacatcatcccctcaaatcaaatttaatataccatcaccccactcaatatactctataataatggtgtcttgcaaattttttttggttctttgtgacatttgagcttttttactctccttgatgtcaatgttgtttacgcctgacctgtagagcttttgtcccagttaattttgaatgaaatttccctattcaaaacaaataagaaa

SEQ ID NO: 27873 - DNA, 2573 bp, Cannabis sativa
tttttaaaaaaaaattattcaataaaaatatcataatatatataaaataataatatttaaattttttattaattataattttaatttgaccgtaacacttttaattttataattcttttcatttttttttttaaaatatcatacacttttgtattttttataataaaaataaaaatatagttttttgataactgcaaaaggtaacagtgttacaaaagtgactctttaagaaacgttaacacttttttaattttattatttaaaaaataaaaaaataatagaaatatattttttagagatatgtggattgagtaaaaaattaattatagaaatatatatttttttctagatattttcaatgagtttaaatttaaaatgcaatattgaaaaatacaaattaatacatgaggtaaaaaataagaaagatatttgaagtttaaattagaattgtaatattttcaaaaagaacaacactttcttctatataatcatatttaatattactaagcatgtaatgcatgttttagaatttattagagttactattacaaaattattaatttaaataataattataaaattaaacaaaatacaatttaattatattttttaaatatattaaattttatctaattttaaatttatttaaatatatatatatttaactatgttatccgcattttcgcaaacatgacatgtgggaattaattaggaaaggccaaggagtcattaagtcgccaaggccctcgctccgcgctctaggaagatagaggccccaacttcgcggacccagcctctatcaaagaagtcttcccgaatgcgggtcacgagagaaatgtccgcgagctagcgactcttgctgttttagaagacgggaccttttgctcccacgaaggatatgggcctcccattgaaatgcaccaatccggggcacacttttgacctgcggaagctcagcctacgcgtgttaggctacggacccaatggtggggcttttccttgtatgatgtcaaaggttgtcttctagaccacgctaccatacagagcacgtgtatccttgggtactgtgtcaaatgatccgacgactagatgtaagagtaattcaaatgagaatggccctagaatgacaggcgtcctaagcaccgccagtaccgccagtataatctgacatcggtaaagaccacatggaaaatatactacctacaaatccaatggtgggggtttatccttatgaagatccatcaacgacagtccatgcgaggggatcgaccaataaatactctcgaagacacacaaggcagggggactttgatttccaatttcgaagcttgacttctctcctttcctccattttggctcttcaccttaataaaagtaaagattgattctctgtgaaaaaacaacacattattactgtaataactccaccattattaactctagaatattcctactaagctttctcttcttcaagaggaacatggtggatcggagtaaaagtccatcctttttgtatttgtataaatagtcatcggccaaagagtctaataaaatggactcgtggactaaggatatttaacgcctaaaccacgtaaaatctattgtctataatcttgtcatttatgcatttattactttcttaagctctataattattcggttaccgaaaaactcagtaaaaattttgatactttcattgagagctaaaaaatagttcgttcaagaaaagaaggtagatttcttgatagcttatcgaggtccggccaaaggccagaaaggtgcagaaccgacatgttgcccataaagagactcgatgcctcaatctactcaaaaagagtgacaaggatgagtgcacgtagtcgtgaaacacgtgatgcactaatattttttcgtcagaagctcagatctggccagcgaactccccgagggcaaggtcgactaccgatgtccccaggctcagatccctcgtcgtgctgccatgcacatacggagtagtacgctcgggccagactaaggagctatgacttgatgcagttatgccaactaactcagaaagggtcatcgaatgtaacgactctatctagctagagactacagcgctggtgccgccatggaggtcggatttgttttttgacatccacttctcccgccttgtctctaggtggtgaagttgtttggaaacaaatcctggaatggcacatgctgagaggagaccatcaataccatcggtgtctgctaggttaccaatgaggcctggttatggtactgtttgtaggaataggccatttttagcatacttccctcagcgccatccctgtcgcctggtgtgattgcctccctggggttacataagaaggaagcaacttgagacattataaactagttagggagtccttgtgataagcttatcctgctggaagtttgagttctcgctttagtgaccctcaaatgtcactgcacttcactgaaggagatagactacccaagagatcgtaaaggtataaccatgcacctcctagactttccctaggcccaggagactcatacctacatgctctccaagtgtggaatat

SEQ ID NO: 27874 - DNA, 1904 bp, Cannabis sativa
ctaaacaataataatacaaactttaaaaaaaatatataattaaattttaaataagaaaaattattttaaagttataatttttggctaagaattttaaggaaacaactacatataattatttttattaactcaaaatttcgttaataataaggcctttttatgaatttaataaaataatttctataaatcttttgaagaataatcaataatataataataaacacaagatatatatttacgtggctttatagttaaatctacatagatcacaaatttgtcttatttcaaatatttttagttatatagtatagaatgaaaagaactacaaagaatcaaagattaatttattttaaagtgattatttgtttgaaagaaaactaagttcattaagacaaggaaaagtaactgggaattacagggggaattccctccccttgaaaaatacctgactcatggctagacaatctagcacttttggccaagccatccgcaacagcgttagagtttctatgaacaaaaaagaaactacaatccgaaattacatttaacaaatctaaaactaacagtgatacattaaggaatctccaatcaggagggggagagcgctgctccagggcattcacaaggaccctgcaatcagactgtatgtgaattcttgtccaggaattctgaactgctaattctagggcagaaagaatagcccgggtttctgcctccagagggcacgaagctgcacacgactccaatttatagatccaagaattagtagaacgattgatagcaaccactgcaaaacctccgaaaccatccttccaagatgaatcggtgaaaaggatgtggtctgcaatatcactttgcactaacaggttatcgaaaggaacataccaatctacactaagatcttcgacactacaatccgagtactctacaaaggcactgcaacttctttgataacacaattaacatcaaaactgctaccctttatccgaaccagattcctgcttctccaaatagattgaaacatacaacctatatagatgatgaactcttttcttaaagcagcagagagaggagatagcaacgcttcaacaaaatcaatcatggtgttatggttcatcaaatccaccctcactggaaaatgtcccgtataccagattgctttcacaaaagcacattccttgaacaaatgaatgctatcttctaggtcacggtcacaaaaacagcaaccaaactgtgtaatgacagaaattctagccacagtaggcagagcatcgttcaaaactttccacaacatcaaagagatcctcggatgaatcccaggttcccatatccatttccatatgtccttccttaaaccaaatttgtacccttgatcgagaacataggcatccttcacagaaaagttgccatgatttctcgctttccacaccaccctatctttatagccgccaggaattctagggatagtgacgattcttctccctaaatcttccccaaagatctgtaacaagagctcctcattccagttctgaccaatggaaacatcagctaatgatctagctgtgaatctctgagtcctcagactactcattaaatcatcaaattccaatgggttgagccacgggatccagggttgacgccagaagtcaatggactcgcccgaagcacaaatagccatagacccagcacgaaccaaatctctagttcccaggaaattcttccacagggccgaatcactatcctttggcttcaccctccaaaaattctcagtgctgcaatatttcttgagcagataagttacccatggtttatcagacctgcacgccaaaaaccaacccaacttggccaaaagagccttgttaatgtcttcaaaccttcttaaacccaaaccacccgaggctttt

SEQ ID NO: 27875 - DNA, 1638 bp, Cannabis sativa
cgactccactgacaattaaacaattatccaaaggcattagatagaaaatccaccacacaattattggacaaagtctcatcacaggctaatagtcatgaacaagcaaaacaagattttataaaaagcaagtatcgggtcatttttgaactcccagcagacacatcttgataagcttttacggttttttaacagtctaattcaatcttgaaattctgagatacgaacaatgcaaatgagtaacattggatatgtgcaaagatcagatgaaggaaaaaaaaaaagaatcagtgacacatttgatttctcttaatacttctctaatcagctttaaaccttaaattcacaattgcttctgtctgctaaatgacttttatggggaactgctctgccggtcctaaagaatattctgttttcatttgttgcttcttacgggtaaatcaatttatcttgcaaaactcataaatggtggaaatagagtaccaaacaaagaacaccaactctgcaactatactactaataaggatgtttaaagccttttgtaaaaagggatttctagagagatgttcttcaagaagtattattatttaaaagggtattgttttgaagtactaaaagaactgatggcatcgtcattctcttaaaaatatgttgatgctaaaccttcagatataattaaaagggtaaagtacagccaaaaatgatgacatcatttaatttttaaaaaatgctgacactaaaccttgtcacaacaactcaaggagtgaagcctacatgaataaacaacaaaacataacggtaaccagttctcacatcacatagcataagttggttatttttaaagtaaatattattttgtgtagcattttaaaaataaatatttaagcatgcataattgatcaattagttagaacaatcaaacccctagaagttcaaattaaagagcatggttatcggttataggcaaagcccagtaaggagaggaggtctcaagtatcctcccaatgtaaaagaaaaaaatcaagtaaaaaggctaattcaagtagttttaatgttacaaaatgattgatacgtagaacatttctcacagaatatgcaaaccatacaacataagaagaacagatgctatgtacttactgaaacgagcatattgttgctcgaacgatatgacacgaggtggaagaagtcctcgaagccctagccgatctctctcagtataaggaaacccagtatcctgctcttggaaacgaaagcaaaaatcccaagacattagttaaaaatcttactttgattccatcaagtacttatacaacattctctacttaatgaaacatcaattacttcaaaatttgaaaatgaaagaagaaaaagaaaattgtatatctgtatacagtacatttgtactttttcatctgattagagaatttgaagacatttattgattaatcagatacatcttgcttaagaaaacacagaatgaagactctttcatgagtgggagagagatcctttcatcttaccaaacctcaaatcaaccatacatacatacacacacgcacacaaaaactatagattacgaaaataaacagagcgaacataataacgaagaagaagaagaaaataagaaccttgttgaaccag

SEQ ID NO: 27876 - DNA, 1815 bp, Cannabis sativa
tatttttgaaaatagaaaataacacattttgatttaaaaaatttggccaaacgacccctatcagtttttaaatattattttatatttttaaaatttgaaaaaaattttaaagttatgaagccaaatagcctctttatatgtaagaaagagtaacatgatcactaagctgcttgaaatgggctgagaggcgagggtgcgccattaaggctcgacgagaagcgcttgggtcattggcacaacatttgtgctcgatcgatgacttttggaatgcatcatcattcaccatgcctagctaggcttttggattttccttttatttaaggtgtttatcaagattttttggttttagttttggattgttttttttagaggttttagaatggagtgagtttagggttcttgagttgacgatggtcatggattatgaacaagcataaaccagatttgaaatgattatttttttagttgctatttaattttcgattatatgtattaatggttggtttggtaattaaaatgtgtaataaaattttttgttattaagattaaatttttgttgagtgtttaattataaatttaaaaccttattattctttaattttttgtttttttgttttttttttttttgaataatgatgagttttattaaatcaaatcatctgaaactaaggatgcaattatcgtaggtaaaatattctcagaaaaattacaatcagcctcagaaagagaagatcgtgcaataacatgcgcaatcttatcagcatatatatatatgcgctatggtaagtagttgtggcttctaattttgaattttttttttttttaagaagtacatcaaacatcgattatacatgtaaatttcttattaaaattaatatatttaaaatattagctaacattttgatattacttatcaaataagataacaaaattacctcaatgatgataaccagctaataattaaaagaaagaaaaatgttaaaaggtacccttttcacggtgtcatactattattggtgtaactaagtatcggtttgatgtacgtaacttaaaaaaaaattgtttgagaatatcattaactaatcgtaaggtgtcacctataaaagatgttgaacaccactaatgtctaataacagtgcttttaacaaaggaaaaaaatcaaagaggtgcaattattttgattctattatattattataaaaacatatgtaaatataaagagacaaattattaagaagattgccaaaattgtgcccataatttatgatacatatggacccaaatcacccaacctagagcttgtactctcatccaaacttgttagaaacattgtcactctcacacttatttatatatgtacatacatatgagtattattacatattcatcatttttctcttcttatattttacttaatttcttcaattaattatatatatatttatatatatcgacatgaaaattgatcatgtggacttggtcggaagtattatttatttgtataagaaatattattgtaaaaattccaaagttaatccccactgaatatagcatctacattcgttgcttacctccatatcatatcattttaatttatttttttattttattttatttttttgaaaagtaggaaaaatttattaaaatgcacaaaaccaaaacaaatataagctcaatacaaaatagctaaggattagagacaagatagtaaatcaggccaccgaacctgagaagtgttaagagattaagtcagacgtgcaagaaaatgagtcatgttattttaagccattttacaatgagtaagagaaataaaag

SEQ ID NO: 27877 - DNA, 3732 bp, Cannabis sativa
tgaaaatgatacctgggttgcaaagacctcgaattctccacttccaacaacataaaagcaatctccttcacccccctgaaaaagatgaaaactaacaattgttaaagctttgcctaattactcatataaatcaaatttgctagaactggtggaacaccacattttgatgatataaccttcaaaatactacttacatttaaaggatatatgtaccactttaccgtcaacccataacagccaaacctccagtaaatgaaaaaaggtaaattcaaaatgcaaaaagagtaacctgtttaactacaacatccccaggctggacttcaactctttgcatgcaatccagcaaaacatgacactgagaatcagtaagctttctgaagagaaaatgatcgtgcaatgctcgctcaatgtgtgcctgtagtgacaaaaagacagttcaaagggaaagttgaaaagtaaacacaccaaacaagacacatacgtaccaaccttttattcatacaaagaaaataacatagaaatgaagttttacctcttcttcccaagtttttctatgggatggggatggaggaacccaaacttgcccattctctagagaactttcgattgcacgtagacgagcccttgataaatcatgtctaacacgttggttcttcgaattccagctaaaggttgaaggagattctgatcctgtaacctccacaacttgaggaacaggcggccgtaggacagcagcagaacttacagtctgacctccaccagtctgacagaaaaaagtggtgaaaacatattaatggtgaggcaaataaatttaaaactataagaaaaaacacactgcaaaaatcaatttctcttacttcagttagtccatcaatatgcacaacaatgattgtaatatcatctgtacgagtttcatactgtagccaaagccgataagattcagctacaattgcagcacaagcatcacgagggtctttatacttagcaacctggaaagacaagcccaatcataaatgacaactaaataccagttttgcagtttttagcatacatgtacaccaatgtagtgagcaacgctccatgatttttgaaagatctgacaagcgaatatcatgtcttgaatctaaaaatgattcaatagttgaaacaaaactacaatatcaaaatcaatatttgtttaaacttgtgtacaatacaggcattttttttgaaaaaaaaaccaattaaaagagtaccatgcaaccacggcaaaataaaacaagcttgaaaacattcgatcaagcaaactatacaaacttcataaattccaaatctgaattgcaagatagtgggaacagggtaccttaccatgtcaactacagtttggctagaaagaaactcaaacacgccatcacttgcaagcacaaagaaagggttgtctggtgtgagctccaaaaccacaatttcaggtgtggcaacaactccaattgactcagctatggaatcacctatacttctagtaaaagcagtaccaggatacatcccattcggtacccacaatctcggggggtcaccctcatcaccttcttcagtaccccaacattgtacatccggatttttcagcccttcaatctgatccaaagtaagaactctagcaccacaaagcttaaccctttccagctcatcctctcgaaatggtgtttgatcaatcgaaaggtcaacagcaaagaactcatccccacgcttctctgctataacagccctcgaatcacccgaattcgcaacataaatagtcttaccccttaccaataccgtaatagcagttgttccactcatggaatcatctatattatcagcgtgaagctgagtattcgtggtcagaaaagcagtatggcaagcctcaacagcatcaaattgaaacttattgtttctaagcaaattctcacacagctttcgtttcgcaaactgagaacactgagccccaaactctccatgcccatcaaacaccccaaagaaatggtcatctgggttggacccaaatggtgtgtagatgcaaaagctatcttggttagccttatcaagagcatcagggtaataccctctctgagataagtaagagtacctcaattcatagttccctgaaggaactttaacagttcgacacccttctggaggtagaaactgagacgaaacccttgagagccttgtgataccagcctcggaatctctaagctggttcaaacggtccccggcttcaccttcttcgctattagaagattcaggagagaaaacagcgatctcattggtcctcacattttgggtctgtttgattcttgcgtcccttggtgtacaaacctctcctatacaaaccctcgagtaaacacaccccattactgaaaattacgaactgagttcaattcaggttccaaatttggttcataattcatgagccgccccctccgagttcgaaactaaacactctttcaactttgctgaattgctctgcttcctcaacctttaacgatctccaacacaacaattcttggtaaattctctgaaacccaagtcaccacacacataaatatatatatgatacgatgaaattcactcgtgccttatcttcctccactactcaagaaaagagaaaaaaaggttaaaacatacaaatgctcacaaacccaaaacccatttaacagtttttaaattcagagagaatttgttatccatttttttaactgttagattttgcgaaaatgaattcgagagacgaaaacaacgtccctatcgatctgcggtagttcaaaaccgttacggataaaaaaggcgaaaattaagagaaactaaatcaaaacgcattaaatttaaaacccaaacaacatgaattaattaattaataatattaattataaaacattttatactttattattggcccaaaaaaaaacaacgaaggccaaaaaaaaatcgggtactagtaatgaatcttgaaaagtcaaataaaataaaccaaaacactcaattgaaagaagaagaagaagaagaagaagaaaagaatacccaattggcttaaacaagcataaatgaagaaacgaagacagagcagaagcagaagaagtttgatcaatgagagttgaaaatagtgagcagatgaagcgcgtgagccgggaaatggtgggaccggaggaccggtcgggtccggtccggtctggattggatgtagattttttttttttggttgaagtgaagtgttgtaagaggagacgtatctgtgcatgtgtggaggtgagagggtttgtttcggggctttttaaaggttaggcttttcatagggtcccactctcctcgcttacttgtttctcttcttttctttttagaacaacaataacactacgtttcctttaagcattacttcttcacttcattttaaccaaagaatttatcccttttcttccttttattttaagtgttatataattggaacttaaaacatataactatgaattacttatggtatgttgttctttgtaatatagcacattatcttttgctaaaccatatattgtgtggtattataattgaacattacatgttcaaaatatacaattaaaaagacaaataacaaaattttgatcgacttgaagatacaacccattgagaaataacctcaaaaagagaaaacaacaaatcacaaaaaccattgcagagcaaatgaaagagccaaaggacaaatgaccacgaaaaaccattgatcaa

SEQ ID NO: 27878 - DNA, 2537 bp, Cannabis sativa
ttttttttatgacccaacacatatgtatagttatgacccccaataaatttctaacatattctccattcaaacaatttttttcacacatcctttctaacaaaagttatatataactaataaataaataattgaaaattattagttaccaaattagatttaagtcataactatatatgtataagaattatattaaacataggtgactgaggaaattagtttaaagtcataattcccttatatcttttgttctgtctagttacattgttctgggaaaagtaatgtatattattgcattaaatttctagaacactggcagaacaaaaaaaaaacaaaatcaactgtattataataaagtaaagactttcatatatactccttgtccttgtacgcattgcaaacctcttcaatctccatttcgttttcagcattatcagctactaaactctcctccaaatcactaccacattcttcttcctcaacttccaaacaactgctctcattttcagaattgctccgaaccgagccattatcttcttcttcctccatgtctgattcatcatcaaaacattcgaagttcttccttttccctctgtaacctgtaaagctctgaactttctccttccacagaaccaaaggacctttctccttcaactctgtaccttcataagcctcagtcaagaacacactaaacctctttcctctctctgaaacatagaaaattccaaagtgctttaaaagaagtctcataagcttctgaggcataacaaactctcttcgaaaatgtgtaagatgatcagtagtaaccaatctcttctcaatggtgaagctaagcagctcgtgcataaccgcaatggccctcttgtcgaactcaggtgaaccggcctcaagtcctcttgcatcagcataaggagacaagtaagacctcttctgaaaatgtgctatctttcctccatatctataaactttcttatagtcaggtggaaacttcaaaggaaaagggagagaaagcattcccggggtgtgatcactgggatcagtaatccccattaccttcttctccagctctgttattgcccaagcaggattccaatcaacaagctccagaaactgagcaccttcaccatctttaacaagcttgaaattctgaggatacttgtgaacccaattggttcgaaaatcgataggccaaaatctctcctgaaatgggaaatcttatccaatgcaaggcgtttattgattgacatcattagtaatcgagtgacatgctcagcagccttgtcttcatgctccttgatcaatctctcctcctcctcaaccaaatcctcagctcttttcgtcatcccacaccacaaaaccccttttctgtccttgtaaagctcgaaaagtttaggcgatttttgaataaaatcagaaaccttatgaggctttggaagattaatctgcctcctgtactgttgtagagaccttacagggattaccatttcaggctcttgcttcagaacctccattaataaaagagctttaaaagctatcttccacttctctgtcactatttcaagatcatgaactctcttggtcttgcttcgatcttggacccgtttactagtggtcatgaatctgctctggtttccaaacaaagattctacgagccaagttcttcttaccaaagacatttgggaaaacccatcaacagaaaggctgtaaagtttcatgcttttcgttctgaactagtttttgaatccaatgtctaccaagtgtttgtgaaaatgccaaactgaagtattacatgtatatcgtaacagattgtggttctagacatcacaccttcttcctccctccactttcagtttccatggccagttacttgtgcggtttttggctgtcgttttcttccctccgccggcatagccaccgcttcactctctttgccttcccgctcaaatgcctccaatcttctcccttcgtttctagtctctctctatttcagtcacctatgtttaacacaatacttatatatagtagactgctttgaaattatgacaaaactaattttttttttttttttttgagagaaaatttccttacttataattttagattatttatttactagtctatatataattttggagaatttttaaaatttattttttttatgtattatttacaattttacggtttcagattcttgtttacaaaaacatgtgtaaaattttaaaaatatagtttacttaacaaaaaaaataagaaaataataaaaaatctaccttacaataattataaataaattataaaataattaaaaaaattaattttttatttttactgaaaaaatatttctataaataaagatatttaaaacctaaaaaaatttaggcatatttttataatttttttttttaattttttatctacttaattttttttttggtgattctacaatgaacctcttaaaaggaatgtactgatgcacccttaacttatttcggcatccagaaaacttttttagtctaattttatagctatttaagatatcc

SEQ ID NO: 27879 - DNA, 1391 bp, Cannabis sativa
aatatttatagttaaatttttttagtaaccattcatgagtaataaccattaagaagtattccatatttatatatatatatataaatatatatttcttttgaaacaaacacttaatcaatacaattgtttctttcaatctcttgttcactctgtttctctccctattctcttttctgttcttctcatatcgttacatggtatcggaactacacctatcgttcaacaatggagaattcaacagccaataccggaggagcatcaagattgaacaatgcttaggtgcacaacaatcatcaattccctctaccaaaatcataccctatttcaattaatcattcattgtccatcaagctcgaggaacacaactttctcacatggaaatatcaagtgcttgcatcgatcaaaggaagtcgtcttcaaaaatatcatgattctacccaattctctaccaccaattcccactgcagctcctactgccaactctcctacacaacacattgttgtccctactactacttttattgaaatccccatttattatgaaactataaccactactcccttgccagttaccaatgcttccactgctcatataccaatttccacatttacatacagataatgttgttaatacaacaccaccactatctgttcattcactgacaacaggacttaaagctagcataagaaaacccaaagttttgctagttgcttatggcccaaagtgtgatagtcagtagtcccgtgatccataaggggaaatagcgggtaagttatgcaatcccacattttctggggaaggtcaagtgtgatgattctgagactgtgtaggtaagggattacacagttgaagaggatttaaatggattgattggtactacccatatcaacaagttgcattttgtttttcggtagcccatcacgaaagaactccacggttaagcgtgcttgaccttggggtaattttcgggtggatgacctcttaggaagttttctcaggaaggtgcgagtggagtgaggacaaagcacgcggaaacacaacactcatgactcatgttggtttgtagggtcagtcatcagtccatgaaatagccagagtggtgtactcgtatataagagtcattattctatgagtgtaagggcccaatggaagcttgaagcggggacattacaaatggtattacagccttgacccagccgtaagcgtggtcgacgaggacgtcgaatcccgtaagggagttgattgtgacagtcagtagtcccgtgatccataagggaaaataccgagtaagctgtgcaatcccacattgcctggaaggtgtataggtgtgggactacacagctgaagagggtttaaatggattgattggtactacctatatcaacaaggt

SEQ ID NO: 27880 - DNA, 5329 bp, Cannabis sativa
tctttgtgaggagaagtgtgaaattactaggctatgcccatgaccacattttgtaggatattttaaataactataacgtacacaaatataaaaaatatttttatgtatgtcgaaacaagtagagagggtatcagtgtatcccttttaaatggatgcattatagaagcacctaaaacaatataactaattaaaaaaaattatcaatttaattagtcaccaaatttttaaaattttcataaaataaaatagatgcatttagcgattcttggttttcttaaggagaaaatgaagaagaaaatttttaattgggagagtcgatttctgtcaaaagctggaaaggaagtcttaataaaatctgtggctcaagcgctctcgagctatgctatgagtgttttcttgttaacaaaagaaatttgttctgagctcgaaggtatgatgtctaaattttggtgaaagtcccaatccaattcttctagcagaggtgttagctggtttagttggaatcgattgtgtcgccacaagaatgttggagggcttggctttcgtgatcttcaggattataatctttctttcttagcaaagcaaggctggaggttgctgacaagtggaaactctcttgtgagcaggatttatcaagctagatattatcctaatgaaagctttttatcagctacattaggaaaaaatccaagcttcctttggcatagtattttcgaagctcaagatttggttcggtctggggctagacaattgattgggaatggtcacaatattagtatcttgagagacccgtggcttccggactcaagcaatccgtatgttaccactaaccataactagtcaacagctgtaaatatacaaatttatatcaaatgtaatcttttcattaaacttatcaaaagacaatcttggcattaaaaatctttttgattagtttgattggcaataaaattaatgattagtattatttgcttcttttgtatatgaatcgaataacatcatttcaaagagtgaagcaccactctcatttttttgatagaaaatatacaataccaataattggagaattctgatttgcatgaagaggattgagaggcaaaacaaaaaattaagataattaaagtatatttatggttataataattagtcttcttaaaaattgatttaaattcgtaagatttagacttatgagtagagtggtagatagtccacatttgcatttgttttcaagatggtagattgggataacccaatccaaactatacatagcaaagtagcacatccataactcattgtttattgataaaataaaacaataatctcacttaaaaaggaagtgatgaactttattgatttacaaaacagagatttgaacaaactgctatgtactcgaatactctactgcactttcacgcttatttctatagtataatttacaagaaaatgatcaaacttggatagcaataagatctaagtgtactgaatactcatcttccactacttgcttatggcttcaaaaagggtgcagctgaaggacttcatttcataagtaaataatcctgccttctgcataatgacaggctcaccatctgttgagaaaaaccctgggaatggaagagccgtgtcaaccaatctttgccatactattccttcagctagcgtgggtagaaaaaccaactctgaatggtcagcagcattgaaggctacaaataaatcaccctttgaagaagaagaagaagaagatgtttggttcttcactttttcttcatcaactttcaaactcatggcaaggaatttgcaggttggttcttcccattttggcggagactggtcacttccatgccattcaatattttcttctttcaagaacttcctcttctgaagaaggtcacttctccggtgcctcaatgagctcagaaaagagataaactgtgtaacttgacagccaaaatctgttttcaatgcattccagtcaaatgattttctatcactataggcaatagaaccgccagcggtttgtccacactcatctcccatattaagaacaggaacacctaaagaaacatacaggataagaaggaaattgcggatttgtttaagccgagtttcaaggacaagcgtattggttgtaggaccttcttccccacaattccaacttaactctgaagctaactcatcatcactgaagctgacaaggtcgacaagatgaagtccagaatttctagtaacaaaattgaaagagaatgctggaccccgcccttttgaaaaaatgtccccactcccacaaagtcttgtggcaaggctgctaaggagttcttcacctcgcagaaagttcctaacatcataacagaatctcatgttcatttctgcccacctcttccaatgaggaaaaggtgttgtttctctttccaccataccacggggttcccagcagtctgctatgatcttggtctttgagagtagaggatcaaaagcaattgcttcaaccaaaggagggcgggataagtgctctccacgagacccttgcaatagagaagaagcatttatgaaacaaaaaccatcaatatgatactctgtcacccactggcgaagactgtccaatataatttgttgcacaataggaaaattacagtttaaagaagttaatggttcccgatcctccaacccattcaaataataggatgaatcatcaattccttgaagcgctccattatcagtagtatgagtgaaaactacttccagtagtacctcaattccattggcatgcaatttcttaaccatctccttcatcgaatttatcgcagatatagtgtcaccagtaggtccaaaaatattcataggtgaaaagaaatgacaaggaaaatatggcccccttttctcgtcaaatgggaaaataggttctaataaaactgcatttacacccagatctttaaaatgccccaactttttagtcaaaccagaaaaggtacctgctatgttgtgaagtagctgactagacttgtgatcagtaaaacgcttcacatttaatcgatacaccattagtttctccaatggtaagtttggatgcatatcatcagtccagtcaaaaccaggttccttggacaactgtccaagatactgtggcccagttccatgatcaccagaagcagaactcataatgatcttggcatatgggtccaaaattatgtgtgaagattccaacatatctttccttccctctagatgtgtccccttcagtcgataaccatagctcacaaaactatgagcattattgaatgaagcatgccaaacatcacctgatcgattgacatatgggtctagatcaagctccaaagcaggaatatcagacttagtgtcatcatagaagcacaaaaccacactttctgcatttctggaaaaaatggcaaaattcatggaaccatcatgcaaaaaggagagacccaaaggacttgggtagcctgaatcaaaaccaaggggaacacaaaactttgtcttcctatgacttcttatttctaagtctcttgaatcattaccaattgaagatctcaaaagaaaagagagatagcaggggatattctcagcctcaaattccatctctacaacaaacctgccaaaagaagtcttggaaaatggagtttcaatagctctttcatcaggggccgaagtattaaattctataggcatgaaattggatgaatcacctctaaatattccccaatatagaatcaaggtatcatcactattagacagttgtaaggatgaaacttcaatccgcacagcacaattaacacttttctttttgacaataactttcaccagcccatcaacttctgccctgaagagataagttgatgccttatctagttcttcagcttcagtctttgttgaaaatctttgcttaaatggaatagacatccgtgatgtagcatttacttccaaattagtattcctcgagaaatgatttctaaaatttggtatgctttgcccataaaatagaactttttctccatccatttttacaaaggtgttcataactgtgtccctacataatataacactggcattttgcagcttagatgatttaggagctccacagttcacacaaccataatatattgtagctgatgggaaaagacttgccattggctgtaagaaaacaaaaaaaaaaaattgtcaaattttgcaaatctccatgcttgaacaatttaagatgttgtattaattaatcattgcatttataaaaattaggacaaaaatttcctagtatatactatagaataatgcagctgagacagagatgctttatgtaaaattatgattgcaagtgacaatcaagcaacaatgtactaatcccagaaatcattatgatcccaaacatttttggaaaaattgatgaacaataataatcaatacttggttatttaacatatatcttacctaaacaataaatgcctatctaacataatttcttgtggcttaacagaataattatataaattcagttagttttaacaaaaacatactaacaataatgctgaagagatgcaaataataattaatatttactttttacacaacccattcatgcccccaaatatatatggcttgtaactataatccactgaaatataacacttaacattgtgtccttctgttatactctgtttcattttacaattaaaattgtgacatggcagtacacgtcaaaattaatcgacaaattgaatggattttaataccccttgctattttaaggtaaattaatttataaaataaaaattaaattattttttcacttcaaaatctatagtcacaaacaatctcaaactcctctctcttcaacctttagccatggccacatcaattacactcttttaattttgactctctttttcccatcaaccaaacagtcctcctttttcccatttaaatcaaaacaagaaaggaaaaaaaaaaaaagaatgattaagctctttgccctaaagaccaattagaatttagggattcccaaaaaacagaaaagcgctaccagagagagagcacaaacacagattcatacaaattattcataagaaaatttcgatttcaatatcataaacaacaactaatttttggatgccatgtctatacaagaaacaatgacaataatttctcatattacacttttgaaacaagaaaaataccagatctataggtgagaagtcgatgttccaggcacaacaacgacgcacattcgacgacgacggtgataggccttagagtttggacgcacgaacgtcatcgatttcacctcctctgcgtctcattctctccctgaaactctcaaact

SEQ ID NO: 27881 - DNA, 1459 bp, Cannabis sativa
  modified_base (100)..(106): a, c, t, g, unknown or other
ttgctttattttattgcaatttaagttgtagcgccagttgcaatagatgtttttatgtaaaattctataaaaatacgaaaaataaaaaaaaaaaaaaatnnnnnnnaagtgtaaaaataaaaaaacttaattatattataccagtttaaaaattagtgaccaccagtatacgtagtcggtgcaaagtttcataagggcggcaaagttttaagtcaaggccaactatatgtagacggatccttaaaaaaaacaactatatatgtggacggcaaaaaattatgtctcaataatttggcccaattacatgagtatctatctatctatatatatatatatataatacatgtgatacatatatatttattataatgagactgcaataagttcaattggtatattcaagtggacttgacctttatattttcatgattgcatcaacacaattgtatattcttggtaacccttagtcggccactatattataacttcattttcccattcaacttgtagtaattagagatggacatttttttatgggaacagtactttgcgaagacccacttttaataagttgtagatttcttttttaaatggagaataggataaggatggaaattactttttgtcctcgaatattaaacgagacggaaatagaaatggggatgacactttccactctaatagagacacgtttagtattttattttatatttttaacaatattttataatttgtagtttatatttatatctttttttagtataattgtatcttttttataaattttaagttgtattttaaataataattaatgtgtaatattttaatttttttttatgtattttaatatttttatatatttgaatttttattataaattttattttttattaggtgattccctactatgtccgtccctgcctcaattaggagattccctaccctattcccaataaaattaaatggggatggaaattaaaatttttaacggaaataaaaacaggggaatatttttcgctaattttccgtcccgtgaaaatcactacttgcaattaacaatattttagacatttttttttatttttttaatgtttgaccaatattattttacatattaggtataggaatgagggcatgttttccacatatacaatctaattaaacttttaaatgcaaacaatcaaaattagtatttgaaatttgttgcaagttgagaaataattaatatattcaaaatataaattaaataaaaatgatttatttaagggatcattgtaaaatgttaggaagtggtgggaaataaattatgaaagagagcccactttgttgaataattatggcactatcttaatcgcagtgtggaattaattgatgcatgcatatttccgtaccaaagtcgttgtttgactattctcattagtggggtggggaatggatatacaagttttttttttttttt

SEQ ID NO: 27882 - DNA, 1331 bp, Cannabis sativa
aaaatccatgaaataaaaattaaacatatattatatatacaaataactaaatataaatcaaacaagaatatgtaaattaacgtagaatattattataatacatatgaaatactaatacgatacaatacaatacaacacaatctaacataatataatacaatacaatacggcataccaaacgagtccgatgttattatacatatgaaattaatatactttggtaacaaaaacatacatatgaaatgaatatgaatacaagatatatttatttaattttatttgaaagaagatagatttatatttaaatatacttttatgtgatgcacgggggcgagatgcgtcgctcatacgtacgtccgtgctgtaaccatcatcttcatatttgaacacctatttgctattatacttgtctatcatcagtacggttgtcgacaataaatgtatagtacgtatccacgtacgtacgacttcctatattagcctaaatttgagaaaatacattgttttgtactacatcaaactatagttgtttaacaccacttcagttcaggcttctaattgtttattggggtgcgtgtgtcgagtgtcctacaattgaatttagcttctataatttaaaaatatatttatcacactacaataataataataataataaaaaataaaaaaataaaataagtagttatttcactaaagttatctcaatgacactttaataacttaaattaatatgatataatttttttacagtctccaaccaaattgtaaaagtatttttattttagtagaagtttacagtatctcatattaataatagtaggcaccgtaaactaaggcatttttatttttttctttttaataattaaataatcctttttaaaaaaataaataattatataataatataatctattaatccaataatataataataaaaaaaaatatttttagtatttgtggttgaaattaaaaaaaaaaaattaatgttgagatagtatttttttagtgttgatttaacattaaatttaaatttctctattagagttgtcctaaatctttttgaatttctttcaattaatttcgtacacgatcaaataaataattaagctatttatatgggtaatttacgccaaacctatgttttaatttttaatttgtgtacagttaatttcctaattttttttaatagcactttgagaaaatttcactgcaaattacctatgtatatgtatattaatatctatccactgctttttcattttcccctggccacgtaggtgtaaaattaagacaaataatccttctacgatagatatatacaaatattcggt

SEQ ID NO: 27883 - DNA, 1884 bp, Cannabis sativa
tcgagatttcaatgatatgtttagctttcaagatagaaaaggcagaggtcaaataaatgctaaagatattattgatgctcaagattggttgccttaaggtcaggtagatgagtttagttgttcggggctcattttacgttgtctaaataacatgatgtgggggatttaattttttcatagcttgaccgtgcttttaaatgaagcatggttggataagttttcgaaggctgaagcttgtttcaaatgggagtatgttatcgatcatatttattgtgtgatcaaaaactacgaggttagtaaggtggccttcaagcctttaaagttctgcaaccactggaaaaactacaaaggctacaaggatgttgttttgatgagttggaatgctgatacaagttcgggaaaagggctaaaaatagttatgcagaaattgttacgagtcaaacatgtcttgaaaagatttcatcaggataaagttggagatgttgctctagattataggctggccaaagaagattacagcaggagacaagaggcggctacgtcaaatccccaagaccttttcctacagcaatctgtcaaaaagctcaacaattggtttctgtcttacagcaaagttatgctagtttccttaaacaggaaagtaagatcaattgggtgaattttaatgataaaaatacatgctattttcatgctattatgaggaaaaggagattggaaaataggattaccacttttcataaggatatggtaaactaaaagatgattacacagaggtagtgaagcactttttctctcattttcataattttatgggggaaacaagtttaccctcaaagggcattgatattgattgtttgcaacagcgcaatagattgaatttggagcaacaaatgagcttacttaggcccttaagtaagaatgatgttaaaaaggctctcgttagcattcattcaactaaaggtctagggttagatggctttggcttgggttttttcaagggaatttgggacaatattggtgatgaaatatcaagctcagtgcttggtttttttttcaggaaggtattcttccaatgtctcttaatgaaattgtgatatcttttgttcctaaagggctagatcccaagtcaggaggagatttttggctgatagctagttgtaatacactttacacgtgtatttcaacacttttatgctcaagactctcggaagtccttcctttcctcattcatagaaatcaaggggcttttataaagaatagacttcttgctcataacatgatgatcttccaagtcttctcaaagggtacacaaggaagaacatttcaataagatgtatcatgaagatagacttgagtaaagcctacgatacggttgattagtgttttgtggaggagctcctaaagcatctttgcttcccttcgagatttattggttggattctagtgtgcttgaaggggacaaactataatctccttatgaatgggaagatccaggataactttaaaggagctaaaggtcttcgtcaaggtgatccaatttctcctctgttatttgtgttgaatatcacaagattactgggccattaaactagtaagaaaggttttggcttccatccattatgtaaaagttgaagctcactagcctttgttttgcagatgacttagttttgttttgcgaaggaaacatcaaatctatgcagatcatccaggaagctttcaagtccttttgtgattcaattggccttgctgctaataaattaaaatcccacatctactctagaggagttaaaggaaactaaggctcagattctggaattgatgcaaatgaaagaggggttgtaacaccctaactatcttaggagtattacgtgatttttaaacgta

SEQ ID NO: 27884 - DNA, 1797 bp, Cannabis sativa
  modified_base (1500)..(1502): a, c, t, g, unknown or other
  modified_base (1600)..(1620): a, c, t, g, unknown or other
tcacaatgataactaactctgaatctataaattgctttgtcagtgcaaatggtgggttcaattctggtccaatgcattggttgcaaatgccctgttggttggttttacgtatgtactatggtgcctctgttcatagccgagccgcaactcctatctctatcccttggttgataaatcccatctcctccaatcatttctcttctctcagctaaacataaaagggccctttttttttcatgaatatggaatcattggtaagcttgcttagatatgctaagagcgcaagacgcagaagcaaatgggaatagattttgtcctatttagcatgtattatattcacttcactcctactactgttatattaatagttgggctgggctgattgattaattttgaattattagatacgaaaatacatcaaaccaattttgaggtatactcttaattgccaatcatttcgatcatgtataaattataagtaaatattttatcatgggcaaataggaacataaatacttaaaatttagaatttataagtagtataaacttaatgattttttttagcgttataaagtgctcgatgtttataaaattataattttatttcattttagtaagtacagactgggttttgaatttattaaaagaagaaaagaagatttgaatgtaattgatataatatgtttcgtttagacaatgatttaataatcatttgagctttaaaataatattagagtttgtatataagtttacaaacatattagatacttgctaaaaaaaattaaatttatgttaaactcaacttttggcacccttttattattttattctaacaaagtattttttttttagattactcgtggtctctgactctccaatatatatcctcgtttttattaatttcatataaacatatgcatttttgtatgtatttccaatggtcaaaatggattacatatatttatatgacttatgaactaccttttcactctcttcttcatgcttctatgatattcattcatgtcatggttgacttgtggagtatagtttacatatttttatatgaagggtcaaaataaaactcttgaaattgatttatgagctaatacatgcatgtctatgtattatgtatatacatcatggctgttggctatgtataatactatatgtttgcgaattagtggaagcatgaagtgtgactaaccaagcacgctcatgctcaaaggtattacccatatcatcacgcttgtaattttaaatacaacataaatatttcggttcgttaataaactatagggtattatataaggtattatttttttataaaaaaaattacttttttacgtttacagaattttttttatattattacgattttttatgaaaataaacacaaaaacaacaagaaaactacataaaaataacatgaaaaataatattaaaataacattaaaacaacaacaaaaaatagcatacatataataaaaaattaacaacaannnaacaagagtacaacataaaaaaccgtattttctgtaaataaaatcaaaataatcgtaaaattatttaaaattttgtgaaaccatatttttataatttnnnnnnnnnnnnnnnnnnnnntgtgaaataatccctataaaaattgcaataatacttgaagacgaaaaaacaacatttatactgtatgttaggggtgttcatcaaaccgcccaaaccgctcaaaccgcccgcaccgcaccacaccgcaaaaaaaatgcggtttgaaattctttgcggtgcggtagcggtttgaatttt

SEQ ID NO: 27885 - DNA, 2386 bp, Cannabis sativa
aatttagcaattaaatttattttttatattttagctcagtagtgatggtggaaaggggcctgggttcgaactttggacctctttgtttctggttttttatgtgtacaaagtgtgctagttgtaaacttgtatacagaaaaatattttgcacatgggctgtaaaccattcgagccaatcacgaactaaacaatttctatctattaatgttcttcagggtaagaaaatttgttgtatgcttgatttttgattgtatcatattcatgttattgttctttgtaggactctgtatactccttttctccgttatatggtttgtttattaattaaccccattttgttctttcacaaactcacacatacactttagagtttgattatgctgacggctagcttgttttgaaactagatgggttttcactgtattctggatgtaaactgctgtgtaaaataaatgtcaatcttattattcttcaatataattcactaatgttttcctcctctgtccactctttttctcaataaaggttttgtctgaagatttgcccattgctattgctaaaatatccttccccaagtcaatgcgctggaattctcaggtttgtacaatttagtttcaagttgcttagtgaaaacatgaatgttgaggggtaagtttcattttatatataattaagctaactacttgacttagctttcacatgcatatattacagggatggaggggtttgggtttgttttggtttcttgggctttaagtatcatcatgattttttggatgttgtacataactttttttgttcttctctattaatcaatttttaatattataaattataaaatattgaattaaatgcctattaggcattagctactactgatttgaggatacgaattcagaagctcaagaagtctattttgttgttagacaaattttagatgtcgtcattggtttgctaatgaaccagttgaagattacagggataaatagtttagattttaaaattcatttcgagaaagcattatgaaccagttgaagattacagggataaatagtttagatttcttggattttgtattaaagaagaagggttttggagtttgatggggaaactagataaatggctgttaaaggtttaaataaagaaggggaagataatctggagttgtggagtattggctattatgtgaacaatttgattgggaaaaaaatatgatcgtatcaagaaaaagagaactcgctagataatatgaaaaattataaaacattgggttactgttctgctcaagaatgtaaaagagtttgattccttctctccctccctctcttgttttttctttggctggtttgttgagagaagggaaggctttgttttatcttattggttttttagagttttggatcacgagtaatcattaattatcagtaaatttgttaacatagttggcaaatgcttatataatatatatatatatttatatatatatatatatccttgcaggtgaaatttgttttattttcagatattgaaggttttagaaatgcgtagattggtttccttttgctctactttaatttgataaataacaggtggcttatgtgtacttctgcttttatgtaggttatctttagcagacccattagatggatattggctctccatggagatgtagttgtgccgtttacatttgctggaattttaaggtaaaatatagctcaagattttatttatttatgcattttagttttccaacctttctttctctttttgtaatttttttttccatcacattgcacttgcaatgaatgctatctgtcaagtcattggtgatctttcttgtttgcttaattgagtctcacctcattgcgtgtgaagatgcattcaatctacaaaataattgcaggctaagcccattatggtaaatgcatagcagatttcacctcagttaaggaaacatgttgcggattcagtagtcatgaatattatttttgcttttgtgcttattacagagtattcacttgatctatcttatttcttattagttgacaatgttttgatgtttagtgttcaaatattgcttaactatgcatgcatgttgtctgttttggtgtatttatacatgaagatacaatgcttatctacaaatttgtttatgctataacagcgggaacaagtcctttggtcttcgcaactctccttctgctacatttatggtatgtgagaacttcccattatattcattttcttttactgtagtcattgacctgctgtttgtttttctctgatttcatattactccatttgtttcacattactttgacaaatggtaatatgaaactacagtattaagaacaatatcagtactcagccacctgtatgaaaattg

SEQ ID NO: 27886 - DNA, 1715 bp, Cannabis sativa
  modified_base (1510)..(1520): a, c, t, g, unknown or other
gtaagtacctcgtatctttatccattaaccttcgccctcccatcttctcgtccggacttacaaggacattaagatctcccatcaatagctatttagttagatcaatggttgttcataaaattgttaacacgtttcaaacctcgactaattcggatcaaatgaatttggtgatacaattttttagttcaatcacagttttagaattctcgttaatggttcaaatcaaactaatccatacaattcttttatacatacctaatatatatatatatacatatatatgattgaatatttgatatttaaaaataattttagatagaatatgtattgatattgatttaatattattaatttccataatattttttttttttacttttatttatatattatataaactttttcaaagtaaaaaaattaccaaaaaaaatgagctattacttaagaaaaaattagacaaattacgaaatataaactatagttttgaaccaaattaatttattcttaagtggattggtttggtttagcttgaacgtttaaggaattatttcacaaatacacaaaaataataaaaaaaagttacaaaaatacggttgtacggaattttaaatatttttacgatttttatttttattttatttacagaaaatgcggtcttttgatgtatttttatgttgtacacttgttaaatattgttgatttttttgttgttattttgatgttgtttggagttattttcctgaaacttttatgtagtttttttgttgttgttttcatgttgtttttatataacatcgtaaaaattgtaaaaaaaaaatctttgaacgtaaaaatgtaaaacaaattacaaagaaatagtgctttatgttattatcccaatatttaattggtttggtttggttttaaatttttaaatgagaaattttcaaaaagatacattttctttatgttttatttacaattttacggcttaaattttttagttacaaaaatacgtttgtaaagttttaaaattataaaaatacacttttcttagtaaaaagttaaaaaaataactaaaaattaacaagaaatcaacctcgcgacaactacaaatcagctataaataaactataaaacaaccaaaagaaaccctcaaaacaacttcatgacaactataaataaactataacaaataaaaaaaatagtttattatttttactgaagatgcatttttgtaaataaaaatatttaaagcgtaaaaataaaatttttaccatagtgacgtatttttgtaatttttttcttcaaatttttgatatattatgtaaacttttctttttgaaaatcataatactaatttggtcaaaatttgattttaaaaaattgaaaattcgaaccaaaccaattcataaatagccgtaagatcataattgactcatagaattggcaagctgggttaatttttataagggtaatttgcggcataacctctttaagtggtcaggtttttgcaactaacccccaattnnnnnnnnnnngtggtaaaacctcctaaactcgtgttctgttagcagtttaacatttctatctatttttagctgttaactgccttggtgaaatgtccacgagtacacagtgtacacgtggcacaattttattggtccacgtgaataaatatttaaagaaaaataaaaataaaaaaaaaattgtttttctttaaaattttaaaaaaa

SEQ ID NO: 27887 - DNA, 3877 bp, Cannabis sativa
aacgaggaaatgatatttggttgatctccagttcccaagtgataacgatcatcttgagaaggtcgatcgtaaaaggcgcgagataggccttgattagcaagaaatctagagttgtcagtgtaagccacatagcttggagttctaagaaagggattgttaccattaaagaacggtgtgggctgtggttgggtcgaagccgtggtggtgccgaaaaaaaaatgatgccagtgaagggaccgtttgaaccgaggttgatgtggagaaggaaaatgggggaagcattgtagtgtgaatttgtgaggttatggaggtcaatgccggagtagaggaggaaccaaatggtacagtggaatgttgttcaaccggtcccaaactggggagatcagagacgggatcagagccgattacaccagtaggggatggatcgaacatgaaggagggagcaccatgcagatccgacattgagttttcaagaggagaagtgacgggcggagcaacgttggagttgcagctgtcgacgatggaggttgtccatggtggacggtcgaagatggaagtggaagggaaggagcttcactgatggaggcgacgacaatggtgaaaattttggttcttggagccatgggagaagagagagaagtggtaatgaagaagggggcggctagggttttatgaagataaggtacatcactgataccattttagagagaaaagactcattattttcattagtattagccgaaattatgtggttgttggaaataatagttgtagggtttattttcacagcaaagtgtatatatatacatagtaaaagtaaggcctaatgggtcggtattgggccaagagaaaaggcttcttatttctaataaaaaattatactaaatatataaataaaaatataaaaagttattaattagtttatgtgtaataaaaaaaacaaaataaaaggaatatttattatgacctaaattttagtctatgttatattttgtaacaaatttattgtaaattttagtatttgttaaatttagacaatgttatatactcattagagtttaattttatgtatataggttacaaaatgtatatacactatatctatagcactctattaaatataatcattaaaatagtagttactttagaggagagatataccaaactttcatatctaaaaattatttgtatatatacttgtatggtagtttattgagttgttaattatgaaaatttattcttcttgattataatttaatgaaccaatttacatttagatatgtcaacactaattatatctaattttagggaattgcttgattaattcttctaaatgtaacagtctttaaattctattattattattttcttttcttttttggaaaatatttcaatcctattaagggcttagatttttctatttctttatataaagatagaaatttttcattttatattcttcttagttgttattcatcttcttttagtgtcaaagattgttttaaaatgtattgtatagtttaagatcgattaagtaaccaatttaattgagtatataaaatttaaaacatgatataattatttaagtattataatacaaacaaagattcatataccaaaattaagatagtgatgtagtctattataattctatatattttattattatcagaaattataattataatttataccatatataaatttagctagtataggcaattaattcagtataatttgtaatatataatgtgttacatattaattgtattcattatataaaaaaacaactatatttttttagataaaaatgcatattatattaaattcagagttgatcacaacaagcatttataggtggaggtattgcctccaaccaagtacaaatagagtccaccgaaagagcatactttgctaataaaagagcagcagttttagcagatctaaacacatgagaaatctgcactctagagaagttggacactgagagagaaatattcgccaacaggcaatggaattcagaattgaaagcgtgagaagactgtaatcctttaaccaccaaaagagagttggtctcaatatagagaattggtaaatgaagatctataagccattgcaggccatacattagaaccattgcttctataactttcggtttaaaggtacctagaaaaggcatcgacatagctgcaacaatatttccactgctgttacgaagaaccacacaaaaaccagagaagttattcatgatgttaaccgtagcatcagtgttcaatttcagcctcctgagggtgaattcatccaaggtaaatctttgttgacaacatgtagtgatgaagaggaactagcagtgttgatttcatggactatcacgtggcttttgtttcttgttatgcttttctttattcctctcactccaaatattcaatagtattgttacaaattgctctatatataagagagttcatgatgcagaaacttattgcgacaacttgttaagattcatatgccaagttatgtgattactaagagcaaagtcagagtctttccaaagatgtttgggacgggtacaaaaaaatagagcatgtggaatcgtttctttatcacggtgccataaagaaggaataggggaatccacaatgtgtcttgtatgtaaaatatcagccacaagcaagcactcttggatgactctccatagaaaaattttgacctttgatgggatatttagcaccaaaaatttcttccaccattgttgattttgtaatccactaactgatggttgttgttcctttacatgagtagccaaatagtagcgtattttaattgtatatgtgccattagattcataatgccagatttgttggtcatgagaggatgttaatgtcaaaggaatactctgaattttttgaacatctgaatcaaggaaaagagtttgcaatattggtagattccattgacgactatccataatcaaactagagaccttcatggtagtatcaatacctctgtagattaatgacttaaaaaatttgagaatccaggtagccacgaatctgatccacataaaatcttatgaccatcaccaactcgccatcttaaacccttagcaaagtaactcttttccccaaataattccttgccatgttagagaaggatacgatctatgaccaacatctaagaaagagttgttcttgaaatatattggcttgagtattcaactcagtagcaaagtaagattagagaaaatacgccaagttttcttggccaataaggcctgattaaagtgagcaaaactcttaaaacccaatcctcgtttgactttagaatggcagagggcgggtcaagttttccaattaattcttgagcctgaagattttgaaccccaccaaaacatattcatcataactttaatttgattggtaagggatttagagagacggaagcaactcattgcgtaagttagaatagattggccaacaactttaagtagaatttccttgccaccaactaaaaataattgctctcaccaagcagaaagatgattccaaagtttttctttaatcccctcaaataaattttttttgtctctgcctgagtaagatggaaggcccaggtaccgttcatggcacggctgaattgccataagaagtatttgttataaattggcttgaatggatgggagtgtatttggtgagaaggaccacacagattcttcaacattcaatttctgtcctgaagcacgacagtagcaatccaatgaattttttatggcagtggctaaacgtgaattagcacgccagaggaccacactatcatctgtaaaaaataaatgagaaactgacagagcgcctcctgaaacctttaaaccacttatttc

SEQ ID NO: 27888 - DNA, 2734 bp, Cannabis sativa
ttagaccaatagcaatattgacacgtaggagggtgcttggcaccactggtgcttatagcatttctcaaataaaaattgtacaacttttatttttattattaaagttgaaaattttaatgttacaaaaatcaacgtctacaaaacaacaaaagacagacttacttaaatgttacaaataaaataaaagattgttagtctctcttaaagagttttctcctatctacaagtaataatctcgctttaaatactactataatcaaattattcacataagaagttataaaaactttttgctaaaaaatacaattttgttgattccaccaagtatttcgctttaaattctagtttttttttcttcaatttcttatgtgcatttcatttgtgtttaatgcttataattgtttgatcactttttatttgtttatgatttttatgcaaaatttgaaaagtgagatgataaggccatactgaattacacagagatttcgatattgaacgaaagtaaatatagtctatgtagcaattaagatttttttttgtttaattcaaattatatatgtaatttaccacataagtgtaggagtttgtcatataatttagattctatatatcttaataagaatataaattgaattagttcattcactagctatcacatgaaattgaaataggagttaaattatattagaccataaaaagttaatacaattgacattaattacttaaactttgatcattgttatttgcccattattttattgatattgttttaatttaattttaaatcttcataaattcttttttttttggttacaagatagatctaacaatttaatcgtctagtacttaactacaatttttgtggaatctacttcactcttgtgagtctattacttgtaataatatgtattaaatttcacatagtacccgaccacatgataaaataattctttttaatacccctttaggagaacttggactatccatacaacttttaaagtggtttaagtctttagtatttatgaatttgtgtttgaccaactttgagttacctaaacatttttgagatacctgagccatgaaattgttcaacttgttaatcatgcaattttttatatcaaatgtccttatcaagatcgaagcatgaaacaaatgcatacatattttgttattttatatatttttttaatcaacacgcaatgacacagctagctaggaaaagtcttcaacatcttattgtaccatatatatcaacataatggacagaagggagattagtaaattattaatcaaaatcatcactttaatctagactaagttttattcaactcttctgagattttgggtcatgtaggattctttttatatatgaaatgttttctcatgtctttattgtattactataccacaagtcaaatagtcatgtgtcttattcattaataaatatttccctacttttcatttgaaataaataaatatatatattcctagtttttgaatcttataatcgaaaatcataaataactcggttcaaaaaacaaaaaaaatgtttgatgcagtatttgtgtaccaaatttaatcagagactgggccttcttagcaattcaaggctagctgtttggtattgtaattgaaaatctacttttatttctaccaaaaagaaaaaaaaattgttctgagaataatttgtagttttcatttttttttttttgaactttcttacgttacttcttttatcattgtcctcgtatcacttttctctcttcattttctatttctttatttttatgtcatcaatttagtttttctaattgtcatttctcaaaatcacatgatgatattaatgttataaatagagaagaattaaaataaaataaataaataaatgaagaacaatgggttgaatgataaaaagtttggactattagcaacccaggttgttgtcagttgtcactacttaattctaattttttcctttgaaaaatgcttcattaattagaaaagtactgccacataaggtgcagattccttaccagagaaaacacaaaatttctaagaacataaatgaaccaatagtttatcacatcacatgaactcaaaatttcgaaagaaaaaaaaaacacatatagattaataaatcttgaagttttactgaacaattaacaaaagtagaattttccattaaaaattacttacatatataatgtattgttagttttatatatatatattattttaaatataaagacaagcaatacgcaaccattttttaagaggaccatatatgcatataatcactgtcaaaagttcaacggtttgaattagttattttctaagacaaaataatatgacaaataggcatgcgtattaagatcagcttcactaatttctgacttttgcaacttaaaataatacaggttgagaaaacgttttttttttttgtttttgtttcttagccatatatttggttaattcatttaaccgctaattaattatataatcaaattaatctcttgctccgcttggtcatagcttgttgagaattatgggattccaactcaaaactaattgctaatgagtggagtagcccatgtttcttatatatggctcaatactttcacattttgttcgcttttttttttttttattttgcggctgggagttccatttgctcgcttattcttgttcgcggctgggagtaccattttgctcgcttgcggctggctaactcttt

SEQ ID NO: 27889 - DNA, 2324 bp, Cannabis sativa
caggttttattgtgttttggttgggcttaattgggctttttcatgcaaaattccaattaaagaggtttattctaattcgttgtctctagtcacagctattaacaaaggaagggtcttctttaatgagctggatgtgaaacttgaggatgtcataactttattgtctaaactttcggaagcagttttgtcccgtgtggctccatttgcgaattctgcagcacatggtttggcaaaacatgcctttctgttagacgatgagctatcttggttcgaggaggtgccgccgccaattgtgaattgctgctttgttaatcatgtgtgattttgatcaccgcgtcaaataaaaaaattataaagtgtttggcttaaaaaaagttatttttcatgcagtgtctcattagtcattaccttgccacaggctccggttattgacatactaggcccaagtctaaggtggtccttaccccaaacaaacttcaaaaggtagacttaaaagttaaattaaaactttctcaaacttgaaagaaaaaattagataaatttgttctaaagtaaatataaattagataaatttgttctaaaataaatattaacatttaaaaataatgtgtaaattttgttggattctaacttctaagcattaagcaacaagtgtttcccaaactaaataagagacatatatattacatattacaaaatttgatactacattccaaaaaagttattatgatacatcttctctttcaatatccaaatgaatttcattccaaattttaaatagctcacacgtgaaaaataatatttaagtattttatttcaggcgtcactatatttttttttatatatgcatggtaaaaataaattttatttttaacaaaaatattcactaaaacaaataaagacaataccataacaaccttagtatatgtacaccacaaatatttacctttttttcataaaattgttcattgtcaaaacaaaaggaaaaaacttatcaaattagaattttatttaagtaaatatataaaattgagctaaataaaactgattttataatacatttatcatttggaaatttttaattgttgaattgaaaattaatatgtttacatataaagacctaaattaaaaatcaaagaagacgtaagaagaaagaacaaagaacgaggcccaacacagcctgccagaacagtcgtcttctaagtggacggagttcagagctcttgtttgtactcacatttgaacttttaaataagctttctttctttctctattttttcttctttttctttttttttccccttttttaactctgtagtctttcgtgaaagtagaagttgaagcaaatgagagccatggtagaagaactaaatctatggcaagagttccaaccaacatagaaaaacaaatcaaacgagatactggtaaaaaggttaactcaatgcaagaggctgagatgattttctttctacacagggattgcctctggtagcgattcaggcgagccactgctgccgttcagcacagtgacattaccgtcagcatcaacatccacaataactgagtcaccctccttgatttccctggaaagcatcttctcggccatgctgtcctccaaaagtctcattatggctcttcttaaaggccgagcaccatagctcgggttgtaaccttcgtccaccactctatccctgaacctttctgtcacttgaagttctatttctttggtcttcagcctttcaaacacctccttcaacattatatctgctatatccttaacctccagcttggtgagctgtcggaagacgatcatttcgtccaacctattcaagaactccggcttgaaatattgcttgagttcctctgtcactaagctcttaattcggttgtaactgctatccttctcatcgtaatcgaggtcaaatccgatcctgcggcctcctttctcaattacactgcttccaacatttgatgtcattatcaaaagtgtattcttgaagtctacggttcttcccttgctatcggtcaatcttccatcttcaagaatttgaagcatcatgttgaagacatcaggatgagccttctcaatctcatcaaaaagtacaacggtataaggacggcgtcgaactgcctcagtcagctgaccaccctcagtgtaaccaacataaccagggggagaaccgattagcttggaaacagtatgtctttccatgaattcactcatatcaagcctaatcatggcctcctctgaaccaaagtagtaagtagccaatgcttttgcaagctcagattttccaaccccagttggaccagaaaagatgaag

SEQ ID NO: 27890 - DNA, 2546 bp, Cannabis sativa
tgcgacctcccattccttgcacttatcacgctgttcatgctcaagctctcatccttgagtagtttccctctctttccaaggtattttccaacattattcaacatgaaagactacgcaagattcacacgctgcccaatctgatcgttgagacttcgacaaatcctccctacaataagcgtgatcagcgccctttttgcactcactgtgagaagccaaggcatctgaaagaaaagtgctacatactccatggatttcctcttggttatggcgacaaacggaaaaccaactccacccaacacactacctcagatggtggccaatcctccacaagtcctactgttcgaggccaacctgccaagggacccactgtcaactctgcttccgctcctacttatccttcggtgtccgacaagctggcctctctccaggacatgatcgcacaactcacccagcatatccaccaaactcaagctgctgttgatgccaacactccaatggcatcaaacatcagtggtaaatctgtatcatggattgttgatagtggggctacccaccatatttcttttgatataacatgtttttcttcatttcataatatccctattgcttctcatatttccctccctaatggacttaaaatccctgtgcataaatctggaactgtgcaattaaattgtcatttacggcttaccaacgtactttatgttccaacctttcagtataaccttttatcagtttctgcagttattaaagatcccaaatactcagtttcatttactcacaatgacttctttttcaggacacaacccagaatattcggattgggactgctaagcgtgttggacatctcttctatcgccaacaagtctcagctaaatcatgtagttttactttcaacaataatacttgtaattctgttgatcattgtactactgtccaaaaatagaatttatgcctaggacacccttctatacgaattacaaaatcattgaatttttctgattctgattctcatgtatctccttgccatgtttgtcacttagctaagcaaaaaaaaattccttttaactcagctaataacatggcaccttctttatttaatctaatacatttagacatatgaggaccttttcatacagtcagcattgaggggtatagatactttctcactaatgttgatgatcacacaaggttcacttggatttatatgcttaaaagcaaaggtgaggctcaaataattataccacagttttatgctctcatattaaaccaattctctgcctctatcaaaggcattagatgtgacaatgcaaaggaactacacctacaatttttttttgcaactaaaggtatcacaccatatcattcttgtgttgagagacctcaacaaaagtcagttgttgagcgtaagcatcaacacatattaaatgtaacacgcgcacttgcatttcagtcacatttatctctttcttattggagttactttatacataccgttgtctatctaatgaatcgaacactgctttattacacttaaaatcttcttttgagttgctatataataggttgccctcatatgaccacttacggatttttggctgccttgcatatgcatccactttggacagctcaacacacaggtttagtccacgatccagggcgtgcgtgttcattggatatcccgctggtatgaaagcctatacattacttgatcttaagactaacaaaaatttttactcccgtgatgttattttttatgaatacatttttccaactaaaataacatgttctagtgtttccattgatgatttttttaactatactaatgtctcctctagtgtttatcctcaggtacctaatattgtaccccaaaacaccacatctgagccaccccctcccacggccccagctaggatgattgtctcttctcctcctaaataagctggttgtcccattattcgtcctcatcacttacaagattacaaatgttagtattccactaatcaccccatgtctctatttttatcttatgataaattttttcctacttttcgggccgccattctatgtgcccactcggtctctgaacccactaattttctccaagtttaaaaaatgcctcaatggctgaaagctatggacaatgaaattgaggcacttcttgctaataaaacatggattgttgtatctattcctctcggtcaccacttcattggttgcaagtgggtttataaaatcaaatacaaagcaaatggtgaagttgagcgactcaaagctcgcttggtcgccaaattctacaaccaaaaattaggcattgattatctagaaacttttgaactcgtttccaagtttaaaactttaaaacttcttcttactcttgctgccatttataattggcaattatatcatcaaatggatattaacaacaataatgccttcttacatggtgatttagatgaggaagtctatatggctcttcctccagggtacaaacacaaatgggatcttccccctaatgtcgatcgtaagctaaataaaagtgtcta

SEQ ID NO: 27891 - DNA, 3078 bp, Cannabis sativa
  modified_base (2900)..(2926): a, c, t, g, unknown or other
aagaagatgatgatgatggtgatggtgataataaggaattagggcaagggcaagggcataataatggggatagaatgatgatgatgatgatgatgaggacgagggcgaggaggcggtttcaagagcaagagcaggagcaagagcaagagcggcgtaataataatttgggaggagttgttaggaagaagagaaagagaaagccaagggtttgtaagaacaaagaagaagctgagactcaaaggatgactcacattgctgttgagagaaatcgaaggaaacaaatgaatgaacatcttgctgttttgcgttccctaatgcctgattcttatgtccaaagggtataaatatctctctctttctctcacttttcttcttcatataattaattataggtttaacaaaaaaaaagggtattttttgttttggtttttaaaagctatagaaaaaagttttaaagattaggggacttgaaaataataatacatgcaaatatagaaaaaagttgcaagtagtgtatatttggttatattgtcctttttgattcccttcttcaaatattgggaattcccatctttaaaattaattaatatgaataaaatgaaagggaaggggaagcatgcatcatcatcatatatgatgaaacttttggcagaaactaagtacttctttgcatagaagggtctctatctatctatcttacatattattttcaaatttttgctacctcaattcataaaataataatgacaatagtaatagtaatacacacaatttatataatatcttatttgtttaattgttcccaaatattgttatttatataatatgtgttattatatattatagggtgatcaagcttcaatagtaggtggtgctatagaatttgtaaaagaacttgaacatcttttacaatcacttgaagctcagaagctccaagcaatgaacactaatagcaataacaacaacaacaacaacaatagtggagaagaaccaatggtggataatgctaatgctaatgataaagataatgataatgataatgatgatgatcatcatgatgataaagatgatgagatggagatggtagctcatcatcatcatcatcatgatcatcaacgtgcagctccttttgcacaattctttgtatatcctcagtacacatggtctcaaatctcaaacaagtacacttcaaaaactaaggcagccatagctgatattgaggtaaccttgattgaaactcatgcaagccttcgaattttcactcgtcgaagccctagacagctctctaacctcattgccggattccaatctcttcatctcactgttctccacctcaatctcaccactctcaatccctttgtgctctactctctcagtctcaaggtaacaattaattaatagtactccattatatgataattctgagtcggttaaattatacttttgtctcattctgattctaatcctgtctcgattaaattatatttttgtgataattttaaattatacttttgtttcatcttggatttgatcttgactcggttaaattatacttttgtctcatcttggatttgatcttgactcggttaaattaccaaaagattttgatttcttatcttgattctgatcctaactcgattaaattatacttttgtctcatcctcgttcaattaaattatacttttgtctaatccctattttattaattatttttttttactttatatagtaaaatgatacaacatacatgtacatgtatttttaactacactcaaataataattctcaactcacatccatttattactaactaaattctcaaaataattattgtctttgtgtacttttgatgagaacatgcattttgtgctttggtggggttatgtttggacataaataattgtgaagaagaatatggaagatagaattaacacatatgtatatcttttgtaattgcaaataataatttcattccttttttgtttagaaattgtggtaattttgaaaactctaacacaatttttttcaggttgaagaaggttgtctactgagttcagtagatgatatagcagcagcagttcaccacatgcttacaataataattgaagaagaaactactatgcctatgtgttgttaatccaatatatattcatatataaaatcatcatcatcatcttcttcttcttcttcatcttcttgtgtaaataaatgcccttagatcaatgttgaaattaccataatgccattcaatatctttttgttgtagtttctttctttcttcactcattcaataatttgttgtaaagattctcttgttaattaattttttttttttttgtgtctgttttgtagtaaacatttagctatagtagtactaattaattaatttgttgtgtgttttatttgtaagtttgtaatttcattttttcaaatatgaccaaaatgcaaagtggggatgtgcttaggattctatatgggctctctaaggcccggcccatgctgatagtgatagggactacttgtgtggttgtgtttctattattaattttatcttttaatttgtctttttggttgagcaactactttccaagtttttaaccactttgtaattttctttttttttttttttaccaacaacccttttttgtaacagcagctgggacaacaagtaaagctttgttctggctccacattttttaccttattttttggtgaattaattttgagtttattgatatcttataggatagtagtttgagtcatcataaacaaacttaatgacatatatatgtcttgagtacatatgaaatttttctcattgttatgagtaaataccagggtgttttattattccattataattaggattaataagataattataaaataataataataannnnnnnnnnnnnnnnnnnnnnnnnnntaataataataataaaaaaacttggaatttatagcactctatcgaacctaaagtatacgaataaatttaaaatatataaatgcatattataatgaaataggatattttttgggaaaatttatacagagtacttaaaattgattttttttttt

SEQ ID NO: 27892 - DNA, 1604 bp, Cannabis sativa
ctttaaatatcgttaatttccaattattaaaaaaatgaaagcagtagcatttcatgtaaatgaaataatagaatattttgtacgtcaacttctaaaaaaggtaaaataaagggaaaaactacgagcttgaggtgtcgtaattctaacgtaaacgtgttggtagtagtagcgatcatcatcagtactactgctgccattatttcattccataacatcatctcatcatatatgtatacgtacatatatatatatatatatgacttttggcgtttgttcatgtctcggatgtcgcctgctttgacagatgtgtttgaagaacacgaacacaagacaccgaattaaaagagagagagagagagagaagggttgctgttacgataataccagaaaaccatctaactcgtgtctcatttccaccgccaattcataacattactcttttttttttttcatcattcagtcttgaaaatagtttgatagtttgagggagattgggtctctgccttatgtttgaacctttgaattcttgaataggttttgactcgattgaaaaaaatggctgatgttaaatttttgaagtctgtaccaactcataatggggtgtgttatggccataaccgactttgcccattaccttcttcactctcaccattaccgccggcatcaaatcaaggaccaactttgattagttccgattcttgggacagagcagaaatgactacccgactgatactttccatgattgagcccaccaagcgttccaacctgatgagaattaacattttcaaatatgtcgaaagacttcttggaaattttcaggtaacattaaacactttgtaatgctagttatttcttgatattttaatttctttgtcttatatgttgaaatgtgattcctttcgtacaggtctatctttatggatctgttccacttaatacttaccttcctgatggagatatagacttgactgtcttgtgtccaactattccaaatgatcagttagctttggaagtttgtaaaattctcaaggatgaagaacgtaatgaagctgctcaattcaaagtcaaggacacccattttattgacgctgctgaggttctatcttcttggtctaatcttttttttttccatcttaaatcttttgggtttgcttgcatgtatatcctgataatgttgcatcttcaactttatttttcagatgctttgctatgatatattttattttcttgcattttctttgagagtatttcaatcaagttgtgttcacattgaaactgaatttcgtagtttcaattggaaaaacttcatatcacatgtatggattatgcatatctttcctcacaatgcaacagatcattgcaagtcattgtcttgaaattcaaatgttggttttacatttctttatttcttttctatatccttgtttgaatcgtcttcaatttcaagcccttttttccctactataattagcacaaaacctctagttcaatcaagataaaagcttggaggtgtaatagaatccgactctttaattgaattggtattagtattgtattacatttttatttgtgatagtcttttactacataatacttaatgtact

SEQ ID NO: 27893 - DNA, 2449 bp, Cannabis sativa
tctctctctctctttgtttatcttttttatgtattattttttttttatctttgtgatatttttttatctttttatttacctacatagctaatttatataaatatacttttttgacataatttttgtaactcttaactaattttttacatttgtagctattttttattagttattgtgagtgcttataattttttttataatatattttgtttagttaacaagggtaaaaataaataaataaatataatgtaatataaataatttttttttataaattcattcaggccttttcgagttctattagattgtaaatatagttttgtctaatatacaattgtataaaaaaaatgtaatataaatataatattttattatttgtgtattataaatatattatttaaatgatataaaaaaaatttagaaaagcttatctataatgtaaagtaaatgtgtgaaataaaatgcataattttagtaaaatattttgaaagataaaatagagaaactattaagaatggtcttatctaattatctacttttcttagactataaaaatatatatatatatatatatatatcctacattacaagtatttatttatagaatatacattagtactctattacattaatttattttttttttatttaattaattaaaaaaattatttctttatttttaatatttttttaactagataaatatattataatttttatgattttttttaactaattcgttaaaatctttaataaactattttaatattaaataaatattcctatttgtttattttatttgtgaaatttttacaataaaataaaattgataaagatcagtttcctaatctaccctccttaaggcaaaaaaagaaaaaaaaaacaaattatatgaaaagtagatatacacattatattattctgtacatacctatatttatagccactatatatatatttatttatttattttttgaaaaaatgctttcattcataaggaaactaagcctcatgatcattataaaatacatttgtaggaatggatagagggtccaccaaaccaaaacaattgtgcgataaaacccacttagccacgttatgagcagtaaaattttagatccttacaatcttagagaacatacaaccatgaaaagagaaggaaagacagtaacagtaattattatagttatcaatctcccatttggtgctcgcacgattgagagcatcaatgaccatactagagtcactctccacgatcacaagcaaacatcctcgagcaatccttgtctctaatgctaggcaacaagcttcgacctctccacagagagaatcaaaataacacaaacgcttagttgccaccaaatcaccttacccagatagtttcgggcaacaaccacaacacatcttacgtatgcaatttaacatcaaaattcagcttgatccacctagagatagcatcagaacaatatgagggagaagagaagctctgtaatctgcataacagagagtaatatagtcaatatagttcataatgttagtcagattgttattatgtatatttcgagcacgccaaatagtatcaacaactattgacacatatatagaggaaaaattcatcagcgttgattcttctttctttaagtctccacaggaatttgacacaatcccacattcgagtacctgttggtttcatggtactaaatcaagtaagtaacagaagagttgttactgattatcattgtaccatatgtccaagatcaccatatatatatatatattaaactaaaactacatagatgataataatatttatctctcgaaggctattagagtatcctcgattctttttgtatgttgtattcttagaactgtgataacaaaatttacaccttgattttttagactttccaccacacacaagaactaatgtgagctagtaaaaaaattgcatataaagttcttgattatatctcagcacatgagaaaaaggttaagtggtaaaacttttttaggtttttctataaaagttacgtataagtttttctatttctaaaactatatagaactttgttatacggtattaaataaacttaataaaagttttatttaattaattatttaaattttaattatttattaaatcatatttaattatttgaataaataatataaccgaattcagttattgatatttatatcttatatccgattgagggtatctttcaaccacttgagaaaaaaactcaactactttttaaattcaaatatttatctattgaattaattaattaacctagaaagataaaactaatagggacacctataatagtggcgcctactttgtgtttggacacaatgtaggtggcaccttcgctgtcttggttaagacaaggaatgtgcattttatcttgaaaatttttgttttttccctatttaattaatttgaaaa

SEQ ID NO: 27894 - DNA, 2085 bp, Cannabis sativa
tcttcaagcgtttcacctctggattttgaagacaaactctcaaccgtatctggttgtgctttgatgcagggatatataaatctagggttttctttgtacctgtaattagttagttactgaagttagttaggtgtggattataacctaatccattctaactaacttctgttagggattttagaggccgaaggccaaagggatttgtatgtatttactgtattgtccttgtattaagtccatatcagtgtaagtggaggtttactccaacaggtagtaacttcggagttttttctttttttaatcttctattccatttgaagagcatcaattttatttgagaccacatgtactatctcaaaaatgtgattatgattaactaaatattttatattaaatatgaaataatatgggtttttatggtgtcataggtaagattataatcttactaagctaattatgtaataagtaagaattttggaaaaaataaataaataaacgtaatttattaattatagagattttattaaaatatgtgagtattgtatatgctatttatgaaataaaatatttttcacgttgaacaaccgtagaaaacttgatgcattggtcaaagatgccacgacagtaataaatgtgagaattaattttgtcagaatgttttcttagatgttagtgttgtcgggatgttttgaggtaattgggtacgaccaaattacccctaaacttagagttgacttagtagctaagaaaagggtaaaatggtctttttacttgggtaaaatggtctttttacttgggtttattttattttagttttagtggaattctagtaactaagtcgagataagtttctttaattatatttttttaaagttcttttattaaggataaagtcaaacgcaacaaagacaatttctctctctccctttctctttctaggttcggctagaataaactccaagaaccccaagatataactaggaaaatttagtgtaatcttcatcatgtagccattgatttctgccgagaatttgtggaaaattaagaggaaactcaaggtaactcttatgtcttcttctcattgatatttttcttaagtttagtattggtttaaggttgaaattttgtaaattagcttctatagattgagaatttgttcgaataaagttctgagttttattattggtagatggtgagtgattttttttcaagtttaagttcaaggaactcaagcttgagctttaatggtggttttgcaatttttttgttattatggcttcagagtttttggttattcttagatatgatatttgaactgttctaaaaaatttggcagaatttggagaagttttgattggatttgtagatttaaaaccaggtttacccatttctatatagggaaaacggttaatcgattttacagttgaaccgttttcctaggactgaaacccaaaaactagtaaattatttggggtgatttctagcatctagatttttgtattttatcaatatttaggatattttcacgctatttatcgataggaatatttctagttttgaatttaagtcctaaaaaagaattaaattagttatttatcaatttaccgttgttgtgacatagggtctgagatcttcgagcgttgttccactcaggttggcccgctcacttttattttgaattgaggtaagaaaattgtaatgaccgcatgttagattatggattagtaaaggcaattagcattaattattgacattgctatagttatgcatgattttattatgttgtcggtcccatttttaagaatgagaattagagttatattttctcaatttcgaagattttattaaactctaggagtattatttacgttaaatatgaattatgtaatttttatgatttttgctcggcgatgacggaaaatgtgatggatggccgttagagtcatatgggtaagtttagaacatttatcttagtggggtaaatatttgagataaatagaatactgggtttaagtggggttatgatttgtcagttcattggatttagactgacatgataattggtgataaggtatacttacacct

SEQ ID NO: 27895 - DNA, 2047 bp, Cannabis sativa
accgttgtgcatcacttttctcactactacaaatttagtttttagtgacactctttagtgacacgctcatttgcgcgagtcactgaaaggttagaagtaatttttagtgacatgcacaattagtctctaaaattcgatgttagtgtcttataatttgtgtcactaaaaatgtgaagtgtcactaaagactaacagccataattaattttatgaatttttttattaaaaatattcacctatagagtcactccaagagagactggaaaaatatgtaccaacacgcattgcgcgtcactaaagccacttcacactgctacagtgacaatttatttatatttttaaaataatatttatttattcatttatattaaattaaaggggaaaaaaataaaaataaaaaataataattttagttgtagggccggtggttattgtatgagttttgttattatataaataatataataaaataaaacataatataataaataataaataaataagattatgatatgaaaccctaaacatctcattctctctcaccctctcttactgcctccttctttctctctctaaaaatctctcagctctcaacgtgaacggtcgttccttcctctccctctatccctttgtcctctctttcgtcctctccttctgcgcctctattgacccgagttaaacggtgaacggcgaacggcgaacggcgaacggcaaacgacgaacgacgaatggaaaacgccgaacgacgaaaaccaaatatatagtttcgttctctgcttttcgctctcatgtagcgattaatctttgccggacattgcaatggtaagtttctttgccgttttcttttgcttcaaaaaaatctaatatctttcattattctccagaaatttatgatttcatctttttgtttcatttttgatttgcaattgcaggcgccgaagaaggaaaagcctccaccgtcatcgaaacccgctaagtcaggaggaggcaagcagaaaaagaaggtattgttatggttttagggtttgaagttttcttagttgattattgggcttaatgcttctggcttgctaggatccagtgtttaagtttttgcatatattctgcttgaagtgtattatgccaataaatgcctaattttattaaatgttagattcattaagattgtagcagattgttaactagtgcattttttttttcaaacatctaagcgagtctttgatttagggatttttttttagtgataaatgaatgttttgggggaatgatcaagcatacttaaacttatcagaataagttataatattgatcatctttatttcttctcattttttgtttgtttttttttttggttaaaatttatatttatacccactgtgattaactcatatttttctttgcaagctaacaatgatggtggtgatttaaggtggttctggccgagattgaagagccattggatttgagaattttatttgttttttgttgttgtattgttcataccaatttctaagtttgtagtcaaatttttttttaatgttattgtattttgtttatgtattttatttaaattatacttgtatttttttaatcacttattttgtattactgctattaattttaatataattatttttgtgtatttttttggttattaatttagatgtatttatattatttaaataaaatctgaatgtatttatataatttgtaatttaaattgataattatacccatttaaattttaatatagatttgtattaaattaaattaaatattattttttttagaaaaatatttaatatagtggcacttattgtgtgtcactatatctctaaaaatattaataaaaaagaaaacaaggatatagtgacacttcatgtgtgtggttgataccttttcagtctgacaaaacctgactctatacctctatagtgacacgcagatagtgaatgcaaaaggtttcagtgacacgtgtgaagtgtcactaaaaattgtctttccagtcacccttattagtgacgcgcgttgaagtgtcactatacac

SEQ ID NO: 27896 - DNA, 1627 bp, Cannabis sativa
atgagggagttatttgatctgacggctgagattgatctaggagtaattagggttaaaaagtaaaaacgtactctgacactcattcaatgtaccctgagacccatctaatgtacacgaaaatacatttggtgaaagtacacaaaatcatgtccaaagaatataaaagcaaaatattttgtacaaaagttttggacacatgtattgttcttgaaattactcttatgtccttttacgcagtacattctattttctatcatatcttattggttaaaacttgactaagggtacaaatgaattttcacagtccaaaattccctataaatatatatataaatgtattttcttgaaaaccctaacacttccactcttgctgcagcacatcactcatatttactctgtttctgttcttcgaatcaaacacatgatgagatgatgatgatgatgatgatgatctccatcatctgccgcagatctctttaaccaactgaaaacctaatttgctttgctttctacaggtatttttcccatatatattgtttgttttttgagaaaatttattctgctggatgtgtgaattgagtcatttttttttgtatatgcatatagatatactgtattctttatttactctgtttttgctgatttttcagtaacatcttttttttttccccttttttttgggggttatagagacaaaagtaaaagaaaaatattgatgttgattgttttacgtacataaattgttattattcatttggaatagagtttgagtgagccatggaaattagtgtcttattcttagtgatttgagaattgagattggaggacaacaatattatctcttacaacaatttgttaattattaagttttcgaatacacatgactccaacttgtttcataaactctctttggtactacttgtgtaaatgttttctctgttacaagttttcatttttaaggtaccaaatcaaactatataaaaatgttataaatcatcttaaaaaaacaagaggtatattttacaaattcattttatttaacctattttatgtaaatttattttatctcgggatgatggggaatgaatataggtgaatgaacttatcaatacctgagttatcaaacatgtattggcatttagtctttttgatatatttacttttaactatcaatttgcatattttaatgtatgttttcaaatttgtgtaggactattcattatggaaccagcaccagacgaggattatgattattgggatcatttcgtttatgatcatgacgacgcacaatccatgccggaagaacctagtggtgaacttgaaaaacctccaccagcaacaccgaagcaaaaaaacactaggggtagaagcaaacagatagatatcactaaaatgaaacgcaagggtaaaaagatgaaagttgagtacaacaacttcggacaatgctggggtaaaggagggactgcttatgttactcgacttggggcatggatgcgacttaacattccacttcgagatatatcgtggcctaaggtggatgaggaacttaaaaatatattatggaatgaaattaaggtaatgttaatattattattcttgttttttttactattgattatgatttgta

SEQ ID NO: 27897 - DNA, 3560 bp, Cannabis sativa
ttcttagattccttgcaagtcacaacttcttcataatactcttgttcaagcttgttaccatctagagtacttagtagtgcataggaattctctttattccaaactttatagttgtatttagtattaggcttaggtggtctttttcgtctgtctctagctatttggtagttgtctagattagttcctgagttctccaagttctcttggggttccacctgaacaatatcctcttcattctttgtctgttcacctaaacaatatttgggtttagattagtgccatttatcacttctggattaggtatattttttggtgtcctagtccccaagtcaaaattgatagtgttagcactgtcaattttagagttatttcctgcaacagtagagtttttaatagcacgaggaaaatgtgattcatttaaaataacatatctattgttaatagtctttaaaccctatttttattcacccaaagtctataaccctaagtaccatccgggtatcctagaaaaatatatttgagtctctaacttaccaacactttggcactagatatggtggcttaccactccacctttcttctagagttttcaactctttagcactagataggcatctgtttatcaaatatgctaaagtgagcacaacttctccctaaaatctagttgccagtcttgactaaaacaacattaatctagtcttgtttaggattgtcttattcattctttctgccacaccattatgttgagttgttaacctcacaattctgtgcctttgaatacctgtctttctacaataagaattgaacaaatcattgcagaactctaggtcattatctatccttagagtcttaattcttttgttagtcaaattttcaattttactttccactcttgaaacttaggaaatgcatcattcttatgtttcaatagagaaactcagaccttcttagagtagtcatctactatagacataaagtaattacaactacaccatgagttgaggttttttcagaccccataagtcagaatgcatgtattctagaatgcctttagatttgtgagtgccaactttaaattttaacctgtgatgcttacctaggatgcaatgctcacagatatctatttaattactttgtatttgcataatagatgttggtcattcgtaatttttaaacctctttcacttatgtgtctcagccttctatatcataggattgccttagtcttctggtgtcttaacagaaatgttgtgacagcttgaaactggttctccttgtaagtaatacaaaccactttctttgaaccctttcataattgtcatagcacctttgttaagtttcatggtacctacttcaatcttacttacaacaccaatatcatcaagaaaactaattgatattaaatttctagctaagttaggcataaaccttacccatgttagggttcttactacaccatcaaatattttaaggcttaatgttccagatccttctatgtagcaagtctgattgtttcctagaattatatttccacctttagattccctgtaatcataaagaagattcttattgtttgtaatgtgaaattgacaaccagaatctaggatccattcatctttaaattctaaagcaactgtgtagacttctccactttcatatccatcacttaggttagcttcttgttgcttttttttttctttgtaaaatgattgtttccctgatttgtatctattccattcccatcagacttgttcttatttcttttccagaaatatgagtcccttctgtagtgcccaagttccccacagcggtaacatccattttggtctttgagtcctctatatttagactttcctttgccatgtcatccacctctgttaggacccctactgtgactctttcctctacttttacatggctttctttgattaggtcttccacggcttaggttcagttcaccattagaacttcccagtttgtcattcttcatctcaagatccatagaattgagtgcagagatgacttcctctagagtaatagaatttctcctatactttatagatgtcttcgcctctctgtatagtgagttgagggttataatagcttgattctcatcacttagagcttcattttcactagaatttgcaaactctgtgcatccttaaatattcatctagatttagttctagattctttggcctgttcatcttgaatccaaagatccttttcttaagaaagatcttattggtcaaagacttatgttgaaatttatcttccaacttcttctagattcttgctggagtttcctcctcagcaaccaacctgatgattgcatttgtgagagtgaagaaaatgatcctagttgttgtctcaaggaactcttcttgttaaatcttagagatttcttctggccattcaatgtgttcttcaagaactcttagaagctttcgttgtgccagcaatcatcttatcttccttctttagattcgatagtcacctaaaacatcaaacttttcaatatcatttttaattctactcatgctaaagttgctagaaatcaaatcagagttagggttagatattttgataggatcatccaaagggatgtcctttagttctccattgtctgattcaagttcttgaggagcaccctcctctggttcttactgattgaattcttccaatattgctagcttcttatatttcttgtgatcttaattgttgcgaaaaatttctttgataccactattggaattctacctattcctacaccaaaatcactcaacacaaatttaggcccaattaaacgttttacggtgtttattaaaaaaaaattaatgtgtccatttaaaaaattgacacaaaaccaaaaccccgacccaatagcaataccaataaccctaggcaaaccctagcaaacctcaaatgtttgattagaacattcgagacttgtctccttcgagaaaacacaaaacacagagagaaaaattagggtttcatatccaaacatgcacacacgcacatgatcaatcagaatcaaagagagaatgaaaacaatttacaaaacaccatatttttgacaaagattcacccaagagataggctacatccttttcgagcttgccttagtgatgctcgagttccactatcgtcaataacaggtacagatctttgagtctctcaagatttcatgccagaattaggtttggcagataatatattgtattaactctcttcaaatgtgttttcctctttctttttactaactctcttttgtttcttttctttgctggtacaacaatggtgagtaacgttcttctctctataaagaaagctctctctctaactcttagctcacagatggaaaatgcagcatgatgctcttctgttcttttttgctaaggtctgttctgagttggttcagttgagttggatttgttgatattgaagttttttctttgtaaattctgttagagtaagagacagtgaaagtagcttgctatgcttcagtcgttgtagtttgtaactatttttctgttattggtttttgtagacttgag

SEQ ID NO: 27898 - DNA, 1677 bp, Cannabis sativa
gctaccctctaaggttaacatggttaatattttgaaaatttgtggccaaatcggacctatagagaagtttagtggtcacaaagttctcaaccttcaactgcttctaagagaaggccctatattgagactcttttttttgttatcgtggcggctttggtacttcaaggaggaagttctggaaaaagtcatatacattagcaagtcattaaaaacacaagaaactatagaacaatccagattaaagttgggtgacaatggtacctggaagatggaattttaggcgaagagaaggcaccctttttgtagggaatctaaaagagaagaactagtacttgcagaagtcgtgggtacgattcatatggctaacaggacagtaagagtctgaacgcttatccagtctaaaaaagcccaacttcttcttattttccctcatggggttagctttcacgttataaaaataaaggacctcttccagagaaggtacttccagcttgttcatcttgcaaaaaacataccacccaagggcctatatgatgaagggattagttggaaaggggcaatcctgatttttgcaatcaagcttgcgaagtaggtcctcaaagggagatgagcactattggagatgtgggaccagctccatggactaaaccctttgtactagcagaagcagaatctcccgtggtagatagcctacgccacatcaatccagggacgttgcggaggccagcgccattggcataagcctataatatcctgcaggatcgaaattagttggctttctgatccattttccaaatagagtcactatagtcttgaatggttaggggtgtcttggccgtccttttacttatggccttggtgagggaaccttccccagcaactgcatcatcctcaagaatggtttccaaagtcacctctgaccaaggtatcacaacaggaacaatagcctgatcacttcccaccggagttccctcaacaaaattgatggacatattctcaatggttcctacaacacttgcttggagatcctagttcaggtccattactactagcacaaaaacgaagagaaattaagcttcatgaagtaactgacggttaaaaggaaaataacctccagactaataccccaatcgatctaatttcaccgtcaacaaatgtatgggtgctcattaaatctcaaactttcccttaacgttgcaaaatttcttctgcatattctaccttactatttgacatataaataatcctaaccctagcatgagcagaaaatttctatccaagatacgaaatgataaatgtttaatcagagtgtaagcatacttacttgtcgagtgggaagagtagaagttgatgctgaggggactcgtctgaaagcttcgaacccagttgatgcaacgatcacagctagcctgaaagtcgaacacttcgtctggcagagaatctagctagtcgacttgtaggggttcaacttttgagaaaagctttgcacagagattgagtaattattgaatcaaactttcacactcttcttgcatgccatgaaaatggtgacaaggtagaaatttacaggaggaaacttagagtctgttgtggaaaaagtgaatggaatgtcattgatgttaatttatacttcaagaaaactagcttttcaaaattaatggtccagatctctcatca

SEQ ID NO: 27899 - DNA, 2600 bp, Cannabis sativa
tattagtaacctgctataacaggttaaagaaaaatgtaaccatatgattacaataaaaatgtaaccattgaatagtcacccgtaatacatatatatgtatattatataatttttaaaaacagttcaatataataacttgattagtatatacattatgacgttaaaagtttaataagatatttttttctcttgtataattgttaaaattttattggacgaattttttaatttttattttaatgtttgataaattgcaccacaccgcaccataattttttagtgtagttttcgcagttttaagatcttgcaatgcgattacgatttaaaaaattacaaaaatcacatatgtggtttagtttgagagaataacttaaacccgcaccacccgtaccgcgaacacccctagatactataaataatctatatctatatattcatataatgtaaagaaaaacaaattaggtggcattttatatgattttctttctattttactaattgtgaggctttatcattttatgaagaaaatttgatgataaatgtagttataattttttatttattattttatcaaaattttagtattaaaaaaatatatattataaaagacttactgtataaaatttattaaaaattaaatattttttaatatatatgaataaatataatatattttcaatatgtattacatgtaattagattaaatcaattttttagttagattttgaaagtttcttctaaaaccctatccaatttaattaaaatacaacaactcacttccaatcctatccaactataactagatatttaattgtttgtaattggattgaatttgattggttcgttgtaattggatcagttcaatgtaattagatcataaattagatcacaatcgttattgagggttaagaaaagaaagttttaatgttagtgtaaaaatatgattacaattagactctgtgtatcattatactttattttgtaaaatattatatctaaattataatttaactaaatagaaagaacagtcaataatttttaaaatatagtacttaaatttatatttacactatcgcgaagcgtggctacatttactagttattaatataccatacataaggccagtttaggaagatgtgcgttgattgtttattaaattatagattttaagtgatattaattaggattgaacatcaggtggcttgaccaagttttgggtctgcgaatttcaagtccaaaaaatggacctagacccacgatagggttgggttggcgagttagcgggttggcgtatcacgggttgacccaatcaactcaatcaatttttttttagaaaaatccaaattctagttatttaaattaagtaccaagactatattcgttacatttaaataaaatattaatttcaaatttacacctatgaaagtcaattcaaagttcaaaagttcgaaaatcaaaatcaaaactacatagtgtgtgtcatagtgatagtattagtagtataatggcagtaagaaaaattgtgatagtactagtatgtgtcatgtgataactacacacttcacaaatacacaacatacacatcaataataataatattcaaattaattttttaaagtcaataccgttattcaaaatattactatatatccataattatattgtccaaactaaaaatatacttataaatttaatgtccatataagcatctatctatatactagattaaaattacgtacaatgtacgatacttagttatatacttaatttttatataataatttttacactaaaacaaaaactacaaactataaactccaatagtattgtacttctttttttgcagtaagtaaagattattgaaattaacacaacaaaaataaaattgttaaagagtgattttacaaaataatttaacttaagtttttttttcaaaataataagtgcttctgtatattcttaattataaacaacataaatttataaaattaaaaaccagcaaagagcaaagtcttaaattttaattttcaataaagtgaaaattaaaaacataaaataaaacttataggttgaataaagattaataatagaacaaagaaatattaaacagtaataaatttataattaattaattaatgaaagttatccactcacaatataaaaaaaaaatacaactattaaaatttaaaatcactaaaaaaaaaaattattagaaaaaaaaaaaaaaaaactattgagactattaagcactcattcactataaagcacatttcatcatccatcaaatcatgattacaatgattccttcaataacaatttttgcttctaagttgaacaaatgacatgaataccttagatatttcttcaccacagaaaaatagattgtttgattgcactccatgttggttgtactattgaaagaatatttgttgctccataacacttgtatatatgttctcatgcgcaagtgaaatacattgccagaagtgttaagtaccttgggtctagtcatctcatttgggcaaacctttttgtactgcgtctgatcactcctccttgagtgactacaaccattccttctcctgaaatagacatgaaaa

SEQ ID NO: 27900 - DNA, 1878 bp, Cannabis sativa
ttaagcacccctattttgatgagttaactcttcttccccaacattcctaaggaactggtcccaaccacttcccgggcttgtatcgaaataatcatatggaactgctgtcttcaaaccaggccgaacctcacgccggctttccactatcctcatatccacctctatttcttgatccaattcctcccatgtgaacaacaatgggagagtaaatgcagcccaaggattgaaatccataagcttaactctgtcatccccagttacataaacatcaaatgtgtaattttctgaatcgaatcgtgatctaatcttgtttgtaaaaaagtcatgaatcaaagttcgaacatcatctttcttctccatcaaaacaggatagaatgttgttacctcgcgctgtgagataccaatcaagtgttggcctttgacaaagcaacgaaactccatgtctggcctaaatgatgggtaccatttccgaagagcgaggaagaagctacgaggcctcgatgaggtcttgtctgagcaagaatcataggcatgacacaaatcatgaacgagtgaatcagatgatttgaataagagagcaacctcactgaatgaagtgcatcttagagttccggtggtgctgatccaggatgcatcctttggtgcactccaattgagtttagggaaaatggcgccgcctagggttttaatagattccttaatttccagttcgagtttcgggaatgaaggtggtgatgatgatggttgctctgattcatcaccggaaccttccgagacttgatagtcctcttcctcatgtggattgtggactctattgggtaaagcatcttcattggtgattgaaattgggagaaggaatggtccagaatcatcaagaaggtattcaatgaagggttcggggagctcgtgaattagggttttgatggaaacggatttgaattttgggtaccattcttgtatctgacatctattcacttcttcttccttcattctgtaaagcccaaaaaagtaaaataccccatttgaagaaacaaaaaatcaaaaacaaaattgatttagttttggaaaaatctaaacaaacctgatttttgagatatccctgtcaatacaagggctccaaacttgatgcactttaaaattccacactgatatcaactcccaaacctgtttagtttatcaaattagccttttattttgctaagtcatttcatcagaatcacagaatactcaaaaagaaaatacacacaaactcacaatttcccaaatcctctcacaataattaacttgaatctatcaatattagagacatatcattatggaaggccccatgtaattaggttgagaaaataattagctaagtttctaatttttcagtataacatttattctgtagaagcatttataatcagctaaatttaattggaaaacaaaaacttatatgatgattaaatcaaattcattgaccattaaaagatcccaagcacagaatgaaaacttgttcaaatctcccaaattctcagtagcaacataaagttgaagagcacaggacacacttacaaatataaacaaaaactcagactactccccaaaaataaagccagaaccagttccaaattctaatagaaaaaacaccagtttctgaaattagcctaaataaatgatggaagctaaaagacccattttaacacttacatcaccataagtaagctccagggaaaagcagaagaagaaaaattgaaaaataaaccatggtttaatgttaagaggatccaaacccaatgaagaaactcatacatataaagaaaaaatcacaccctagtttagttttcatgcctaaactcacaatcacacaaatgaggtggtggtggttgtggtgtg

SEQ ID NO: 27901 - DNA, 2811 bp, Cannabis sativa
  modified_base (1148)..(1148): a, c, t, g, unknown or other
atgtacctgaatccataaatcgagcgtgttcagaggtttaactaatccaaactatacatatatacctgaatgatgaagatgagtctcgcagagacggcaatgtcgacaacagtggaggcagtgggcttgtcattgcgtggtcgaaacggtgggctagtcgacgatgaacaaggagaggtgaataagagttttgatattgaggataaaaagggagagatgaatgtttctgatcaaaatttttggggatgaagagggagacgatgagggagagataaataagggttatgatatatatataaaattattaggggcagaggtccgccggtaataatttaaaatataatattttaaatattatttaatgtcattagcggcggacttctgccagtaatagtccgctgctaataaaattgaaatttaatacttggaaaattcccgcacaaagcaattctttcaatattattactttttttttaaaaaaaaacacattattaccggcagatttagtttgcccctaataatttcgccagtattggaacattttcttgtagtgattgtgagatttgttgaagccttatttctacttgctcttcttgcaaaacctttgcaagtgtccagacttaccacataagtaacacttccttatttctttttctgtggactttgatctttattgaaagtgatgttttttattcttggaacttactttcttaggtgatcttcctcttgccaagtacacttcttctttcttggattccttctccaactgtattttgaaatcctttgacttaagtgcggtaagaatatcttctaatgcaatcatgtctctgccatacttgatggctgccttaacttcttgatatgcaattagaagcggtctcaacaagatgatggcttggcttttttcatcaaccttgtgatttatgttagccaaacctacaataatctcattaaatctatcaatattgtcatctaaagaaagggaagaaatcattctaaaactgtataacctttctagcaaattaatcttgctagctattaatggtttaaagtatagttcttctaatttgttccaaactcctttttccatcttctttgcgatgagttttcttcgaacattatttgatagatacatgatgatcgtgtantacgccatctcctccatttctgctttttttcctcttgtttcttctcggctaaaagtttctcatctctaagaacctttgaaaccttctagtgtactagaattccttttaaactttctctccatagcgcaaagtctcatattccatggaatttctccaatttgaatctcgccattaatgacattcaaagtttcttcaagaattacagcaaaaagaaccttgattatgcgttcttaatcaaataccaagctctaatttgtgggaaaattacaactaaaggtgcagaattaaattaactaaactccaaaaaatcaaacaattaacaataataagattaacaaattacaaacaataatatgaataaaatagtgatgaacaaaatatggaaaattagaaacatgtaaagcagtaaaacaattaaattaacaacaagatatatactggttcaagtccgatagatcgatatgatctatggctctactctagtttcaagaacaacaccaaatccgctttattgattgagcaagaatatgtataatatagtcgagaaagattctctgttgagttctctcaaagtgcttcacatctcacactcttactcaagaatgttcttcatctacaaaaaaattttcttacagaatccaagcccaatttccctcttttctctgtatctctctctctcaatctcaacttgatcgatgttttgaaaaatgacgagtgtaggtggtatttataggccataggatcaagatcctaaagtcggtagttgcaagagttgaggttagttagttaggcaacagctaacttaaccaactcttatttgagcgagctctccatgtctgcatatgtctaagtacattcgggaacatatatgagcttctaggatcagggaccaaaggttgcttgctaaaggaactccaagataggatagagccagctggagtcggctatccgagactaccttccaagaagtacaactagctatccaaatctctattctgggggaaggctagatttcttgaagacccttcccgaaaggacaagaaagccttctaggaccagcaaaagcgagtccacaactttccaggaataacttttaaggacctttttatttggaggaactataccacaatatatatatatatatatttgtaataacaaatataggaatagtacttcagatagagactcgaataggagcaattaagaaattaaagagacagaaattctaagtttcatgggcaatttcacaattggttagtagaagtaaaccaaattcttctaaagatattcaggaagaaaaaacaaatgacaagtattcagaactaaaacttattttcaatataatatgataacttataaatgacactacatgtaaatttaaacttattgaccatcttttgccaaaataattattgggacaccctacataatgtggtaggagagaaaaaatagtgtggtctatatgtgcccattattctttttattcttaccatttcagaccaaaaaacactagttccaataaatacgacacatataacgaaagaaaattacataatatctaacaaaatgcttaaaatacaaacttacccattataatggtgtaagattcttgagtgaatagggtatgcttcggttttccaccaccgagagagagagagagaga

SEQ ID NO: 27902 - DNA, 1775 bp, Cannabis sativa
tacaaggaatcttatatataagttttcatttttttataaattatgtaataaaattaaagttcaatcaaaacagagtgcaataaaatatggtttatgtttgttaaaattatagactttatatttttcaaaatgatataccttaatttaatttttattaaattttttaatataaccaccctggaaacaattttttagcacgaatagataaaaaaaaaaaaaaaaatcaatctagttataatacttttaaaccaggttattaataaattttattattttgataaaaatttagctcgtgatactattttgtactatttttaaaaacataggattcgaattatcatttttaataaaatagaaaatttaatcgataatttttataaaataaaagatccaaaatggtatttgccacaaaacatttaaacagtgtcataaattagccatgaattattggattttttttaaaaaaaatagtgttatttgaattttttttttttatgaattagaaatttgtatagctcaaaacaaaccatttacaacctgtaattcagagttattttcagtatatataactattaatgtgtcgtctaagggttttatttttgttttttgtatgaattttacttggacttgttgatggtacgtacatattattggtggtacttaggaagatatgataggaacaagtgtaggatattattagtgattgaaataacttcatcatgaagtgaaaggaaaggagtgtttgcatgcatggtttctgacatatataaatatatatatatatatatatatatgtgtgggagtgaattttcatctgaggtggtataactaaagctgcaatttgtgctaagaaatccattaaagccttaactgggaagaaggaataaggaactgatcactgggtccaatacaggtccacaccacactacacttaaatacttaaattacaaaagcaatatataaagaaaacaccttttaattattttcctacttgtgtctataggtgggatctacatatataaataaataaatagattattataacattattattaatgactgaaaagaaagaaagaaaagaaaagaaataagttgcatgctcctgttttcgatcttattaatcttgatctgtagatggaaagttattattttgtatcattaaatattattatatattctcattatgaaaaatgcaaaatggtctatagatgtagctaatgtaggcacatcaaataataatatatgtattattagaattaatacatatatatacccttaaatgtctttcatccaaatgaaaaatatggtattgctaattcaattaagcttaattattattaatattatgaagtagtggaaaagagctataggtaggcatatattattggacctttgaaagtaacgtatatataattgataaattgatcataaagaagcaatgtgtggtttattaattcttatgtatttatatatttatatatatatacaaaagagaagtttcttgacaaattatcagaattgtttatatttagtttttgacctaataataaatgcatttgctttaagatatcgatcgctggctcttatcttcttaatcagcaaatcacacttaattagcaagacggctcttctatgcttaaaaggatcaaaatatatataattttttgtacttattttaggtgcatgcattattattattattatttatattagtatatggatatttaagagacatatataaatacttataaattctttctttcttatatatgcat

SEQ ID NO: 27903 - DNA, 2616 bp, Cannabis sativa
  modified_base (342)..(347): a, c, t, g, unknown or other
  modified_base (2589)..(2589): a, c, t, g, unknown or other
attattagtactataatacatgccaaaaaaaaaacttaataagttaatatatatatatatgtataacggtcggttttggctttttcgttggtttattaccaaaaaaaactgaccgttcaatggcggttttaaccgttagcgattttcttggttttcggtttcggtttcaacagtgttcggtatgtcggtttgaacagttttttcagttttttgaattttatgctcacccctactgggcataggcgggctaggcccgcgcctggggcccactcattttaggggcccaaataaaaaaaattgcattttaaaaaatatacttattttttaataatttttaaaaannnnnnttatctttatagtaagggcccaaattttattttttgcctataacccatttcaactcaaggccggccttaattgcaggatgtatagtagagcataatgagcataaaatgctacaacttctatttgatagtatacatgatgacaatatgaagcaatttacggagcgatgatatgtagatttattctaccaaaacttaagatgaacttctatgtttttttttttttttgtatatatgtatataatgggacaatgtaacttggtcttttctagttgtttaattatgtttttagcaatttaatttgatactttttttaataagtatcgggccaccataaagatgactatcatcatatatcggacaaaaacaaaacccatagaaataatggttcttaaccactaaattgacgaactatcgagccaccatctggatgaccatcgtcctatatcgaacaaaaatccacccatataattaatggtgcctaaccactaaaataacgaagtatcgaggcactatcaagaggaccattgtccttcgttggactaaagcacaagaaaaataattaatcacctttaaccactcaagtgaagcactatcagaccctttatcgtacctacattgaacacaattaggacatcttccctaaatataagttgagctgaccatcgaaccatctatcgtccttatatcgaacaccatcggacataaagaaaaaaaaacctagaatccaaaatacaacataattttcgaagaacaacaatttccacacaaagaaaaaatattaaaaacaccaaatttcaataataatacataatagtacaatacataacaatcgatttttctgaaattcaacaagaatttataattcggtagttgcaagactttctattgtgccccttaccatcgcgcttgctataggttcattttatcacaatcatttcaccattacaagcaattttgtttatcttaattcttctaaccttttgtttctttgggtcgccctactggtttattctcaataggcactcttaactgtcattttctttgtcatcaggcaattcctattcattctcatcacaaactagcataatggtaccttcatatgtgctcctctaatattctacggtgtaaaatagtgagaatactgtgtacatgccaatatttcattgctaagctgcagcacatgcatgatggcaaggaacctttatgatttggaacaatccacaattacaagtttgtttctacaagaccactacaacaccggtctcaactgatcctctagggtggacattcaacgtgtaaggtccacatgtgtcaacgtttaaatactgagatttctcaaactgcaatgccaagtcctcctccatttacagtgctagtatcttcgtccacttgtcagcttttttttttttttttgtagcaaaccactcttggacttttaacctcgagaattcaatagaagcaatgataagaaagcctcttgagtccttagttgtgctgttgaagctttcagcccagttactcgtcattacattataacgctcccctagaaagtacaaccgaacccatctttcaaatctaatttcctcaagatataatgcaactgcaacattcattgcccgaaccttctcaaattctttatgaaactctatttttgaaatgtgtaagcacgagtgtaaatatgattcgtgaatacgtcagtcttgaacttatggttgacgttcatagtaatgtggtggtagcatgcaccgtggtgtgcatcagggagcacgagctccaaagcatgaataatgctttgatgcctatcctacacgaaggctaagttctcaacatcaccaatcacttctttcaagtttctcataaaataggtccaagagtcatggttttcactatcaactaccgcgaaagctattggaaaaatgtggctgccttaatccagtgccactgccacacaacatttgcccaccatacctagtcttcaaagaagacttgtcaacgtatacaacaggacggcaaaacctaaatccatgcctacgaggactcagggaaaagaaacaatacttgaagtgaccatcctctaccacaaaatttgtgatggcctggatttctcacctttagcatgtgcaagtaacttgtcaattttgagtacgaagcttcaggtgtaccccgaactaggcgttgttggaaatattttgccaggatcttagatttactaacaagtatggtgtttaacatcctaaatatnaacttctaaaatgattataaataaaca

SEQ ID NO: 27904 - DNA, 1077 bp, Cannabis sativa
tttgtagataacctttggccactagtcttaattttagtctattgagagagccatctgagttaaatttaactctatgaacccacttgcacttaataacattcatgaataaattatagggaactaatacccaagtaatgttcttgaacagagctcttactttctggtgcatagctgtatcccattgaggattgttcaaggctgctttgagtgattttggcttagttggaagtgttgattcatatagaggatgtttagtagcaaaatatgatttgggtttataggtgccactctatgatctggtggtcattctatgagatcatgattttgtacctgttgataatgatgtttcatgagcaggtgtggggtcaatgtgtgttggggagcttttggaataattggtggtaggggtgaggaggattcaggttgaggagcttgtgacagatttgtagaatttgtggtttcaataggtaggacagatgtaattgaaggaagttgtagagttgtgtttgagtgaataggtgatgaagtaattggggacatatctggtgaaggggaaggtgaaaatggggtatctgtagtggacatggaagggatgatagatggtagggaacattcagagacatcattaccagaatgtagagtattaattacaggtacaataatattaaagtgagtggaaataactacattaggtatattgtttaaagaattagattgtacctgagaagtagttgttgatgccattgctggaaatgactcttcttcaaaaataatatttcgagctatatatagcatgccctcctagtttttacaaagatagcctttgtgagttgtagtatatcccagaaaagtacatcttttgtaacctgaattccattttgtgtctattataaggcctcaaataaggatagcaggcacacccaaaaagctttaatacagagtataatctggtgtagtgccaaacaaacattcaagaggagattgttggtgcagtactagtcttggcaatttgttaatagtaaatattgcatcgtggaaagcatgccactagtaattaacactactacaaaaacaccc

SEQ ID NO: 27905 - DNA, 3378 bp, Cannabis sativa
  modified_base (195)..(209): a, c, t, g, unknown or other
  modified_base (997)..(1006): a, c, t, g, unknown or other
catcattctgaaattttcctatcactagggtattttcctagaaggagttacgcaactgttagtaactaatcatagaccttttaatttcatcaatatgcaatccaaatttttggggagataagtttgagtacaatttgaagttcaacttaatgatctttgaaatacatatccatcaaatatttctccacccctatnnnnnnnnnnnnnnnttaaccacttaccttaatgttttccaacattactagaaattcatgaaatttctcaaacatttcaaatttttttgtataagataaaatctagagtgattgtgtaaagaatttaatgataacttatatccacccctgaatgtacatccatatgttcgaatatagatgatcctaccttcaagtttaaatattaaaattaatattttattttgatatttgggatttgaaatgggaaaatttcaaaattggtgaaaaaatcaccaaaaatttggatttttgggtgaaaacacccatgcagccgagaagaggttgcttgagcctgtatgcgtcctcaggacgtgcacatgcgtgtttgagcaagggagcatcagcggcttcagacagggtgtgtctgagggatcagcacgtgcatgcaacttgtccgagtaactggtgcatgcggcgctcgaccctcgacaccctttggatcgaattttcaaatggccatatctcctttgtttttcatcagaactgagttccgtaaaaacaaaaatcgcttaatttttcacaaggaatccaaataaattattttcacggaaaaattttgtaattcaaataacatcatcagcacataaaccaacatgaacccatcaaaatcaacaaattcatcattttgaatccatatttaatgaaagtaaaccattaccatggctttgaggccagtttttggaaatattttacaagatctagatttactatcaagtatgttgaattaacatcctaaatatgaatatctctaatacgatgaaatnnnnnnnnnnaagagtttagaaaaccttacatttattgcagcgaaataatatgactccttctgcttagatctctaatccttgttcctttatgttgcacagtattatcaggatttgagcctggatgtaaagaccgcttatgattaatactttggagtattaaataattagggtttatgcatgagatttaattattatttataaaatgcaaattgttgaaatatatttaagttcatatgtattatgctattttatgtaaatttctcaatctttgtgtttgtgttaggaagctgtggaaagcgactttgggcctttagagagtcgcattttatatgttttagattaatattgtcggggtatcattgttagatattagaagtgttggaattttcgtggtttggaaaatgactaatttacccttgggaatttataatcattttattttagttaaagggcaaacaggtcttttccttatttatttatttggcttttagtggtttttcgggggctggttatgtgttgattaggttagatatgatttaatgtaaaataaggaaggaaaaatctggagaattcattctcttttcacttctctgtctctccttcaaatctcactcactctcagccaaggctttgattttcatagttgaattcaagaacaatcaagggttttggaccttgtgattaaggtattgtgttctagcttcttctctttggtaattcttaagcttaagttaggttttgaagcatgattttaggaattttggtgttgtggttacttgtggtgttttgagttgattttggtagtggtgatgaggttgtagcaaggtttgagttcatgaactcaaaccttgacctctaatggcatcttgagattttgtgttaattattgtattctttttcttgggattggtgtattatagtgattataagtatgttgtaagctttgggaaaatttggggttgaattgaattacggggagcatttttcgggttcctagcacagaaccagaatttcgattctgggggacctgtggcaaccggtcgatcggttggtacctagaacaagacttcctgttgggaaccggtctgccggttggggccttttctcgaaccttagtttttcccatttttgggttattaagggtgttaccatcctatttatcgatagggttattcttagttttgatttttaatccccgataagtgttttagagtgtctctcattaagttttgaatgttatggtttagggccgtgtaaagcgtcgagctgcacttccactcaggctgaccggcacacctgagcacggagcgaggtaagatagcatgaatattacatatatgtgaatgaatgcttgttttggatgtttacaatactaacactaatatgtttgtgttttaaagagtgttagtatagtgtagattatcagtagggttacagtgttaccaacacgagtaccagggggtacgtcgtgcatgtggtacaacacttactaattcctgggagtacaataatggctctgccaacacaagtacagggttggtactatagtgcatttggtacagagatcgtacttcccttaagaacgttcttatccatttggtgagctcaattattgagctcagggcggtttaaacataaagtcgacaccgcattgcttatatatatgtcttgcttatcttactgagtgttgactcatcagtttgctatcttgtgtaggtaaaggaaaagtgaagctggaggtacagtgagatagagctcggcagtgattgtacatatcgtggcagtgcaacctggagggtttcgatctttcaaatattttaagatgtattttgagttgcttgtgcatgtttatatataaaaaaaatctcaacgtagttttgtaaaatacaaatatcgttttaaactatgttttaaaattcgggatcccggactttgtaattaagtaattataatatgtattaaagttagtttgaaaatttagtatttcaaatacgggcgtttcactggatctctttctcacctccgggttggttaccactgccttctgcactatgattgagtatttgacttgctatctgttggtatggcactttatcactacaggtcgaataggtgaagaataataaaggagggtttgaaattctatagaaggtatctctcatctactagttgtctgacagagttagaaactagattcggcaggttgaaagtgttggatgagatgagagcatcatgttcctgttatagtgttttaactagtgcttacgattgaattatatagattaaaaacaataaaataatgggtaaaaatcacacatagtagccgaccacttaagggccttttactagttataattttgccactttatttcaaccactta

SEQ ID NO: 27906 - DNA, 1400 bp, Cannabis sativa
aacttattttatatataaaaatacgtcctttccaaagtgtttggatattattgaaaaaaaaaaatcttcttgtgagcttataattaagtggaccccacttagggcggaccgtgagttaaagtgagctagatctgcacctaagatccgcctaacctaagcgccaaaagaaaaaaaaatcattttaaaattacatatattttttttggtaattttaaaaaatacaacatatatttaattttacattctcatatcaaggaattcaaacccatatatttaagatgtaagtaatgaaagtgtattatatctttcttcttcttcttatttgtgttatttccttttatgttactttgtgttgtatatattctcttcatatacatttttttatttacttattttgatttgtgttgtaacattatttactcaataagttagtccttataattttattgtaataaaattctaatttttcggagtttcttttattaagttaaattaaaatatgtaaaattcaatataatgtacaatatagttgcggtgtacatgtattcatttatgcacgagccaactactaagctatacgtacactaatattgttggtagctaggaattacatatagcttttggctattagaaatatacatctatctcaagtgtgacacattcctatttttacatgcattttctaattaattaggctatatataccaatcaaattctaatatcacttaaagtttgccttaattgcattcttttgtgtggatcatcttcatctctcattcgttggattggacccttaagaagaagtgctaaaaaaaaaaacattaataatgtctaacatgagtgctaactttaacctcctgttacaattttttagtcaacttttatgcccgaaaatacatattggaatattttttaaattttttttttcactgtaaatttttgaaaaatttcaaatagtttacagtaccaaaaatatgtttgaagatttttgaacgcgggtggtaaattggaatattaagaactctatatttagtactgtaaaatattcggaatttttcaaaaatttacagagatgatactataactataacgaataccgctataaaaaatttaaaaaaaaaaatacttcggcatgtgatttctgtaacaccccgatttcccgagatgtcacataggatagtccgtataaaacaatttattaagataaagacaataaaatacttctttattgaaaaatatctaagcatgagatctcactgtttaaaacaaaacttttttagtaccctaaaattaaataagaactagttaaatcaaaataacagatccacaatgtttaacatttaaaaacattaaaagcaaaatactgtgccagccccctaacatgcagtccacgcctcgag

SEQ ID NO: 27907 - DNA, 1152 bp, Cannabis sativa
gagaccaaaggctgatctgaactttgagaagtttttggagtttcttgagttttctgagataaaagactcatgagttgttggtactggttggtaaggctttgaattagatcctgatttggcacattcccttgtccactttgtccatcatgtcctgaagcttgtccctcttgcacaccagaaaaatttgcagatggctttccagattgtccattgttacctttgctcggattctttccataaaacttgtgccctggaggatatccatgaagcttgtaacattttgccataatatgtccaagcataccacagtgatgacaagttactttagatcgattaaaagtggcacttccagcaaactgatcaccagcagctccaggtgattctgctgcaactttatcgttctctgcaacagtgttgggaatcacagtaatactcctttgtctttcctcttggatgacagatgcgtatgccttattaacagctggtagaggatcttgcatgaggatttgagaacgcacagctccataggattcattcaatccgattaaaaactccataaccttgtcctcttcctgatattcttgaacaactttcattgctccacaattacaagcaggtagagggcgatactgttgtattaaatcccatagagcttttcttcgtgtgaaataagaagtaacatcaagagatccctgacttagcatttgcatcgatcttttcgcttcgaaaactcttggagcatttttctgatgaaatctctcctgcaaatcctcccaaatttctgctgcattttctttatacatgaagctatcagcaatgtcagcagaaactgaatgcaaaagccaagaaattaccagatcattgcaccgattccagatatcatgatcttcatgatctttttctggttgttgcagcttcccattgacgaactgaattttatttctggctgacaaagcaactatcattgatcttttccaagcattgtaattatcactcccagtcaagatctttggaactaagcttgctgatggatgatctccatttccaatatagtatggatctctgctctgatcaaaacgccgaggcacaggatcattatcaagcactgaaaactgattcgcatcattgctggagctgtcacgagcagcttga

SEQ ID NO: 27908 - DNA, 2823 bp, Cannabis sativa
actagttgtagtgtgtaactgaattacttaataatataaagtcctgtaatcaattaagatttttaattttagcgcaattgaaatacaatataatatatatgttttcaatcttaacatagaaattttagagtcttgtaatgtgtattattaaggatttttatatttaaatttttttatcttaacaatttgtataatttgaatttagttttaattaattttttaatatatgtatgtttttcaattacttttagtttgacgtttgtttttaatcaaatttttatttaagtattttgttaaattatatatttgtttaaataaataaatgtgcgtcctaaatatattatgaaagtaaaatatcttatttattttaatatttatatatataatcaaaaaattaatttaaacgttatttaattttctttcttctattgattttgataatattctttgctaatgacatcaatattaaatgtagtagcaactataagtgagatgtggtactgagaattgtgactgtaaatgtaatgaagactaaaagtgaaatagggtgatgataatgaatttgaatatagtgacaactataagtgagatatagtaattacagcgagtttgatagtggcgactacaagtgagatgcaatactgatgataatagctttgaatgtaatgacgactacaagtgagatacagtgataaaaatgattttgaacatagtgataactacaagttagatacaatagtaatgatttaaactttattttttttatttttaaatttacatagctaaaatatagtttttgatttatattgtaacaattttaatcacgtgacataaattaattttgtgattaatcaattaaataaattattatttttttattttttataattaacatatagaaactagatttaatagatattaattaaaaatatttatgatatataatttgaatttcataataaatatctactaaaagtatttaaacaatttatatacacgtaaaataaattaaaatttaaattactaatctattttattttgtattacttatagtataaataatttgtagctcatttttaatatttttaataattttactattttaaaattttaaatttatgtttttattttttttcattttaatttttaaaatattttatttattaatactaactcaacaaatgaaaattgataaatatatatatatatttttaaaataatataactaatatttaaagagcgaacatgttgtctagttttaaatatttttgtagtttttacagttttttaatgtatttttatgttgttaattttttgttacttgtatattatttttgttgttgtagttttcttatataatttttccaaaatttaatttaatattaattttagcatatgctaaaagattcatgccaaataagagattattatgcatatctattttttttctcactcaaaaatatatttttatttcaattttaaatatgtttaaaatttagtattaaatcaatctttaactttggaacaaatcaaaatataaaaacatactttattttatcaataatttcctttattttcttgtaaaaatatattaatttaaattctaaacttaactaaataaataacattcttaaaccatttaaataaaataaaataaaaataacattcctaaactagatttattgtattaaatattatattattatattattatatttttcaaaatataaaatatgttgtttcctgatttttttttgaaggtgttttttcataataataataataataaaaaacattgaaaaagttttctactaaaaaatttagtatattgggtaattaaatataaattgctgaacaattataataataaatataaataagtaaaacaaataaaaagtcttgatattttttttaaactaacagatacagcgattttctctctggatgagagtttaaccagaaagatcttgttatcatcctacgactatttccaaaattatagttctataaaaaagtttttttttttttttttgaagcatctataaaaaagttaaaacagtggttttatttatgtaaagcggaaacaaaattaaaggtttattatagttattatactgaagattatctgtgctaaataattttgtgagagaatagaatagcagtgttttatattttataatcatcaaaagcagagaaagtgtatcactttcgacgactagtacttgaaaaataaaagccaaattatactgacaaaaccacaaaaatgtggtcatcactaaagtcttcaataattatcgtccagttactcctgcttttttctctcttccaagtaccaccggctcttgccatcaagaaagtaagaatgtttcactgatttttttgttcttttattcaccaatcatcttctttgttccaccctcacactcaaactattactaaccttctttttatttgttttgttttaaagtcttatatagtatatttaggatcacatgcacatggctctaaagttacacagcccgttcttgatcgagtgactgattctcattataattttcttgcttcttttctgggaaggtatacattattcgttattttatacgtgcccatgattttgtttttgtttttcttttatatatttacacattctttttattcattaattacagtaaagagaaggcaacagagtcaatcttttactcgtaccaaaggcatataaatggctttgccgccattctcgaagaggaagaggcagctgaaattgcaagtaatacatttatacatatatatgtcatatgttatattatatagtactgaagtgtt

SEQ ID NO: 27909 - DNA, 3229 bp, Cannabis sativa
ttggtttaacatgtgtaatttaaaaccaatatttgttaaacatacgaaacaacagtggaacacttaaaaacaacattaaaaaaaatatgacaatcctagagttaatggttttaatgtttctactttatctcgtcaaaattaatggttatttttcagttattctgatgttgttgtagtggttctgttcgtgtgtaattggaggtctcaattttttatttttggtgtttacaatatcaaaaaaaaaaaaagtcaggagagtaaaaatgtaaaattttacaatgtaaatatttacccaaaatcttatatttttgtgtgttgtggtgaaaatcgagcaagacaggtaagtggtaactacttttagagaagaagaggttgatcaaatgactagcactggtccactaaatttttagagaggataagatatttcatgttcttcatctttaaaataatttgcatacattttttttagattccataattataaatatatatttatatatatatgactgcaagaaaaagttaaaaaaacaaaagaagcaaaactaggaatccatgttgatgatctgatcatgagtcacgcacacatgtctgcatgtctctatctatatttatatacatatatagtttatgaaatgcaattgcaactttatgcacatggactacgaattgtattaattttcatgattatatattttatttaagctgaaaaccacaaagaaaagaaaataaatttgatgcacaaaataaattacacacacaattaaattaattaatactttattacttaaacaacaaaacataattatggaagcttttaattagtacatggtatagtcaactattcaacaaaatcacctaaagcaaagaatatttgtcctatatatataaaaatatatattctttttcattagccaaaaatgatgcacaatacatattacaaagtaaacttggcacactatatatataatatgtacaagcacaaattagaccacgtacacctgaatatgtatctggaaacttattaggagaattcttacaaagcatagagagatatatcactatcatcaatagccatatacattttctccatctccatcactcaaaccacacatatatatatataacaatatacaataatggcaaatagcagaacttatttgtttgttatgaagatggttattattttgagtttccttttcatgagattggaggcagcaagaaataccattgttattaattataatgatgaccaccaccgtggagatgtagaggtggagatgaagatgatgatgatgagatcctcatcatcatcttcagacctacgcagtgaacagatgttgcggaagttggggttcgacgtttcgaaacttgtagcagcgggaaaaagaagattggtaatggtggatagggtggcaccgggaggacctgatcctcagcaccatgcttaattaatttatacgtgtatgattttgaatattatatattactatatatacttatattgctactaccccttcttcattctatcatattcagctccatatcacttattgattatcatgtgaggatatatatagtgtagtactactagtactagtgctgtcttatatttgcaatatgggattttaaagcacgttttgagtagcaatgcatggctattactgtttaatgctacaaattaaataaattgttttttatgaactgtctcttttcattttgttatatatcatcgaggtgagtttcgtgtgttctcttttcactttttttctttttgagagagaattgatgtttcactttttgttttgtttgttctatgaatgattttacgtacgtgtgataagagtgattatataagtctgtctgcatatagtcgcgtcttattctttcaatattaatgcatggatttgattaaaagtataacgaggtcggtatatttcgtatacgtttcgatctgttttatttgatagagaaaaatggctataaagattaaaactctgctaataataaactctagtgaatacataagtgaagctgacaaatattgataacttaacttatttattatgtttagttcaaatcccaacaaaaaaaaaacttttacctaccatattattttaaaacaaaaaaaaaaaatcaaaattacacctcctcaagtttatacctagtgcgtctttgtataaataacttatttttatcagagtatagctcacaagttcaattggatctctaaaaaatacaggtcacaagttcaattggatctcaaaattaatacagccaacaagttcgtatctactctactctgttttctcaacatctttaaagttggaatactggtagatacaataattaagagttagttgataccgttgatagttaagttagttatattatttaattctagattatttcttgcttatcagctactgtaacaaattcatattttatgtatcttaaactccgatacagataaatctttatactctagcatacaaatgagatcagtctataatttattgagcactgaaagagtaaatttaatgtggtgtaatccaaataaagacatgcccgcatcagctagtttagcgttgagagtgtacaactaacagttgtaattagtaaagttgttattcaactttggttggctttgttctaaaaatttagtacacaagtaataaaataagatattgttcctactctatgctgattcattgttaatgactcaaaaattacttcttttcaatttgactattgagatttttgacttttgagaaatgaaagtaagaataaacttatgaaacaaaaaaacaaaaaaataataataaacttcaagcacaataaaataataaagaagggaagcaaattaatttattctatttagtaaaatttctaaacccacaaagaaaaagatatttcacttatataactcaaaaatatataaactcattatctcaatctctccactcaaatctcaatacacaatttgcttctttctcagtctcactacacaacaaactcacactcacttctattttcacaactcactctttttctccacacacccactctcttacacacaaaagtacatatttttaaaattacaaaatttaggcaccaagacactctaaaaattggccactaagacactctaaatttagttgtgaagactcatttctcacaattaataattaccctaaaagaaattgcaatatatagataaataaataaaaaa

SEQ ID NO: 27910 - DNA, 2113 bp, Cannabis sativa
aaaaaaaaacatactatcccctttataatttttcatactagctcttgtacccaagtagtaccataccaaatcaaacatactcaaggttctaggtaattcagctacaagattcctagcaacttcatctcatcttatacgagaaatataaccgatcatagtaaccttaccagtttctgatgattaaacctaattcactacaaactataaatatgaataccttgtccaccacatctttttgcattttacaccataagtagaattttcaagtcttagcatatcttaatagtaccaaagtataacaactaaggagtggtgcaaactttcattagagtatcatttctgagcttaacactacttgatatacacttgaattttatgacataacattccatgagttaataccaagctatctctgagctagcctgttaaagctttcttacgggttttccctgaattcatatccatcaattgagcctttttctttttatcaaataaaccgagttgaattgtcaactcactgattttacttaccacaaactccatacttaacttcgaccatgatatctactaactgaagggaaaaatcacgatggttctgaaaactcgcctgggcacttcctacttaggacttctgccaccccattagccttcttggggtaataaaaagttgtgtagtccctatcttgagctatttccaatcattacctctaatccgcattccagtctttctgagtaactagatactttaaattttctctatagagatagctctgccagctcttaagtacaagacttttgtttacaagttccaggtaatgatttgagtaacattacctaaaccccttcaattggcaaggagattgagcagtatccctaccaatttacacaaaacacactctagatccagtctagttgcagaccatgaacttttcttgatttgatgaccaagctaacactaagttgaaatcaactgtgacttcagctctcgaaaaccagtttaacatttgtttgtccatatagatcattacttcctcttaattaactgtattaaaagcgttgaaatcttagaataacctttccgtattatgatgccatagctcatacaaacccataaaaacttaatttccaataattgtttctgatctcagccaaatcttgaccaattcaaccttaccccgtgtccgtcatgatcccataatcactgaaaaccatccatagatgttgtccatacatcgtttttaataaagggtaccaaaggatatcattaacatacactgtgacgtatattttgagaaaatccttaattaccctaatcatcagatccataaaaactactagagcattgattagttcaaaaggcatatttagaaatttttgataatcgtaccttgtacagaaaacactacctgaaatgctctcttatcagattcttaattaatgataactcgagaaagggtcattcttaaagataactacatttccctaagactgattgaactgcttataactccctaacaaatggtgttaattcatgattaaaagctgatttaatatttgatagctaacattcataagaaataaattatcttccttcttaacagttaaccttggggcttcccaagataatatactaagttgaataaaccttaagtttgtcatcttttgaagttgccaatttacttccttgagttctgctcgattcactcaatatggtgcctcgaaaccatctctgctccagataccatacaatgacaaaatttattttttgttgtgatgatacttcgggaaattcttctgagaatacatctaataacttttacaccaccataatatccataaactgaattgttttggctaggttgtatctaacaccattgctaataattccacgccatcccttccatgatggatctttatcttttatcataataaaaactggagccaaaaaaccctatcccgataccataatacgaacgaaccttcactttaaagttgaaaagttactactttctgtttgaaatcattactagcaacttgtttagacaataattccattacgagtaatatctcatactctactatacccaaaactatgaggtcagtattcaacttt

SEQ ID NO: 27911 - DNA, 3712 bp, Cannabis sativa
cttaggcgcgttggcgaggagtacgacgttggagaagccaataggctgctgctattggggttggcgtgctcgcaacctgaagctagcttcaggccgcaaactcaagccatatgtcagattatcgcggagactatgccaccgcctcatgtcccaccttttaagcccgtctttacttggccttccatgagtacagtcgccttcagctcgaatgagagtagtttctcccacattttatcgaatagtgttagcagttcagctcaaatttgatttcatctcaaaattaattagcaatttatatttttatagaataatattctttatatgtagtcaatgtaatgtgggatactcttatcacatttggcattgtattgtttggagtacatatttgtttaattgtacatatacatgtttggatataagctagttttggtggataattcttgatgtgtaacttgtttttacagtaaatgtggctgtactaaaaatggaccctctcaaatgggtggatggatgcattttatatttatttggcatctagaataaaatttttgtccaattcttactacttaaaatattctataaaatttagaaaaatttaaactaattcacaatataaaaatcaatgttcaaagaatttattcacacgcctgtgttaaaattttacaaaaccctcaaacttttacgtacagaatacttcaaataattataatatgtacaatcataaaaaaaagttagactaattttttttctcaaataccaaaaccaataaaaatgtattggaccattttaaaaatgcatttcctatgttatatattgtttgttgttgtggattataattaggccaattttatgtcagttgtaccagaaaactgatcaaatggggtcaagttatttggattgatgtaatctttagatgactagtttttcatttatatagttatttgaataaagatataagtttgaatttggaaagcaagtcttttgattaatttttttttttttaaggaacaagataataatgtaggaaaacgacataaataaacacgccacaattagaataatccagctaagctaaattcattattataagacggtggatttttcactacaattaatatattatatttagaataattctataaatattaattttaaaatactaaactattaaatttaaaattactaataaaaaattaaatttttatacttaattaaaaaaatattaaaatatttatttttacactatattaattgcactcatatttatatatatttatataagaggttatagctttggatactaaataaatccaacatacagtattgttcttcaaattacatacatctgtttgttgctgttttcttcttctttatgattatatataacatatctgaattaattaaaataaacattgtttatttctcacatgaatttgtgggactgaatatatatattttaatagattgtaacagttggtcactgactcacattattgatggtgcaagtgtcaaaagttacacacacttttatgctgttaaagctacaaatcatcatttctttttgtaaagcttttatttttttttattgacatgattttatatatttatatatataaatgcatttaaagctaagagacgcgttgcttcatcatttgtgtttattaatctaagagaataatttgtttgtatagttttgagtagtaaaactttattttactgttagcatgctcactgttcaagtcattcgtacctctcacaccatgtaatctgtttttggtgtggttgttaatgattgtaaacatttactttcttattctccacatgtttctgttaattttattaaacgatcagctaatcgagttacccactatgtggctaggcactctcggtttttttctggttgtagcattcatactcagaacctaccacctaattttcaggaacttttgtattctgaatgctaaatttcaatgaagtttatatttcatttcaaaaaaactttattttatatctctgcatgtttattttttttatggtttcttttttagttgattaccaaccaaatcattacttttgactagggtggtaaaatatcataatataattatatgttctattcatattatattttatgtgacatgtttttatgtttcatattaagtgtgttaatctcgtataattttttcaactctaatccgatcccgtaaaaattgtatttataataataaaaattaaaaatgtttttaatttatattttaaaaaaattaaattttagtttttttaaattgaaatactaaatatatatttttacataaacatattattataaataattttttattttattttattttaaaaacactatgtcaaattcgtgttaaacaggttgtgttgtatttaacctgttttcgatccgcatctaatatttctgacccctaacccctaattcataaaattcataccgttaattttcgtattcatgtccgcgtcgaaactcgtttttatcaccccaactttttactagctcaaactaacaaacaagcttaaattattatcacccacgtttaattgaggaacattttttttatttggtctttttttcttctcaacataactaattaataattaattttggttacatttttaaaatatatagtttgttaaacatgtttagaggttaaaactaaaaagtgtcctgtccacactgtagtcttggcatttttaattggttgcttaaaaatttcttaaaagaatttagaagatatgatcttgtacgtacgtaatttattttctttggaatctttagaatggaaaactttgactttctgtgttgtgttttgacttttcattatcaatattccaaccgctccattccttgccaaacatctatatagatgcatacattacacatatgattaaataaataataataataataaattagtggcataaatatttaagtttacttaatacataaattatatttttagaacccgatcattaaggtaatgtagcagttcttaattagtaattaaatttttattttttttaaattaatttaaatataccaataaaaaatgacacgtgataataaacttcacacttaaatatttatttgcaatcgaaaaataacttaaatatctacgctacaaattactctaataataataataataataaaaaaaaaaagaatagtcaaaatggcgtagataatgttatttgacaaacagatttagaaaataagtatgtataagaattgtttgtgtataacatggttattttaaaacctagaaaaaaaactaagttaattaatgatgattcacatttcttataaaataataataattgttatcttaaatgataagtacatatataataatactagatagatgttacgtgctaaattacgtatgttaattttattttagtttttagttttttttaatatcatagttttaaaattaataatatccaatgtagtgataatcattgaaagtaggttaaataaaaacaaaaattattattatactttgtaatagtaattaaaaaaaattattatttgtcttaaatttattttcgaaattaataaaaatgatcatgtagttaaactatcaaaacattcaaatttaatttaaaataatatttaaaatttaattaattctaaatatcaaaatttgaaaataatttttaataaaaaaataaataatatgaa

SEQ ID NO: 27912 - DNA, 2350 bp, Cannabis sativa
tgctccagtctacaatgggatgggattagttagatttgaaaaattattccaggaatctacaaaccaaatcattcacattgaaataatatttattattatagattgaaacatttcaatgaaattaaataagaacttcaaataaatatttacgtatatacatctatattaggatatgaatttagatcttcaaaccagattcttcatttgatatctttaactttttcgttttatataatatgttttatcacatgaattggctgaacctaaaaactatttagagacttggaattacttttggcagtaaaagtttattgttatctttatatcccttaaaattatcgaatatagaagtacaatatagccttttactccataagagaaaaataaattacagaatcaaactcacaattttttcaaaagctacacggttctcttcacttcgagggaacccgtcgataagaaattttatattgtcacttgattccatctccctctgaataatcttgacagtaacttgagagggaacaattttaccttctctgatagtatttagaatcatagtgctgaaattgaagttggatattaagattacttcaaaacaaatagagaatgttctaattacacatgatcaacaataaacaagaatgagcaatggttacccatattcagtttcagaggcaatttcccttctaagcagatctcctgcactcaaatgattgaacccataggtttcaacgatcttttcacattgtgtaccttttccactacctgggccccctgagagcacaaaagaagaaactcccatcataaatacgattacatgaatcatgaatatatattggttgaacctcaaatcatgaactaaaactttcaaggcatattaaaagcacccaaaagaaaagaaaagaattattgacacattgaaactgttacctaagacgaaagttatgaaaggttttgcctgcaacaaaataatatgactgcattagttagatttgatgaccataaaattccgaaaaagcagaagcaaaagaaaaaccacacaagcaaaatcatgcaattaaatattcatgaatcaaacttttagaaaagtattaaaaagcaatacaatacatattgtatagcaacctctgtggaaaatgtttcccaaaatttgaaggtaaatgctccctgcatgtataagtaggaatcaaatcaaaatctaaagaagttaataaacaataaaaaaaaaaatggcaaacgggatctaacatgaaacaattgctttgacaccaaaacatgttgaccgcatcgacaataagataccccaagaagtacacattcacccaaactagttttccatgttacccttttgagattcaaacaaacacttacaatgaatcaatttgtacccacgtttgaaaagctagagcctagagctacacaattgggcatgagcaaatagaagcaaaacgaagatgaaattcaagggtggggctgtacctggttaagaatggaggcgttggaggaagaaaccagttgagaaagtaaagtgagacgcctccacatttgtgtcgagttgtttttgttgtgattgaggtgttgtttttacaagtttttgttcagtcaggcaaatggtcgagcaggttgcgcgctaagttgattaagtaatgttaggcataggaggaggaaggccgagtcaaatcgggggtggcaggcacatattgattagagattcgtagcttgtggaattcaaacgccgactcaccacatctccacctacacgtttactccttcaatccaagttagtttcttgggcccactcactgaataattcatgtgatttttttggtagaaagatgttgttttttttagtaattagaatttggttagaagtaataaaatggaatgaaaatgaaaaaaaaaattattttattttttttgtcgggttgcatattaaagtgttagaatattattttaatagaatggtttttctacgtggaatgacaatttcattttgaaatggaaagaaagactattccaatacataataataaaaaaaaatatatttatcatatatattttaaattttattccattcctatttctatgcttatttccattctcatttttatgtttttatttatatgtttttaatttttatgttttcattcctattaaattttttacactattaaaatatgtttgatctttttatcattttctattttaaaatgagtcacattataaataatagtaattgataaatagatacaaaataaatatttctcattttttttcctttaatgattaaaaaactaaagctaaagatataaattattataaaaaaaaagtattatattctattatt

SEQ ID NO: 27913 - DNA, 1698 bp, Cannabis sativa
  modified_base (561)..(579): a, c, t, g, unknown or other
tatatatatatctgtttcacagtgtattaaatgggagtgagctaactagggcagtgcatggctaaggtcatttactacgttcatgcctccctcgcaactctttcattctctctcctctcatttcacataatctctcttcccttgtgggaataactaccacgcgcgcctcgccacctctgttgaagcgtggcccccacaccgggaaactcgtccaactcataaatcataacatttcattcacgggctccagactttcatgttttttttccttagagcgtgaaggagcgtgtgaaaccgcgtggacctcgcacgtgcggagtctcttggaaatgtagtccgtttcgtttcttttaagtcaaaagccgcgtattgttcgatgaagaagaaacgcttgcccattccactagccaataacaactgccttgccacgtcagctggcctatgattgtttttcaaaagtcaaatccgttttcaagtcaaatgagaaccaccttctcctacaaatttacagattaaattaaggtgtcgtttggtaccacttttattttttaattttttaannnnnnnnnnnnnnnnnnntttttgtttttaaaaattttatttttaaaaaactaaaatgcgttctgtaaccacttttattttttaattttaaaaacagaaaacaaaagtgtgttctgtaaaattcattttcatttttattttttgattttatttaagtcaggtctaggtctggggtcggattcgggttcaggtcagaagccgggttcaacgccagggctgtggggagtggatttgggtctgggtctgatcggagtccaaaatattgattaagaaaaaaaattgtttaaaaaaatattaaaagtaattttttttttttgtttttaaaattttgatttctaattaaaaaattaaaaagaaaacaattttatagaacatgtttttaaaaaatatttttcctttttcaattttaaaaacagaaaactgattaaaaaattattaccaaacgccacctaaataaatgactttttaagtaaaaaaataattttttttaataaaaaaaattaaaaattatcatgtagcgattgtttatattaagtaatattttacataaaattgatcttaaaaattagaccacattacatatgtggctagactattctaataaacaacctccattagagatactgttatgggtcggttaggagagacaccacatcattaccaggcccggccctgggcatacgcggctaggcctgtgcctagggcccacctagcccaagggcccaatttttttttccccctttttcaaattatatatttttttttattgatttgcaaaaatactatatttttttaacataagggcccaattttttttttctgtgccccactttgtttcaagctcggcccttatcattacttatcttcttttctacttcttcttccactcttttttttttttttttccttttcttaaacattattagtattatatttatatttatatttatatacacataattgatgtatatttatatttttatacacttaatctatttattttttatgttaagttctgattataaatttaaagtgtcctccaaagaatttctattaaattccaagtaggactcttacatgaacacacaacatgttttcatttgtcaaatttattttaattatttaaatgttataaaa

SEQ ID NO: 27914 - DNA, 2154 bp, Cannabis sativa
cgcctaaaattattcctgccacttctactgggttgttcagggaaaggattgaattgcctccattacctctagcacctttcactcttcctatcaagcccttgtcactgatggaaggaaataatgctcacctagaagccgtagagcaattctaccaaaagaggcacgacagtaagtatgaggagatgaagaagttgaccagcaacttttcctccaaatgtaatgttgagtttgaagactacgagaaatggaatgaaacattccttcctcttgtgaacatggttaagatgatggagaggctctgtcctcgcattggaactgatttgttgccattttttgttgacctattagaattgagtgctaccagaagttttagactcagtcctgataagtttaacatgatggcaagaagggatccaatctttatagctaacgctatgaagacctaagctaatgttgtagtttaattttctaattgacttgaataaacacttcgtatttttccgttgtttgattcatttgtattttctcctttgcaagttggcttgatcgcggagagaaactactatatggtcatttaactacctatgacctagaggtgatgagggtacaacatgacaatgttgagctaagaagagaggaagcaaccaatgctttagctaaggctaatgctaagatggaggctactgtgaagcaaagggtgtttgattttatggacaaggcttcagcccgtgaaaggaaggcaaccagatggagagggattgtggagacaggtacaaggacttgcattccacggctcttaccaaaataatggagttggaagctgacctgaaataggccaagcttgatgtccaagaaaagaacaaaaagattaccaccctatctctagagtatgatagacagactaagattatccaagataaatttatcagcaagactactatagagagaaaggtgaaacaccatcttgagctccaataaaaggcagaggaagctaaggcaaaagctattcagagggctaaggaggatgagaataaattggttgcatctatgaaggcttgtgaggaatcccagaaaaaagtcaccgaggtaaacgctgaaaactcaaagttaaagggacatctttaagaggccatctcagaaaagaaagaataataagcccagcataccaaggctctagaacaggcattcgtctattatgtgtacaccatgaggcagcatgactaagctgtaatagatctcttcgatgctgaacataaggaatatctgctacctaagatattggcactagaggaggcggataaagctaaggaagcagctcaaaggataaaagtatttgatcctggaactattgttcccacaggtgagaacgtggatgactctgctcttctggcctttgaggtcctgtctctaccaactctgcgctcccagaggcctcatctgaagttcaagcctaaaatgcacaatcactataggacacagctcaccttaactattggttatcaaataactttatctttattttttattttatggggacaagggtccccctggttttgtgtgcggagacaattttttacacccttgccacggggtttttaactacgtggtactgttttactaattccatggatatttgcattttatctcatagaatttgctaagttctaaggtttcgagtctcgtgaggttcttgttccaaaggcctgaacctttaattttttgattaaatcgttagacttaaatatttttcttgtgaaagtgttcttatataaaggtttctttgaaactttgagtaactaattaacctgagctaattaattatttgggaattgaaccttttcttggtaagtattacttattttaggccttttcacactaaactttttaattgacttgaattagttagtttaagtaacctgaatactctagttgtgtaaacctaggttagccatgaagcctaaacttctattttaagttaacctaaattaacttcttaatgtctgagaatcgattccaagaataatgaggtagtggcttacttctagttctctgaggttccaatttcaggcaatactccctactcttatatttggtagtgttaaaataaactccaaatataataaggtagtggcttacttctggttccctgaggtt

SEQ ID NO: 27915 - DNA, 3002 bp, Cannabis sativa
  modified_base (2474)..(2477): a, c, t, g, unknown or other
acttgggacaagctccgaggagcataactatggtggcacaattcctgataattgatgtccctttagcttttaatgtcatgttagaccggccgaccctatatgacttaaaagccgttacatcagttatccttttgtgcatcaagttcccaacaaagaatggagtgggatgtctcaaaggaaattaaaaaattgcatgggaatgctacaaccttgccctaactaaagttaagaaggaaaatacctccagccagatttcaggcaagggaaagagcatttccctttaggaattttcccaaggcggtaacgaagacatggatccctgacttggggaaacaaacaaaaatgtagggccaatagaagaactagaagaagtggagatcgacctaaatatcctggctaggaaactcaaaatcggtaagggtttgttgctcgaaataaaattaactttaataaaatttttgagagcaaacttggacgttttggccttgtcacatgaggatatggttggtgttgaccccaccgtgatgtctcacgccctaaacattgacccaaactttcgttccgtccagcaaaagagaaggctactagacaaggaacgggcgcgagcagtaaaagaagagtttgaaagactacacgcgaacaagttcatcattgaagctttctacctagcttgagtactagtgcccaagctgaacaaaaaaaaaatggcgagtatgtattgatttgatcgacctcaacaaggcgtgtcccaaggattgttttccacttccaagaattgatcagctcgtggatgcaacagccggatatgaaattataagctttatggacacctatttggggtataatcaaatcaaaatgcatccaccagaccaagaacatacaagttttcgaacagatatgggcctgtactattacaaagaaatgtcgttcagtttgaagaatgctagagctacctactagagactagtaaacaaaatgtttaaagaccagattggacgaaatgtggaggtatatatggatgatatgctcatcaaatcaaggaaggctggggggcgcatagagaatctggatgaatgcttcaaaatccttagagaatacaacatgaaactcaatcccttaaagtgttcctttagggtaagctcaggtaagtttcttggtttcattgtcaatgcttggggaatagaggctaatccatagaaaatacaagccctcctagatatgaaatgtccaacaaaaacaaaggaagtccagagcttaaattgtcagatagctgcactcagcagattcgtttcaaaatcaacagacaagtgtgttcctttcttcaacatcctctgaggtaataaaaagttttaatggacggaggaatgcgaaaacactttccaagaattaaaaagaaaacttgaaaaacctcccgtactctcaaaacccctagacagagaagaattaggaatatacctagttgttaccgaatatgttgtaagcaccgtgctgataagagaagaaaacaatgtccaacatccagtctactatatcagcaaatgactcattaaagatgaaggttggtatcctttaatagaaaatctcacttactgcctaatcttagcaataagaaagttaaggccctatttctaagctcaccctattcgggtatacaccgaccaatcattacaccaattattacaaaggcctaatgcctctgggcgattacctaaatgggcaatagagttaggtcaataagaaataatctttcaaccccgtacaacagttaaaggagaggccttggcaaactttgtagttcagtgcacaagcaaagaagaaagtaacataagggaaaacttggagccagtgcaagagttcctactagaaaaaaaatgaagacagacctacttggaaattacatgtggacaggtcatctacaaaccaactttctagtgcaggaattgccctcgttacacttgggggcaacacctgcacggagcgatcaaatttgggttcaaggcctccaacaatgaagtagagtatgaagaactcatagcttgactaaaacttgctcgggaggtgcatgccaagtccattgaggttagtagtgattcgcagttggtagtaaattatgtctcgggagagtacgcggctcagggagagaaaatgatggcctatctaagcaagatacaagacttgcttgcacaatttaagggttacaccgttagtcagattccaagagaagaaaatgcaattgttgatgccctagcatggctcgcgagcagcacaataacagataaggccaacctagtcccaatctaattcttagaagaacccagcatcaattgtgcagaagaaatcaaaatgatagacacaacaccaaactggatgacacctataggagcttatctcattactagagaacttccaaatgacaggaacaaagctcggaagatgaagagaaaagctgcacggtatatcatagttgaaggtgnnnngtatagaagaggtttctccatgccattacttagatgtgtaataaaggagaaggttgcacagctcctatccgaggtacatgatggattttgtggtaaccacgcagcgggacaaagtctatcaaagaaaatactaaggcaaggatatttctggccgacaatgatggaagattcaaaggcctaagtgaagaaatgtgacaaatgtcagagatttttaaagatcccccgtgcactgcctaatgagctaatacagatgcaaagtccttggcctttttccatatgtggaatagatctgatcagacaattgcccaagggcaagggtggagtacaatatgcagtggtcatagtggatcatttcacgaaatggacagaagccgagcctttagcaatgatcacatctaaagaagtgttggactttgtggtaaaaaaaataatatgccggctcaaacttctacacaagattgtttcggacaatggcaaacagtttgatagccagatgtttatagatttctgtgtgacacatggaat

SEQ ID NO: 27916 - DNA, 4192 bp, Cannabis sativa
gtagataaggaaaaataatttttgattggtatggaatggtttttcaagtcattttatttaagaaaagtaattccttaatttacatgaattacaatttttatagaatggattttccaatgacaataaataaaccaaacacttgaataatttttctttaaaaataacaattccactcctacactcaattcatgtaaaccaaacactacaatgaaatgcttggctgcgggaaattagttgcaccacccaattcattgctagtggttgacgaaaccgcgtattatagtgtacggcgagctaacgacaagactcagcaaaagataattatgttttttaattatttgttttatttttgaggtaagccttttattatatccattaaaattatcatttcacacaattatctattaagaaaattgggtccaccgatgttagtctaattttttttagactaaccaaaacaaataaaagagtgcaccccatatgtatatatttatatattttgaatttttttttttgaaaggagaattaattattttgttcgtcaatttttttttttaagaattttggtgattcaatttttattaaacgaaatgctatacatgaattgacagtggcggaactagactgaggttagaatagcaggcaaagtgtatacaacttatataaaacaatatgccatgtataagtatatagaaaaattttagggtagagatctcacttttttctatgttgttagggacagttaaatattttgtatatagaaaaattataatttattttttttatcaccacctttcaatttttttttagtgaaatagcttgcggtttcgaaatatagtttaaaatagtaaaaaagaaaaagggaaattaaataactaacacaaatatttgattgaatcttatttttaacactaaattttttgaaatttttttggaaaatgaatgaaatacatgccataattataatatgcatagccaatagccattgtgaaaaaaaaaaatattagatgataacctctcaacatacaaaagcaaaacatttctatggatagacacaaaagtgatgttcctatcaggataataatatatattattaaaaaaataataattaatttcttaatataagcatatatcatttagaaaatataaaatatgtcataaaaaaaaaaaaaattggagctaattactttcttttaaaattaattcagaattaagttgagtatcgtggttggtccgtcacaagcaaatcagccaccaaatattcacatttattgtcttgtcttcttaagtggtctcactcactcagggctcggatgtaggaaccatctcagaagtaacttagcaacttttttttttcttttttctttttagtaaggaacttaggtaaggaacttaggacaacttttaagtataagaaaaaagtataagaaaaataaataaataaataaataaataatgagcaggtgaaccacttgtattagactatgagctgtgttcaataataatgctgtccctctcccccacatccacttttgacccccttatcttcttctctggattctcttgctgcccttttgtttctttatgcattattatgtgaatttgtcaaaccaaacgttttaccaaatgtattgtataaaatatgtttattattatattcatatagaatgaaaatatttaggtgggtcgtcatcagtttagttatttatgctggcctctttgtctagttgcggtccagtgttcatattgaccaactagtttgaagagatacaatgcaagagtttaattattattattattattatcactttttctatatgaggctttttaattagagatactgaagttgtgtgtgctattctttgatgtattctggtcgggtgagtcaagaagtaaaaacaggtcattatcttttatcctatagttttctttgttgggctctctttgtttatattcttaattatctataatcttctcttaagaatctaaaagctatgcccacttacaccttcctttgtttaccatttctctccttgttgtagttttattcaaatttgccattttcagcaatctaatttgttaactcagctttattttcaactttagctatgtccagttttgtggccattttgttgttttccttggttttgtctagctttaatttcccaagtattttatcaaagttcacccatagtgatattattctcataaactgtggttcatcttcaaatgtatcagtaggcaatcgtgtattcctagctgataattctgattctgagaataatatccttgtaacgtctgaaagagtttttctcagcacaaattcaacttcattatcttcatccacatttggttcccagttgtataaaactgcaagattattcaaggggatttctcattacacatttccaataaaaaaaacaggtgtttattggattcgtctctatttcttccctttcttttctcaacagtacaacttgagtttagccaagttctctctttctgcaaaaggtttcacccttttcaaagagttgcaaatagagaatggttcaaaagtcatggagtactctttaaacatagtttctaatagcctggttcttacttttaacccttccactgattcctttgctttcataaacgccatagaaatcatgctacaaccagatgagcttcttcctaaggctgcaaaaactgttggtttgcatgaaagtcaaaagaatttgcaggaacaagcattagagacaaccatgagggtgaacatgggtggtcaagtagtgtctcctcaaaacgacactctttggagaaattggttttctgatgaactctttttggtacacaataatgcaaagtttatgtcaaatataacacttgtcaattatttgaagggaaaatcaactgaggagattgctccaagaattgtttatggcactgcaactaagttggacatagatggaggagaagctgtgtattttaacatttcatggcagtttgatgttgattcaggttttgaatatttggtgaggtttcacttttgtgacataataaatgcttctcttcaaagccccccatttagtgtctatatcaactcatggtttgtctctacctacgctgatattacaaataaaaaagaagatgtggttggcgccccctattttatggatgtgattgtgaagataactgacaactcaaaactaaaagtgagccttggtcgtaatagtgctggggatatgtatgcaaatcccttcctcaatggcattgagatcatgaaaataagtaattttcgtagaagccttgatgtcttggacactttcacaattagcaactctaaggggaaagttcttgttttagccggtttggctgctggaatatttgtagttgttttggctgttgttctcttcctgttttgcagaagaaggagaagattgagacttgttggccattcaaagacagatggtgttgctgtgaatgataatggtgcttttttgggctcagaaaatgtctataacttccctctattggtgattcaagaggctactaataatttcagcgaaaacttggttattggggttggtggttttgggaaggtgtacaaaggagttcttaaagacaaaatgaaagttgctgttaagaggggtgtttctgaatcaaatcaaggccttgctgagttcactacagaaattgaaatgttatctcaatttcgccaccgccatttggtgtccttaattggctactgcgactatcacaatgagatgattataatttatgagtatatggaaaatggtaccctcaaggatcatctatatggttctgatgttgaaagcttaagttggaaacaaaggcttcagatatgcattggatctgctagaggacttcactaccttcacactggctctgcaaaggcaatcattcatagggatgttaagtctgcaaacatacttcttgatgaaaatttcatggctaaggttgcagatttcggactttcgaagataggtcctgatattgacaagacacatgttagtacagcagttaagggaagttttggatatttggatccagagtacttgacaatgcaacaactgactgacaaatcagatgtctactcctttggagtggtaatgctagaagttctttgtgggagacctgttattgatccttcccttccaagagataaagtaaatctaattgaatgggc

SEQ ID NO: 27917 - DNA, 1516 bp, Cannabis sativa
tttaagtttttggtttaataataatttttttttttattttttaagtatataaaatcaaatttcccttatataattgaaagtaattgagggaatactattacactcttttctttaatttttctgtataatttcataaataagaattagaataattataatgtgtaattacataataatattaagttttaaataattaatttattatactacgtaattattaacttatttacgtaacattaaaaaataagatttatatacaattattatttgacatacatattatattttaaaataaactataattactctcaagtgtgctaaaaatgaatttaatattttatagttgttttgccaaaataaatttaacatttttatagttgtttttactaattttatttttaagtaaaaatagaacctaaacagtcaaaaatattttatttagagtatgtatatagctataggaagaatgaaaataaaaacagaaagaaaacagaataaaataaaattcattatccagaaaaataattgttaaacttcattacatcttacattagaatatatatttcaaataaagtagtggttctacttaaatagtaaaaatatatataatttaattaaaataacatttcaatactctaaaatataatcaaattttattttattctatttcattacacccgatgaaacaaactcatcttaattaattattaaacaaattgtgggtgtacaatggtagaagaaataattataagtaataagtcaaattttagaccaactcatttctcttcaaatatacaagatattcaattggtaggtgacaattttaaagtgtattaacaatacctcttttattggtgtataaagggaccaattattgcgcatcaacaccatatagcttgcaaccattttctttctttactttttgttttcctagcaaaaataataataataattcacaataatattttattgactttaatctctgcatcatggttctaaattctaatatgggatcctttgttttttttttttaaattgcatgatgaatgaaaagggttaaatatgtaaaagtaaaaaaaaaaaacagtttgtattttttttacttttatttgatgttattagaattttgtgtgagatagtggttggtctcaaaagcgtgtcccgtgctgtttcaaatgctagctttatcttctacaccttgcatctacaaccacaaaatatatttatataataaaatgaaaaaaaactaaatatataaaagtaaaataataatattttttttatattaattaataatatatataagaggaaattatataaagtaagtgaaagacaaagagatattttaaaagttggaaaaagccaagaagacttcccagcaacttattaattactctttggtactctattattgagctttgccactgtgctggaaatagacgtttcctcgttttccaactgttcacatctctctagtcccactttctcactcattttttgttccacttcaaaaaaa

SEQ ID NO: 27918 - DNA, 4623 bp, Cannabis sativa
gcagttggatcggaatccgtgtgaagttcgtatccaacattaatttccctctcctcctcaaaatattcagagacatattgctcttcatgttctgttgtttcctcataagtcagcctatatggggatctttagccgaaatggttcgtgtagttttctttgtatgaaccaattttagcatgggtggagggagatgcttcttggcatgttttgcaattgtgatagctatctctacgtgcgtgaagttcttttcaaagatgttggacgaccaacgggctctggagaatttcttgagacttcccactcagagaaacttaacgaagaaggtgacccatttgaagaatggaacaattctactacacgaagtctcgactaatcctcgaatagtagttggagcatgccgttgtctatccagttatcatctccccagaattcacctagattcatctacaaaaggaggaagatagagaggcgaggaaccgaacaggtttaaaatgctttttcaagaaaaataatctaaatactccaaccagataggagaaaagggatctaatttggaaaaattcatccttttgacaagactcctgagaaagagaaatttaagggtcttaagaaccccataagatcagaagagccaaatataaagacaagataaaaatttcacacataaaaatttgtcacgaatcaagacaacctatacagtcagcattcgagtttatttcgttcaaataaattcaaagacagagaatctaacagtaagaaattcaataaaacccagcagtagtcatagaacatatataaacagaaatagagaaattcaagaagaaataacttactcattggttcatagtttggttgaaaatcattgatgagatggttattacagggataacaaactcaaatggctcaaaaactacactttctatttgctttgaaaaatttcaaatggctaaaaatatcgtgaatcatcatgttttagtccatttataaagttatcgaggggaataatcatcatcgaattcaaagtatctcatctcccctaaaaagatttgattattataggggtgtgtagccgccagcgcacgatctcccatgtatagtttttaaggcagagcatttaaatgccaaaaagtaaagaggcagggaaaaattttaaaccctcgggcatggctaaagtcacgtccaggttggcacgtgggtacatacacgtgtcacctagccgagtggtgtggaaacctttgaagtccctgacgaccagtaatccccacgcggacttggggggcaaatgttatctcaaaattcacactgatgatgtgcactcagcaaggtgacacatggctgacataattgaacttgggaaaagtatatctcccaattataccgatgggttagaatgaagttgaattagtcaaagtctgacccttgacaacaatcatccgagcagagccgagactaagtaaaataccgagtagacttaacatgtcgaacagctctaatggccgaccaaaggcatgcgctgagtgaagatctttcatagatttcttcattaattgtttcctcaaatgtagctcaattaaatatttattttcgtaggattcactgattagactgagataatggtgggatttcagatttaactccttgattttttctctttaatatcaggaattatatttaatatctcctataatttaacaacttatttaatttcacttttcctataaatagtgaaactatttcactattcaggggaccttttttcccattctaaaagagcagacactctgcaaaaatatttgtacacttttcaagagctattcaaaaactcacctggtcgaccttgtgatcttgatagttcttcataataatacaacaaaaaggggagtagactattaccataatcaggggttgaacctctgtaaatattgtgtgttatttattgttcttattctattattaattactttacaaacaatgtcgctttaaaaactttgtgttgttggctaaaagcgaggtcaacaggcttcattgtcaaagcgacagagaaagatggagcgggaaaaattagagacatggtggctcacggtggtcgctggggtcaggtgagaaagagtggaggcggtcgagtgggttggtgggtgagagcttgggtcaaacggagatggaaggggccaagttgagattaagtggggtggttctagagttgaggctaggaggaagaagacgaaggggaagggtcgtctgatcgatatttgggatttgagtttattttttggtgggaaatgagggaaataagttatgaagtttaatatttggggttataattagcgtcggttagcaataaatgttcaccactttagcatcggtggaaacgcataggtggtttgcgtcaaatgctaactaacgcaaaatgtgtgtgtgtgaatatatatcaaattttatttttagcgttagtttttattttagtgtaagaggtagaactgacacaaataataattaatttgcattggtaagcaaaagagcgatggttgacttttacgtcagtcaactagtttgaagagacgcgttgaccaacgcaaaaagtcatttttgtaatagtgcatgcttggctgaaactcaacataaatactgcctatgatattgcaaacaacaagataggcataagtacaattgtgggagatagtttaggtactgttgtagctgccttatctaaaccaattgtcgggaatttgagaccagtggcggacccaatgaaggataaggtggggctcttgcctatgctcatttttttttcttaatgtaaacaaaagaataaatttaattatgtagaatagaatagatgttcgcccttcgaaataaacatatatagttacatttgtgtattatattactgttatattttgctcgtgcttgaatcaaatcctaggtttgtgagtatttgcggccacaagaaatggaaactaaagcaattttcggtattctttgttgggcttctcaaattgagcttctttcacttatgttgaaactgatgcactcttagttttaacaccgatcaatacaccttttattgttatttcttcttgtaatgatttaatagcagatgttataagtctcttattctctttcttttaagtcgttgtttctcatgttcgcagagacgctaatagtgatgctcatgacaaagcatgttttagagttggatagtaattttatttggttggaggaaatacattccccaatcttttatgttattgttattgtaaacgaatctttttaatttatgatcacagatctttttctgaaaaaaaaaaaaatgaaggtgcatgagtgactgtgatatacgaaaattaaagttagtaactttaagcagcgtgtaagtggagcgtatacattactaccaacaaaatagggagcgcatgctacattcagtaaccgctctctattttctttcctgcataaagggtaaaaagaaaaatgggaaagatattaattatcttttctggtcaaagctatgaatgtgaagaaggtacacatgtcccaagtcactttaaacagaattagccaaaatgttacagctagctttagacccaaagaatttttatataataataaatatgctgctcttgagaatagaattaataaagaggcgaaaataaaatgaaattgaataatggagatttttaaccaagttattttagattttaaaccggcctgttgtataaatggaagatatcttctaggtattattaggactttctgaactgttgactccagcttctgtctctgtggaagcatgttgctgactctgtgaatctgccaagtagacaccaaaattcaatttccttacatatttataaattctttttcgttaattaccaaaacattgtggggtctatattaattaataatatatagaaaaagtaacttcttaagaaccattgtttaggttcatctagaaatccaatacatatttatacatatcattattattatgattaacaaatatatacctaaatgataaatattgtcaattcttaaacttttttagtataagtacttgttgatgtgtttttcaatcaattacgcattaatgttatcgatcgcatcatgttcaactttttttttttttttgtgtttccttctctctgttaataattttcactaccaaaatcaatgataacaaactatcatgacattgcgggaagaaatatataatagataattataaatgatgatcaacaagcaggccggtatgagaatttaagattattgagaaatgtcaaatggttagttagatggtcctgcgtgtttttattacacatgcatcatcactatcatgatcagttcagttctgccacacaccatgtttccacatattaaattcttaacttaaccttagaacaatatatttacatgctgtaaactgtctcaagaaaagtaagcttgtatagctctagaaaaaagtggtataatctatatatcacctcatgttctaatttagagaacaattaaataccaaaagtcacatgcatttttagttgttccttgctattattaggagtagtgtgaaaacatgatgagattttatatgtttttagtgtcattgaataattaattgaaactaag

SEQ ID NO: 27919 - DNA, 3346 bp, Cannabis sativa
atatttatagtttttaccaaaaatttgtctctaaatgtcaattttgaaccaaacaagcattttaacttctcattttataaaataaattaaaaaaacaacctctaaaaattcatattatagtagtgatacgaggtaattccttaaattttaatatcataatacgctctaatatatgttgacaaagcttcttcattacttgataagctatatgtcgcttgtttgttgtacgtgtccaaatcaaaacgagccacgtgaaactttggtagcatatgcttttttcactttttgtatttatctcgataagtattattaattcaacgtagtctgcagttatactctggaatcttttcttttttaatatttaaaaacaaatctagtatacattctatcttttttccttttacaaaatttatataaatcactttagctaaggttagtatgtctttattctctgagatgaagactttatagaatttattaaggtctatacagattattaattatagaggcagctagttatatagctaacataattaaagttaggttttgggagagagttttttgatatatagtacagaagcagcagcatcgctagcaataacaatattatccttctagctttcttatatagcctcttcgcttctctctcctttttttgggccatggtgtactctctccatccaattataacacaacaaacctaaggctaaatccacaccctttattttactctcagtgatcttgtaagctctaccttcttcttcttcttcttcatcatcatcatcatcattttttttccgagatctgaattattaataggaatatcatatatccaaatatagattctgtttagggttatatcgctagaaatatctattataccaaaaaaaaaaaaaaagaaagaaaaagatcaatcatacataataatataaatatatacatctctttaattatgtgcacatccatttttctcttttttcgagcttttatttacataattttgttatttttaggcaaattcagatgctattactgttttaatttgttatgaaaattccttatgctatcatcaatatttttcgtaagatatatatgcatattaattctccaacagtactattaatttcttgctcacatttattttcttcagttaattattacaatacataattcgtcgaaattggcaaattgcaccctatagcgctgctatgagaagaaagtttatgcagaaataatgatcccaaattcaagaggaaaatcaggtttcccagcagccaagcaagaagctgcaggggacggtggtgaggatgaaagcggcgtcggcgggggcgggggcgggcgcaggagcggcagtgagaggctatttaagataccgacaagcagtagtactagctcgagacagtggtcatcggcagggttccgcaacccaagaattgtgcgagtttcacgcacctttggcgggaaagacagacacagcaaggtatgcacggtaaggggtttgagggacaggaggattcggctttcggtcccaacagccgttcagttatacgatctacaagacagattggggttaagccagcctagtaaggtaatagattggctaattgaagccactaaaaacgacattgacaaactccctccactccaaatccctcaaggttcactacttctaagccaatttcatcaccatcataatcatcatgaaacgacaacaacaacaacaaatcatccagctatgatgtttgaaaacaaagatcggcatcatcatgaccaagatggggggatcacccaactctttgctcagaagttctttcccttatcatcaagtagtaacaatcttagtcttaattctactactcatcctttacagaacggaactatgtcctttgaaccttccaatagtaacaacaacaatctattatcactttctcatccttttggaagtatcaacagtagccaagggttttcgttaccccaaatggatagtagtagtaatactactgggtctcacttatttttctgctctcctccaaatatttcaaacccttatatctttaatccatatcctccaccaatatataatagtgcttctagtggaatcccagttcaagattttcatcaccaatatcatactactacttcttattataactctctcatgccttcactacttcacaatagtactagtactagtagtagtactgctactaataataatattaataatttatctttcagaccatcatttcatccggccatgtttaaccctaaacttccttcccaaagtgctctattccaaaatcgaccagatgaaaaggaggatcgtatgtagcttgatttagcaaattacataaataatcgtaaatatagagatgtacagtgggaatgcataaactatatatgtatgtatgtgtatcttcgcatctcatttatgatcatgatcaatattgtatatgtgcaaatcaaggggggtgtttcctacttcagttatacgtccgtacgtatcttcgaactgttcttcagtctgtacaagtaaggcatatatatatatatatacatacataaatattgggatatttatagttcttcaaattttaatatgcttttaattaaattgtaattttcttcatacgatggattatttgcgagataattaatgtttgttgtgagcatatgatcacaatttcataattatatacaaattttatatgcatacatatatattgtgataaatttataaatgtttattgcgtaagcactttcatatatggttagttgttataattatatgtatgttatgtaactaataagctaattattagtgcatttcttttttcatattgtgtatgcattatatacatatacatataaaagaggaataaattatatatatgctgaaaaaggagacagtgattatatatattgcaaagtgatgaataggattttgaatggtcaaaatgtgaatcaagtacagaagcttcttttgcagtgcttttctcttgcattccgaaaaagtgaacagaagattttcataatgctaattgaggaattgattgctctcttatatagcaaatagtttcatggtatggtataataccctttctaaataaatatatacagttattatatacttaatttaagtttgctttttactaaattaaagaaacattactgatcaaaaagctgaagaaaaagggtcacacatgcatattgatctgtcatagaagtacgatccatgatattatatcgtcaaaaaatgtataaacgaggtcaatttttttattcaatataatcactttctaaaagttcaaaataaactaacaattagttaggcatcctaaataat

SEQ ID NO: 27920 - DNA, 1925 bp, Cannabis sativa
tgctcaaaattctttggcaaagatttgtgctccagccaaagattatcaaaaaggaaaggacaagggccccatttcggtggatttgaatctaggataactgggctatgatcagatactattcttacaagcatctcttgtcttacataagggtaggcaatattccagttattagtgagcaagaatctatccagtctgctacaaatgggcctttctctgaagtttgaccaagtaaattttcaattgtttagcttcaatcaatgaggcgtaattcccgaatcaagtcatcgaagattgtcatactctttgttaatgatgtactattcatcctttcatgtactcttctcactacattaaagtctccccctaagcaccaagaatcgtcccaaatcgaacttagtccagtcacttcatcccaaaaatctgaccttgttttataagaacaaggaccataaatacctgagaaccactgagacactttcccttcagcttcaattaggatggaaatagaaaaatcacccaccaatgagtctaggactttgatgttctagtatctcaaatcagtaaagtacctcccgatctcccaattgatggtaaagttatccatgctttgaaccgagatctccatagactcccaatgaagtttctgtcaaccacttcctttttgacttcttgaagaattactaaatccggattaaacttgcaaattgttgcctttatagccctccacttctctttctctccattacctttgatgttccaagacattgcttatttgctattgtttgtttgttctatgttttttgtgtaccaaggagttcattgctttcttttaaattttggggggttaatgaaatcaatttatgtagttgttgtgctaaagtttgggagggctcgatgatatggtttcatttgtattaacctagctcatgaggatatgtgtgttcatggagaagatcgtgccttggagattgttggcataagtattatcaaattgaaaatgtatgtttgtatagttcgcaccatccaagaggtaggacacgtgagtgaaaggagtcattttcttcataagttttaattgttgtttagatgtgttttgtgttgggtatagagtataagttgtaatggaagcagtttatgtagttgttgtgctaaagtttgggagggctggatgttatgattttattcgtataaacctatctcaggagtatctgtgtttcatggagaagatcatgccttggatattgttggcattagtatcatcaaattgaaaatgtatggtggtacagttcgcaccatccaagaggtacaacacgtaaaggtgaaaggcctgaagatgaatattgtctttggagtaattagatagtaatgggggcaaaattcatgtacaagatgggattatgaagattgtaaaagacgcacttgtgataatgaaagcagaattggtagttgcaaatacatgctcaaagcagaaacacattaagaaggagaagtgtccactccttcagcaggtttagtaggagaatcaacaatgaaatggcatcataaacttggccacatgtcgaaatgaggtttgaagattcttgctaaacaaaagctactttcgggcctcaaaaaggtctcattacccttttgtgagcattgtcttatcagtaaggagcagaaattgaagtttagcaggtcaaggtaaagctatctaagaattgatccgttttgatgtttggaaagcatcaattatgtccctaggaggtgcaagaaactttgtatcttttattgatgaatgctcttgttgggattatatgattatgtgcccaaagaacatatatatagataccaaactggaaaaagccaatctccaatttgcattgtaaaggtagaataagtcaatttgcattttgacaacttccaattacttaagcacttgcttc

SEQ ID NO: 27921 - DNA, 2463 bp, Cannabis sativa
aacaaagatattgtattatgtagcttggaagagtaaaacataaggacaagcatatgaccaaagaagattatccatctaagatggttcatctcagttgtaagaaaaacaataaagatataatactatattcgtcagaatacgagtttagggtaggaatgcacacaaagtggcgaattagcggaaagtgcatctcacatccccatacaactatttgttttaataattttaattatcatctgtaactttcatttttgcatagcataatctcaattagctagggatagggctggtgaggaatcacaggcccggccttgggcataggcggactaggcctgtgcctagggcccactcagtccagggccccaaaatttttttcttcttttaaaattatacattttttttactgattttgaaaaatactaaaattttttctaacataagggccaaatttttttttccctgtggcctactttgtttcagggccggccctgaaaatccctatggggacgaagaagtgaacaaaaaatccttaccgtactaatttatttataaataaattgtatactaaaacattacataagaattaagataatattattttttattcaaaatgctaattattttcttagattattttttaaaaaaagttataatataatataaaaaaacataaggaaatttcaatattaaaattattgttgagccaaactactcgatcacagctgcaacacactaaacttttcttaatcaagagcaaaaccgattcaactaatttgaaccttctcatcaccaaaactcatgcacttaggcaaattaaagagagaatagtaactttattaatttatgtgctctttacaataggatgaatcggtcattacaattggaaattgaacctatttatacacataggctaagtaaagtaatgtacagaactatactaacactaacatccacttaactaattagctaagtgatcctgtacatgtggatatagtattagcagacatctaaataacaaatcttcaccttgactgctaatacacaaccactaaaattacaagaattcaaatggtgtcaatgataccaagtctaagtgacattgagcatctttaggcagtgatgaaacttggttgcaccaagtgatttcgtgagcatattagcaacatttttctttattgagaccttgcatagtttgatatttcctccattgatcacattttggatgaaatgcaatctaacattgtatcaatgtgcactctggctatcacaaaagatgttgtcaatcttttggtcgaggcctagttctcttgtgattcctttcaaccaaatgctctccttaacagcttcaggttaagctatgtactctacctcattggtggaaagagctaaaatggtttgaagattagctttccaactggttgtacaaccatgtagcatgaatacaaaatttgactgtgttcttcttgtgtctagataccaacataatctgaatatacatagcctataacaacatcaatatttttgtttagactatatactaatcgagtgtttatagttccctttagatatttcataatcacttaacaactttctagtgctcttgacctggttcgctcataaattggctcaccacactaaccccatgacatatatcaagtcttgcgcataccatgatatatatgatactttctactacactggtgtaaggaatagactccatgtagttgcatttttcttctggtgtttgtgagcatgacagtctaaattgttgtgacaagggtgtgctgattgttttcacatcgacaaacccaaacttgtcaatgattttggtaatgtatctactctgagacagctttaaggttttgatttttctgtctctttcaatttcaattcccaaaatcctttttgctggtccaatgtctttcatcttaaattctttgttcaacaacctctttactttgtctatttcactcatatttttgcttgctatgagcatgtcgtctacatacataagtaggaacacaaggcacttctcattcttaacatacccacagttgtcaaaggtacttcttttgaaatcagatttgattacatagtcgtcaaatcgtttgtaccactgcctgggtgactattttaaattatagagtgatctttttaacagacaaacatgatcttatttccctttctctacataacctggcgattgcctcatgaatatttgcttcttgagatcaccatgtagaaaagcatattctagttctaagtccttaactgcaacaagagttaacgaaattcctattgaagtttacttcacaataggaaaacatattataatcaataccatctctttgtgtaaagcctctagcaactagtctagctttatatctttccatctcaacatcgtccagtccctctttcagcctaagaatccacttgcagctcataatctttctaccaacaggg

SEQ ID NO: 27922 - DNA, 2291 bp, Cannabis sativa
aatctaagtaataagctctcttttagacaaatttgaaggattaccatgattattcttggatctgggaaggtcaataaagaactctgtgtgaagatcatatcaaaattaaacagtgaggaaatgtgtaaatggaagggattctttgaagttcttggtaatgttaggggccctattgaatcaactgcggtgcaagcttgggagatgtctgtttttcttaggtccgaagaagctttaaatagtacattcgaagccaattggaggacagttaacgactacatatctccaagttgtttcttgtatcttatcgaatactttctgcttttgttgtcttccttccacggttatttcttatccaccaagtctacgtttgttgaatgtcttatataccgtgcaaagttccttaaactcgctcaaacatcccacaagcttcgattcatttcagaacccttacttcgaaccttaaccgcagtagtccaagaattccttagcaataggacagatgcacttcagtggataagaaaatctaccacagcagtgatggagcactactctgtgtttgttactagacttgttgtgctgacatgcttgctctccattaactttggttcgtgtactgatttacttatcgatgtgttgaggaagagctacataactgaacaactaccacacacattctgtgttatcctccagagattaaggacaaacaacagtgaagctctcaatgtgaagttgattgccaaagctctcaagaaaatcgacaatcctatggtgatcgtgactttatggagaaagtgtccgttcatatcatcgtgttcagatgctgcgtgtgtaagtatgagttctgatccccccaatgatgaaatcttaagaacattgtttccagataaagatgagggttcaatgagctcggctgcggtggaagctagtttcgaggttgacttaccgtcgtctgaggcttgtggaggtagcattgctactactgaaggagcatcaagtagcagtcaaaatgtgatgggaagtaaaaagtccaagaaaaaccaaaagggcaaatctggaagaaagaagaaataggcttgatgatagttagtttgaattggtagttatttaagtcttaagagagaacttgaatatattttggttatattatgaatacaactgttgtgaaacaatttatgtgcggttcttagtgtgagatagagtttgttattatcttaagaaagttacttatttggacacatttagccactcaacctaattacctgagcagattaaaattaaatgaataatttgagtaattggccaaaaataaaaatgtaatttaactgatggtttttttttttttaaagaactattagttcaattaactagaaaaatagatgggaatcacagtgggaactccctccccttgatacaaaacagcttgatcattagcgactctagcgctttttggcataccatctgccaaagagttaaaactataactaataaaaaagaacttacacacaacaagttatattatgagaaatgctaaaaagcaccagtggtgcctagcaccctcttatgcgtcaatatcgctattggtccaactaagtatcgaatctcatataatttaatataatagtttatagagagtatcgctagctaatcgcaatgcgacatgtcgagaaggtgctaggcaccactggtacctaataggttatattatttatcttgatcgaaatctactgtattggaattcaaagaaacaaaaaagtatagcacgttcttccaccaaagatgaattttgaccaattgcatctactaactactaaggtcctttggttgcattctctaccaatttatgaactttgtattccaattggattacccgcccactgatggagccacataataagatagggactgtagccctcccaacaagaaaatttagcatagtattattaaatataaagtatggtcttttaatataccatccaatttaaaatagaatatttatacttttaatatttttttctctcaaaaataacttcacatttcaaaaaaaatctctctttaactctctcactttccggcatcgaactcctttccagaatcctctctgtcgaacccagaaccccaatcatttttcagtctaatagtacaaatacattgctacaattatcactaaacatcactaaatacacaaaacatcattaattatcactaaacttcatccataacttcatattcggtctattattacaaatacaccattaaatattgcaaaaaattaaaaaactagaaaaaaaatg

SEQ ID NO: 27923 - DNA, 2915 bp, Cannabis sativa
  modified_base (2685)..(2685): a, c, t, g, unknown or other
ctccctttgtctaaccaagagttattattcaaaaaagacaaaccttgaaacaaactagtgcacaatgccccatattcttattttccaccttagtttcgaagagactaaccaaaccaacacccttcgaatacatcaattgcttgatttcgttgtgtttttataggttgttaatccctctaacattccagcaaagaaatctatccattggaagtagaggatctccccctctccaatgttagccaaatttctctactcagttcctaaagactcaaacctgttgttcactgcagtctcctctatttccttttccatcaccactcttttgcctttcactaccttttgaaaaccttcagcatgtacttgtttctccttctccaccttcttctgcttaggaacccaaatttgtttcccctgctcctctttagtcacttccttcctatggaactcagtgttatgtcctatccccgaaaaactatagcatatcgaaggtatccactcatatttcacctccaattctacgtcatgattatgttcatctatgaatgaaatcgtatcagagaaagttatcataattttgataaccaaatattttaatgtatcaatgtttattttattttaaagataaaattatatattttttaaaatttttgaaataattaaaagtaataaatctataaatcgaaaaagtaaaaaaaaaatctaaaatttcatttatgcataatttttttattttttcacatttaaaatccaatataaagtatacataaaatattttttaaaaaatattattgtacttatgtagtgtcatacaacattccatttaaattttactataaaaattacttatgatttttaaaaaattttaatttataattatctaatcaattaaattacttaattcatttcaacaaaatgaatatatttagttcaagttttaataatagagaataattaaattataaactatacatatttaaaaaatatttatgtatatctcacacatggatactgtaaaaaaaactaactaaataaattaataaaaatagaatattaataaaaataattaattataaacaatataaaaaatctaaaaataaaaaagttctaaacaagaaaacttagagcattttcaatagagatgcaaattaataagtgatacaaagctaaaatataactaatttagcaaaaattatgctccaattgtatcctaaatttgcatcgtgtgccaaaagtttatgcaaatttagcacaacaaatattatgccaaatttgacacgacattgcttataatacaaaatttacatcataataagtgcacaattttattatttatttttattattttattagtataaataccaacagtattaattatgaactatttatattctattttattattttacattaaaaatgaatgataaagttattatttttgtacttgcaataaaaatattatatttagcatcaagttttacaaattaccattaagcattggattggagcacaatgctaaaaattaatacaaatacataacaaagttttttttttttgccagtacgattttacatctcccactaaagatgttcttgcaaaacttttgtataattaaaaaaatttgaatcaaagttaataaagatatgtacacattaatagtagaaatgttaagttaaagtgtcaagcattgtaaaaggtagcattgttatttgtgcatttcaatatttgctcataaaaattttaatttaataaataattcagaaaactaataattaattattgggtactatatatatatggtattgaacaccttaaagaaataaatttaaaaatttaatcgaagttaataaagatatgtacataataataatgaacatgttaaaagtcacattaagatactaagcaccacaaaaggcagcacactgcttaatgaagatataaacatattaataacgaaaatataagagttacattaaggtgccaagcaccacaaaaaacaacataccgttattaatgtattttaatatcaactcctataaattttaatttaataaataatatgaaaattagtaccacacattagtgtgatattgagcaccttaaggtgtcacataacaataataatacgaaaaattatttaccaaaaaaattacaaagatcattttttaaaataaataaataacaaaaaaaataaaaatgaaaaaaataagtgttttttgtttgtttttattgaacatcaattcttctgtgttgttagatttaacccacatagtattatgtttgattattcatatctttattttattagtttttatgttgtcaactaaatatgttatgacttttgagactttgtttttcaaatcagaatttctatcaattttatgtatatggagatcatcaaccttatactaatttttttttttttttttttgagaaagaagatcaaagacaaaagctaaagctgggctaagatcttcaaggagaggaactgaaatggttccaaattatctctttgtccgttcccagggctgatcgggcaagatcgtgagctatggtgtttgtagaccggggaatgtaatggacgataacacctggaaaagacgacaaagaggatacgatcatggcaacaagacccgaaagggctgaacgatttggagagaacttctggatacggtgcaccaagttctngcagtcggaggcaataacagcaattggaaaacggactgcttgacaccaaagtagcgctcggttgagagcttcagcttcagcataaattggggggagccctgaataagaaggagccatgaaagttgcaatgactttaccatgagaatcagttactgcagctccgtacccatgcttgttggtagattgagaaagggctgcatccatagaaagctgaaactttgctcttggta

SEQ ID NO: 27924 - DNA, 3840 bp, Cannabis sativa
catactcatgagtatgttgaaagattaagggaaataagcaaagcacaacttatttcaaaatctcaaaagactaagtctaagagtttccctagaaaggctatagcgagaataaatatcttaaataacatctcgtaaattgcaaactactatccttgaacaccgttgaaagaagatacaagccatacatggtggaagaatgtgttacctcagcaacaaaagactacttccagataagatcaaaagacggttatcaatagttatttcattttatctacattttgtaaaaatgtggggattgtctacgtttcatgaatggttatcttattacgatcgaaaagaataattgtcatagtgaaaacccctataagaacctaaggggaaatagatctaccattttggaaaggaaaaccctatgagaattaaataaatactcataattattcctcaataatccatatacataaccaagaaatactcagatataataaagactcggagtatgtagattttaactaaaaagccacgtaaaaacatttagtgtttcatatatatatatttattaattataaaaaattaacttttatctacaaggcttcatttattgttaacaaaatttcgagttaacaatttagtgtttttacttaagagcctttgtaaagaaactcgaaacacatctcccctttatttcattacatcatgaaaaatactcaacgtgacgagtcagtcatgaaagaagagacaatacgtcgaccaggaaaagagcccagggggcacaaactcagaccaaccaaggaaggggtcctactgagaggaactccgagagaagtgaccctgatgaagaaattcctgagagaagggattcagattaatttgatcccacaagatacgtccccattgtggagttaaaagatcgacaactctgtcgaaggcttgtagaatccagtcaatgaaataaggagttggaacgggccatgggtacagccaaagtgactcaaaatgatgcactgctagtgcaagaagagcaacttgcacgatgccaacgaggaaggccccgtggttcatgaaccagaagggcacaaggacccaacattgaagaacaggagccaaataatcccattcagcccaagagcaacaaccaagggaaacaagggacgttcctgttgattgataaggtccccagaatcaggatgccacaactttgcggtaaacgcaagcaaggggacaatagacgtctcaaagaaataatgaaaatacaaacaatgaattgcctaaccggtctggttgtcctccacatccccctcaaggacatgggagagaagaaagaggcagtatgtatacatactcaaatagaggtagatttgctaacttatttgaatggcgaagacctacccaagaatcaccacaagaattagaggctaatacagccaagagtagatcaaggagtcaagagcaaattccttgactaaaggcatgtcataacacaagttcaatgatcataaagtaaatatgggatttagttaccccttatgtagtttttggtcgtataattaaaattatttaatgaaactctaatttctatattttttatattcacgtgcaccttaatttcatttgagaccagaataaacgtaatgtttagcgtttgttcacttaagtatattgtcaaataaagaacattgccatataatgaatatatcgtaatacaaagaagataatactcgacatataatgaggacctatcgctacgattcatatcgtaaaacgtatcatttctgtcataagagcagtaagatcgctagataagcaacatatggcgagatgataacaatagaagtcttctcgagtgtaacaaattgaaattatatcgcctgaaaagggtagacaataatatctttaagtacttgcaactcattgacccacatactcatgagtatgttgaaacattaacggaaataggaaaaacacaacttatttcaaaatttcaaaaggctaagtctaagaaccgccctagaaaggctatagcgagaataaatatcttaactaatatctcgtaaaatgcgaataactatctttgaacaccattgaaagatacgagccatacttggaatgtgttacctcgacaacacatgactacttgcagataagatcaaaagacggttattaacagttatttcattttatccacattttgtaaacatgaaacgtggggattgtcgacgtttcatgaacgattgtcttattaagatcaaaaagaataactgtcatagtaaaaatccctgtaagaacctaaggggaaagagatcgatcattttggaaaggaaaaccctatcagaattaaataaatactcatagttattcctctataatccatatacataaccaagaaatactcaaatataataatgactcgtggagtatgtagattttaactacaaagccacgtaaaaacttttagtgtttcatatatatatatttattaattataaaaaaaattaacttttaattacaaggcttcatttattgttacaaaaatccgaattaacagtttagtgttttcacttgagagcctttgtaaaaaaaactcaaaacatatctcccctttatttcatacatcatcgaaaatactcaatgtgacgagtcggtcatgaaagaagagacaacatgtcgaccaggaaaagagcccagggggcacaaactcagaccaaccaaggaaggggtcctattgagtggaactccgagagaagttaccctgagtaagaaattcatgagagaagggattcagatgcatatgatcccacaagatacgtccccattgtagagttagaagatcgacaactccgtcgatggcttgcagaatccaattaaagaaatgaggagttggaacaagccatggctacagccagagtgacgtaaaatgatgcactgctagtacaagaagagcaacttgcacaatgacagcgaggaaggccccgtggttcacgaaccaaaagggcacaaggcactaacatcgaagaacatgagccaaataatcccactcaccccaagagcaacaaccagtggtaacaagggacattcttgttgatggacgaggtccccagaattatggtgccacagcttcgcggtaaatgcaagtatgggaacaatagacgtctcaaagaaataatgaaaatacaaacaatgaaccacctaaccggtctgattgtcatccacatccaccacaaggacataagagagaagaaagatgcagtatgtatacatacttaaatagaggtagattcgctaacttatttgaaaggcaaagacctaccctagaatcaccacaagaattggaggctaatacagccaagagtagatcaaggagtcaagggcaaactccttgacgaaaagcatgtcgtaacaaaaattcaatgatcataaaggtaaatatgggatttagttaccccttatgtagtttttggttgcacaaataaaattatttaatgaaactctaatttctatatttttttatattcacgtgcaccttaatttcgtctgaaaaaatatcgtaagaagactaaaataaacataatgtttagggtttgttcgcttaagtatattgtcacataaagtacatttctatataatgaatatatcgtaatgcaaagaagataatactcgacatataataaggacctatcgttatgatttatatgtttattatgtaatgaagaacgttgagtttaaaatataaatctcaatgcagaacaagtgagagaatattagaatattttttattttaagaataaaatcattgaactaatttaagataaatgaatattttatgttcattgaatctggaca

SEQ ID NO: 27925 - DNA, 1189 bp, Cannabis sativa
atttggtttcttttcgtattgtaacacctcagagaactccttgtacaccgtagacaacgatgctgctttttctggcacagggcggtggacctgaccaactgcttgcaccggcggcggcgccaagctctgagccttagctgcggttgcggctgctgtggtgggtcgagctggaactcaggcgcagccgtcagcttctgaacaaggtccctgaagttaatggggtccactctgtacactcgaggcggattcggtggaagaggagccaccagcttcttccatggcttagccgttgcagctttcttaaccgagtgcaatgaagaagagtagtaagggactttactagtgtttgaagaagaagaagagtaggaataagcttccatatttgttattactattattattattatgtggtgttttatttctgggttaattattaaaggaagtgaaatggagtgaattagagagaagacagttttgatgttatatagaagtaaaatgagagatgaagttgatttgaataagaaagtgttgatatttattgtcgttttttgtccttaaccgtcggcgggaagtggatcgctgatgtaataataatacaatacaaatagcaaacaactactttatggtcaaaatactcaggtttgactttcttctgaaaatttcaatcttccgccaactatttcccaattttgatcttgtaaactgttttaatatattgtttttctttctatttaatagcggcggcatttgttaattgtttgtttgtcgttcttaattaataaaataccaaattaattgttaaaacgcagatgctcctttgcttggtggctttgggatggaatggaatggattgtggaccagtccagtccagtccggcccagctcagctcagccgcctcttgcttagctcagtaagccttataataatgccacacaagtacacacgtgcatttttttttttgttacttctttgaccacaacatataataattgaccatatatatgtattgagatttgagatatgcccacccaattaggtagtaaatattacatacgatgcccacccaattaggtattaaacattacatacggtcgcaatcatttttatttgaaatagaatattgtttttaaaataataataataataatcatagtaatagggatttaatcatgtatatacaaataaaaaa

SEQ ID NO: 27926 - DNA, 2760 bp, Cannabis sativa
  modified_base (267)..(273): a, c, t, g, unknown or other
gaactttttagctaattaaaaatattttttcaactatttacaatgttataaaatggacactttattagatttgtcacttgtagtaaatagaataataatgtgactgtttagacaattatcatatcaatattttgtgtataatataatttaaatattttattttaaaaatttattaaattaaaaaggggtttttacaaaaaatactaaattttgaataaaactttacaatttcacagtaagaatattttttacaaaaatactgtcttnnnnnnnaacaaccgtaaaacaataaaacaaaacaattaaaaccaacagtggaacaactaaaaaattaactgtagaacacaattgaaaacttaacacaatacagagaataaaaaatacatagtatttttgaaaaaaaaaacacaatattttttttaaaaaaaaaaaaattcagcccatagtaaaaaagaaaaaaaagtgacaaatttcagtatgtggtgtaaaaaatccaactaaaaaattaattaatgattaaaaaaattacttaaaactatattaaaatttttaagattattttttaaaaattaatcacacatgtggcattaatatgacacctatgtagtagttatttaaggagatgctacattattattatatttgtcacgtgataaaacttaaaaaaaattaatttacaacattacgaatagaataatatattagaattctgaataaaaattaaataacccattgtatattagtcattttttttaatgtaacgtaataatattttacaatcaattaatagcttaataacttaaaaatcttaaattcgaactcatcacctctcctttttctcatctctctctcaccactaagctaaccttagtagcttgattttatattactcatcgcccattataatttgtcccttatgaattcgatcaagccaaaaatatatgataaaaaattgaacaagaaaaaggaaaactacatatgattactagctagcctagccatttaatggatgagtttatataaatttgggtcctctcctcatttttttattttttaatactagtctcacattcaaataattaatttcaaacttatattttaatttttcttttcatttttttttatatcctcacaaactcgttcgcaataacgtatacaggataccaaggattgttcaaataatttttttttaatttattattgacgaattttaagctcaatatcaattttttttatatatttcaacaataatacattaattacgctcaaaatagtacaaatcctttctatatttttacatgaagaaattaaataaatctgtattgtactatagagcatgctgatgaggctatgatgatcaataaaaataggttggaatccacaaatttaaattagggttttgattaatgagccggccgtcctaccgaattaattaattaattaatgtccataacatttcactgaaagtaacatggatttgtccttacaagtacttttcttttgtcaaactaagccgagaaaaaacactttatttgcaaatttggttttgttagaaagataaaataaagacaagtaattctccctcataatatatattataatttataagtggttattaaaataaaaatgttacaaaacgttgctttactatttttttcactttcatttattttgtcaagctacatataaacgtgtactaagctataatttacttcatggtgattggaccaaattaacgtcttcatcttcttgttcttttcgacagtggaccatactttttacacctatatacatatgattattatgatgggatgattaccaattaccttaacaataatctccatgcactttcgatgaatattaattaagtaatattagtttcaccgactacatataacttataagcagtaatgcttcaatacttcatatatttaaaagtttaaagagattatcacatgccaacaatgatgaaaaatatataggtcctacgataattattccgaatgggaagtaatccaaaacggaacagaatcgttagcttttatatataaatatagatcatatgttattgaaagattggtgaatgtacatcatttttttttttttgttattctttataaggaaaattaatattcttataaattgagaaaccattctttattgcgtaccatttgacctattgtgtttgttgattagaaggagtggaaaaggaagtttggttcggaattgcaaaataaagtgttggctgctatagtggcagcagtaatttattacatttagaggaacaggaacttatgtctctttgagacttattttaatctgttaagcatgttaatgagttaatcaagtatgacataaggacttgtttttgttgtgttaacaagaaataaatatatatgtgatgtagtgaattgtttgtaagtagttgctttgttgagcacaaattttatttgtacttaacctttttttctttcatgaaagaaataataaaaagaagttaaaatcattcttatagaaacaaagaaagaaaagttgtacttgttatcaattaatattagatttcaaaatttgattttattttcacagacaaaaatagaggcaattttttattagaatattaattaaaaaggaagctaaagcctaatgaaaaattgacatttgtaggcagttattttataaaaattgtaagtatagaattagactactcctacagagtcggctagggggtttggaatcgtgaagggttatttactaactcta

SEQ ID NO: 27927 - DNA, 2335 bp, Cannabis sativa
ttttttttttttgacaatgaaagattcaagattaattaattggactgtcacttgtataattcggcggatttaattatataaaataaagttacgtactttgaaaacttaattttaatgaaccaaattactggactcaagaatccaccttttttggataataatgaaaggaacatacttggattagtttttttaattaatagatgaaatgttaaatatatcatacattaagaaacaatttaatattacataaccaactcaatagtttttacatgattaagatggtagtactatagtgttctttcatgtaaaactctcaaatttaagcttaaacttcctttgacctataatctacttatgaacagagtcttagactaaaatattacatcaaatgaaaaacacacaaaaagtattatttatttacagaaaatatacacagggttcttaaatccattgttggttgggactaaaattctgtctttatttatttttacattgattttccaaatattatgtccacaatccaagtatctacaataaaataaagatactggtgtttaatcatgtggattaattgtctattttttttttactatttacacaatagaatgcctcgtaaaataactagaaactatacacattgtacccattgttgggatcaaattgcaccttcattcactaaaattaaaatatgaatatttcttacagaatgagctgtttttctttgctgggttatcaaaacctcaatctttttgtaaatgagaatcatggcaacttttcagtacttcaaattatactttcctcaaacattgtcagcttctgtgtgatcactaataataagtggttgttttccaatgctggtttcagatgggagtttcactttcccagtggaatagatcagaaaacgttggcatatgaatacaaggtcaaagaacatagaaatctgcaatagtttaataaattttcattttgaacaaaaatagagaaatatgttatcatagaaaatagtttagaaaagtggtcgtaccaaggatagaagtattttccctatatttccagtgaagtttacccaagaatctgaaaaaggtgacataatttcaaataaattatcattgaactattcattaaatgggattaaaatgaaaaatgaaggtaatattattactttgatctaaggattgtacaatcatttgtgcaaaatttgcaactccaccagaaaaatcacatagaacataaccaatactaaacccctcagtgcttttcctcttgaagttcatgaatacctataaacacacatatatatatttggtttataatgaaagctctaaagtactttagaggccaaaatgtataataaaaaggacaggcttatctgacctgaggtgtatatttgattactgtcatacaaacttgaattatgctgaaacaataatatggactaattcagaatgcaaactttttttggtcaagatactcccattgcattatgattaagatatatacttgaaaaatacatcttacttgaatatagagattaaccaaagccaagattgggtttggagagcaatgaaaaagcaaaccccagcaaataaccacacaacagagactattagaagagcaatcttggagatggtttggtctcctctctgtataaaagacattagacacatcatcaacaggaaaaaaaaagggggggcaagaccaaaaatgacattaatttttggctgattagccataattttcaatcttactcaacatgtgagatgagactacagtacagtactagagaacaaaacaaacttacttcatagattgatatttggaataagagaattattgttaagagtgtaacatgtatagagagagccacatcattagctgccacaggtatcatctgccacaacaaaaattacaattaaaatataagacagatgttgtttaatttaaaaagtggtatttttgcataaattccataattactggtgaaaatgtaaaattcaggaaaaaagaagaaaaagaatatcttttttagtactaaagtagtaaataaacaaacatatacctggccgaagccatatttctggaaatactggttttggacagtggaactaaagtaaagagtggcgttgtagatgagataagatgtgtgctttgttaagtttagcactataaaatcaaagttcaacccaacaacactacaccaaaaacaaaaaaaatcaccaaatttagaaattttttattaaaggagaagaatttatgaactgtgtttaatctaaaaaaggaaaaagttgacctttttcgacgaaaatttaagatgacttgtggatagaaacagagt

SEQ ID NO: 27928 - DNA, 2114 bp, Cannabis sativa
gatgcatatccccttcttgtctcgcttaagacttcatagtgaacgagtttgaatattatctatcaaacttttatataattgtaatgaattattttttttatttacatttattgatataatattattatatcattagagtttattcatattccttctgtaagacacgtgtagacttttgaagtatagtcgaatttcaggtataacagtatctattaattttaaccattttaattattttattatatttttttataaatattcttccaagcttatttatttctctacttaaggtttatttatttaagttgtatatgttagagtaattcatcacgccaaagctctgaattagaaattcgtaagtaatgaatttataacaaaatcattattgagcagttaatttaagtacgatttgttttatttatagagaaaacttattttaaagaatagtaaaaagatatgatgatgtcagtagctttaaatgtaatggcgactacacattacaagaatgtccacttttgccggcgcaattgctcaattgcgccggcaaatgtccactaatgccggcgcaagtcaataaatgcgccgacaaaagaagtcaacaaaatttatttacccccatcttttaccagcgcatagtatctccagcaatagtaaatattgccggcaaagtactataagtttgtcggcaaaagttggtaacccaattgccaaaaggtgagaatttttggcggttcgagctatcttttgtcggtgaacatacatgcgtcggcaaaaattattaaatgttttatttaacattatttacttttgctcgggataaaatgcggtggcaaaagtgtgaaaaaaaaggcagttaattttccctgcagtgaaaaaacgtgtgcgtaaaagtaggtgaggacttttgccagtgcatttaattgcgtcggcaaaagtggtgaccattgaaccagaagacacgttgcatcaggggttggcttttgtcggcgcatttatgcgccggcaaaggtcctgaaattttttggcgatcaacttcccgcccagatgaaaacgagtgtgaaaattttgtggaaaatttttgttggcgcacttaatttcgccggcaaaagtccccactaaaatgaaacgcagcgtttcatgtgtttttattcagcctggacttttgtcggtgcacctaattacgccggaaaaaatccaggctgaataaaacttggcacgaaccccccttccccatttttctcatttttttctctttcatcttcccttgcttttctctgcaactccttcgaccaccgccaccggcagcccccttttcttcttcccaaccaccattttttcatcccaactcccgattttgtccactaaattctcagtactcttttttttttctttttcatttttattgtaaataattataaaaaaaaatttccaccgaattctgaggtgattgtgccgccgcacctccagcaaccgctgctcgagcctctgattgttcttcgtatttcatcttttccctcaaggtaacctatattttatttattttagtttttgtttgggtatatagtaattttaggttatttgtgtgtaaatttgtgtataaaaatgtgttttttttttgtgagtttatatatgtatttttttataaatatgtgtatatatgtatatatatgtgtatatgtgtatatgtaaatgtatatatatatatatgtatattaatttatatgtgtatgtatatgtacatatatatgtaaatgtatacatatttatatgtatatgtatattaaaaccctaatttatatatatatatatgtaaatatatatgtatataaataatatatgttatatatatcatataatatattttatatatgtgttatatatataatataatatatattatatgtataatatatatacacatagtatatatgtataaatatatatatatttatatataaatagtgtatttactataatagtactatacttaaaaatttatttacttaatatttattttcttgctaaatagatttttggtgtccctttgctcggtgtttggaaaaaatcactccttgttatattggaaggttagtatgcttataatatatgtttta

SEQ ID NO: 27929 - DNA, 5563 bp, Cannabis sativa
tttaaaaaaaaaaaaacacaaaaatagagcacaaaagagagagcatacctggaaaatgggttctgccctaggagaaggatatgaacactagtgtcttttgcgtataggattcgcgagcaggctaggttttatattttcttactaacaactttatctcggtttttatgaaaaaattaggataaaaggattgttactaagtttcgtttggcgcagggaagaggtaaatgatgaaaatgtattttagcaccagccaaacaaggcctttgtttcaaagtgggataaaaggtcaatacctcacccatcaggtcttgcttggttgatcattaaaacactcatcctgtcttttttttttttttttgtgtaattattttaaggctgaaccaaacacaactcttctccttaatatttgcatctcttaattgccaaattactaagaaatgggataaaatgttccaacatactttttatcctatttttttatttttctctgggattaaaaacctctcttgcagtgttttttattttaaaaaattaggtgttatgagctatttataggtgttacagagagcaaagtcgagctctttagagtccaactattctaattagctggtgtttgagttggaactgctgacttggacagtgattaagtaagttttatctcaaaaatgatcaaattataaaataattaatttacatgctcaacatcttatgccatttggcttataattaattgaaataatatgtacttaaaaatattacatgttacaagggcatgacttacctaatgaaacaaacaacaaataaaaatattaaaaaaaaaaagtaataatcacaacttgttgaaatttctaacattgatattgagtcgtcttaaccaaattgagtgaagtaccatgtgagttacatcaaatggctgagctggtcgattcaacacaaaatgcctctttacttgagaaaccatattatataactcaagtacttctcatttggaatctcacttaagatgtttttaatttctggtatttttgagactggaatttgcactgtaaattgactccaatcaagtacatcactaaagggtaacgagtaattatttgatataatcactgggacacaccctgcattaattgcctccaccactcttgggcttgccacttcatacccacttgggcacaagcaatacttacttttgcccattagctcagtgtagtttttttctatgggaatcttctcataaacttggatatcattgtctttgtctttccattgttggaacaagatcattctaatatgtccatggagtccaccagcaaagaaggctaatattgtgcgcctgtatggggcttgacccaaatcatcagggcccaatgttcccctcttcaaataaatttcaggtaaagagatatctcttttaggttgaaatccttctgaaatgtttgcattgcatagaactcttataaagtccttaaagagtttaggtttttcatgtgaaacttctggagcctgaattttttagaagtagtaaaaaatacattactacaattggaacctcaactagataattcttaattcatattaaaatcatagaatacactattaaaatgaaaaatgttgacttgctactttcttaataagtggtaagacatatttagtcaaacattattataaatagaaatattgtagcacctgcatgcattactcacaaattgacaggactagcaataataaatacactattgacaatcacattagtaacatggattttttttatttatataaatattatatgcagtgttgacattgatgaaagtaagataaatatttgaatcacttacgtaattaagatggatcagatatattatgtcattgagttactcacccagtcatggcaggaaagcatgaaatgatcagctccattgcttgcattccaaaatgggtatttattggccacaacacccacatagtcattcataagtcgatagagtctatctcgattgtaatcagatggataaataatagggctataaatcaacttaacgatgttagccacacttattggcataaaaaatgtgtgtgcctcctcaggatgtttagccttgaaagggcttttctcactctctatttcttctacgatttgtccttcaattgcatacagcccattcattggtcccatgtggaatattggccgttctccttccctatagctccacactttgaatctcttcaccatctctatatgactcctgatcattttattgcacccccaacaaatattatgatatgattaatttggcatgttctaaaacgtgttgataaatattaaaagtacttactgatgaaaagcatatgggtttctgtaaatggaacctcttggtataaatctctcattcttattagacttaaaacttttggaaataatggcttgacgaattgctactctagccttagccaaatcatactcaattctatccaacctactcttcttcttcttcttcttcttgattatgttctgctcataaaacaccctccattaagattgtatatataatcaaattatgtctccatgctaaaatacacaaaattaagagaaaaaaaaaagagccaatgatcctcaccttattagcagaaatgtgatgatgatgatgattagtaataacagtagtattgctttgacgcataaaacttgagagaagagagtctacaacaactttttgtggaaatgaatcattggtgtttgaaatatgatcagtgaaagaattagaaggggaaaagtgtatggtatgctgatttttgttcaaggttatattatgggaaagaaaataaagaagaagtagaaggagcaaagttgaaagtgatgacaaaattgtggagctaaaggctgaagccattattcccttttcatctacttaattaataatgctctatatatactacatgaagttgaagatccaatatagaacaacaatttgttgcatatatatgtttatagtactttgtaatgttctctcatgcgttaccttaaattaatacttaaaacacccacatatatgcttatttaaatcactgtatattagtcaatgtagttatatatacatggagaaatttacatgaccttcatttatgtactcgtttatatataataagaagtaattgtcatatgatgatatataaattataaagcataacatgtaacatgtttaagactcaattatagaacatatttttgacatgcatgtttgacccggaaatagtggctcgattctcctatttaaggtctttgaaaaaatatatatgcattaactatattaatatatcattcatcatggtcaaaattaatgaataaatgtaacactaattaactcaaagaagaataatttaaacattttatttatttttggggcacatgcaattgtatagattaaagttggatcatatttatataagttaaatttatatgatgtattgtaaaataaaatttctgatttgaaagtataattgttatgattttattacgtcaatgttataaaatgaatttctaatttgacatgggtcaaattaaaaatagtcaataagtattaataacttcttttgacagttattatttaagagttaaaggtccccaatttataaaaagtatgttttcactcttgaattcccatcatcatgagactaaggtcccaaaagtattggactatgtatacagcctttgtaataacaattgatttaatagattttggtgtctttcgactatatttggatatttattcactactatcaaagctggaggtgaaaactctttcatgtccttttgttgctagtagttagcaaggaatgtttccttggctttagcgcaaggagtgacgagcgtcaatctgaggttgattggcactaacaacttgaagacaaagctgacacgcgtcacctaattgtagagcccgtctacaaaaaggaaaatgaagaaaaagaaaaaaaaaagaaaattaaataattaggcttttcaaatggattttttatagtagaaattacataatgtatgagacaatttgaaggatttacatttttatggcatatatttttaatacatttgggttatgggttttaataaatatttatatttttatggtttaaaaaataatatatttttgtaatatatatttgtatttctataatttatcttttttggttcactcacattaaactttattttctagttccaacaactaagattgactagaataatattttgcgctgacgttgttagccatttatatatgagatttatcaggtgaaccttggaacgtctacgaccgttttccatttaaggccgagatttataagttcccagattttggagattgaaacatttcattctgatgttgctccagaggtaggaagatggttatgtctggcttaaacgatgaattctgattggtgaccatcaccaattgcctcttgttgttgagaacatgacttcgtttcaactttcctttccagccatacgtactggcaacccactttggtttgaagccatattggtctcgccgagaccttgttgccattgttgatctccatttcataggtataatgaactggctcttcatgtgctgtatcaatgtactcagtaccgctactgtactagtgttgatagcatacgaatcatataaatagtacgcatataatacacatacacacatacatatacattttatgctagtcttacctcgtttctaaattcaaatgtaatggttgacctgaatggaaaatcatgcgttgaatggaggccttatgtccaaatcacataaataggtaaacttaaaactagaaatttccctatcaataaatagcatggcaataccttaaatatcaaggaaatatcaaaacaaaggctctaaaaactccccaaactagtaaattggattccccaaatggaaaactgattcctaaggtcctgcttggtgaagcagttaatcgattctacagttctagcagaatcggttaactggtttctttttagaaaccctaaaaccctcaaatctctctcaaaacattctcaaactccaccaaaactttcagaacacctgcaatattacccaacaacagtttccaagcaaaaacaacataaaaaatgcacagaaactcaaaacatcattgttgaggcaagtttgagttttcaaactaactctctcaaccacttaacaaaccagcaaaaccagatgcaattaaccttaaacaactcaaataaaagccgaaaatcaaaccacatcaaagcctacataacctaaatcaacactcaagcatgttatgacttaagaaagatctataaaactcaaaaaaaaaaaagatcattggccacgtgaaagaagcccataggagcacgtatgcataaatttgtgggtgtgcgatagggtcggagggccaatatattgagtacttcgcgaagacattatgtgcaagagtgcacttggtgctacattggatgcagttggcttgcaagcctcgtccaagagagacgcatcaaattttatcctgcaataagtgcgtcttgctcaattgccatcaggag

SEQ ID NO: 27930 - DNA, 2508 bp, Cannabis sativa
  modified_base (1170)..(1173): a, c, t, g, unknown or other
tctattgttgttgacacgatttggcgggtccggaatgacaagatacacaataacagaatggataatgtgaaacaatgtattgattttatttctcactcttatgcaccattatccctatatcatccccaacccccattgttgtttggaaccctccccctccagactggatcaaaattaattgcgacgttagggttggcggggagcatatgtgcatagcagtggttgttagggatcacctaagcaggttaatttggttgtttacgaccaaaatcgacttctctggtgccctgtgtgaagaagctgctgcggtttgcttggcgcttgaggtcgctaaggagaaaggtcaccattttatcctggtggaaagcgattcaaagatagtgatcaacactctcaacggcttagatcctcgatggggaaattgaaaactactctttattttgtaaaagtatcgctgcttcctttgctttttgtttattttgttattcgactagatcttgtaactttatggcccataatgtggccaattgggcttacccataatttatatggttgtattgatatttctactattcctaagaacatttgttgtagtgaccgcggggtctaatgtcttatgaatgaacgtttcttttcaaaaaaaaacctaacttatgtgtatacatcaaagatagttgccaaattcgtttttggcaagtttgtcattgaagtttagtttttcttgtaagttgtaatggtgaccctgtgagttaaaatgtccttttggggcatgttagattgttgacacagctacatgtttttataataaagtggtctctaaacttttaattaagtattactattgtaattatagacattgaaaaaaaattaatattattcattagttttcaactctaaaatattaaattttaattttgattaatacatatttttatgggtaaatattattttgaattctgtaatttgtaaaaattattaattggaccatctattttattaaatgacaaaattgattctatattttctaaaattgtacaaataggattctgaaatgatttttttatcaaaataaaacttaataataataatatgatctagagatgttatgaaaaaactagttatattttctgtatttgtttgtgttaaaaattgtcttaaagttggttatannnnaaaataaaattattaaaaattgagttcatggttttatttttactattttagaaaatataaggtctattttgtcatttaataaaacagatagtctaattaataacttttacaaaacacaaaatttaaaataatattttgcctgctgtcattgtgtggaatgaaactgtacatggtttgtaaaccatacataattaatcacagcagtaactaattaggcaagaaaggtagatgtgcctaccatgcatgacttctaaaaaatggatggctttaaattttgaaatgaggacaaaaattattttactataaatattgttaatttttcatttctaattaagcctttctttccctcttgtcctttttaatcaacaataatcctcatggagctctcatcagtttgtaacttttcatttccaactaattaccatactttattaaaccctcataataagaatcccaagagctcactattatcttatcaacaccccaaaacaccaataattacatcttcttataataattttccctctaaatattgctccaacaagaactttcatctacaaaacagatgctcaaaatcattattaattgcaaataattccattagggtatgtgtgggtttcttgcttgtagatatatatatttatatggcaatttctttctttctttcttcttaaattatacataagatagaattgagttttctattttacaattaagaaaaataatagtgtgttaacacttaatagacagatgtatctgcaaatcaaactgagcctcctgaatctaatactaaatattcagtagtaactaaaattttaaacttcgggcacacatgttggaaacttcaaagaccgtatacattcataggagttatctcgtgcgcttggtaagtactcattattttcaatatgctcttaattttaattccaaatacggtcatttgtataattatatatataaacattttctttttaaaaatgttttttttcctaataattattattttgtacttactccaaatgttaggaaaattttagggaaaaaaagtatttgtaacttgtaactaattgggttaccctatgtgtgtaactagctaggattaggaagaatccggagaggggcataagcatcactataggtagcatatcttttaaaaatattaaaaatctcaaatataatattttattttatattttttccaattatttttttttaaaaaaaaaaaacattctaatagtataacacttttaaaaaagggaaatttatatctcaacacgtttttgttaaattaatgccaatattaacatcaattttttaaattattgatattaatgt

SEQ ID NO: 27931 - DNA, 1858 bp, Cannabis sativa
tcgttgggtgaccccccgtgacccaacttgaggggggtgacaaccgccatcgttgggtaaccccccatgacccaacttgaggggggtggcaaccatcatcgttgggtgacttcccgtgaccgaacttgaggggagtgacaaccgtcatcgttgggtgaccctccggaacccaaccacaactgtcaccgttgggtgacccccggaacccaacttgagggggtgacaactttcaccgttgtgtgaccccgcccctaggacccaacttgagggagtgacaaccgtcgccgttgggcgaccccgcattcgttgtgagtagttgtggtgcaatgtggatgtccccgtatacctttgagaatgtcattgtgtatatggtaaaatgcatgacttataccataagggtgtagggggtaggggtaaacccctagactaaccctctaggggatacccctagactaaaccccatatagatcattgcaactgaggtaggggtagtatcatataccccctacactggtttgactcccgtagatgtgggtggtcattgttcattctgcttacgaaggtgttagcccatcgttttttctttttggagacgtctactttactcaagctaagggtaaatgtgaccgtctgacttccactctaattgtcataactacctttcatagttgacggtcatcccaacagtcatgactttacatattttcattaatttagtcccattatttttgtgtcttgtgttgctactcttgacatgtcatcattcttaaaatttagataaacagttgctaacactggttaatgatttttcatatgacaattattaaattatacaaacaaggacataactctgaaatagaaattatcttaatgaaatgaatgaataccccacatgctccattataaccccaataataaaagaatggataaaccccacatgctccattaaactctctgaattatcttaatcaaagatatgaacttttgggccggaaccagctaggaagtacaccaaccaatacaaaaatacagaatattagaattaacgtaaatacaataatggagcgcctttctaaaagaatacaaaatcatcatcaacactagaaacaatacgacaaaagattttaccttggaattagagccgtaggattgatctaaaattattcaaaggcaaatacaatccaacggtattggagccttcaaagattatgatgcttcctcttactaacgacattgtgatactcacgttgaaagtcttcccttttcatctttagccgaattttaaaagcttttcccatctataaatacatgtccactctcaccttctactctcaaccaattcaataaacttctttctctctctcaagaacaacttttcaaattagcaaaacgaaaattgtttcagacatggcaccaataaacgatgtatcaaagcttgaatacatcaagcaacatctgcttggtgatctttctccaattaatgggctttcaatttttgatcaaaatgaattatggagttcagaaatgaataccgatttctccacctcgaaatctgattctctctgctccaaaacctcgagctctgactccaccattgaaattgcagactacttgaatcagaacgaagtcttcgagttcagttcaaatccaaacgattttttcgattttgaattgaaacccgaaattcttgatctcaaaacccctaaatgggccaaatcccatactacgctaacctctcaatcgagtattagttcgtttgaattcgaatctaaacctgaaactatcgatctcggagtttccacctctgaatcgaacagcttttcgttcgaattccaatccaaacctcagatagtccgcc

SEQ ID NO: 27932 - DNA, 2823 bp, Cannabis sativa
gaaatggtgggggtgtcccattaactcaatggtcatccgaggagtgcatgccccttgggatactgggaaacccccagccatttcttgaggtacactgttagttgtatatgtgtgacttctttttttgcgaggatttactaaattctcgaaatggtgggtgtgtctcattacctaaattttcatgtagcgtcatgatcattatgttattgagatacacccagccatttcttgagatgtctggccaacccttgatatttttgaattttttatgcgggtgagggcattttattattctcgcattttcaccacgctgaaaagatcttctatctttcagatgagcgacttatcggatagccaaatgctcgactctggagatggggctttcactgatgagttggagaagagcgacaacttcatacccacctcgatttttgaggaggaggcccctgctgccagagctcgttagggctcactatctactaaagagagataggatggtacaggaacttgctgaaccagtgacggttgaaattcacgatagtgaatccacagtgtcagctcaggcgtatctttttcgctcgagatatgcccttgacattgaagtcaaagaaatgggagaaggcttcgaggtacgtgattgcgagtcagaagaagaaggagacgttgagggaagtgagactgattcagttgacaacactcaactgaacgaaccattttcatgtgaggatctggtcttgcgagtcactaaatctgacctacatacatttgcacggttgaattcgattcgaatagggactctacgtcctttagcatctcagcaacctcaccttccttttaccaaccctgcgattatccccacgtaagacgtggtggtctcgattcccattttttgatgtggggtaactttaccttttcatccatttgtcaaagctatcctcaaacactatgatgtctcccccttccaattaattccaaacagctatcgcatactcctgggtttttatgcaatgtatatggagtatgtccatgggggaactaacgatggaggactttagttatttctacgataaaaaaaagttggccacgacgatggcttttactattttagcaaatggccaactctgacatgaatggggtagaaggtacgatttccaatatgagagattggaaatctaaatggttctacgcgtttaaagcaccaggagttaggactgacttcaatcgtcgacctagtatgtcgtgtatctcaacacttagtatatatttttagtaccttgtatagtcactagtgtctgttttttttatcgcaaataggccacctcgacttgtactggattctgctcgcagggaaattgtcaaagttctaggtagcttgcccgttcaagatcgcaattggcggttgctgtgtactactgcgaaattgcgagaacacaagcttatacttgagaacgccagccttcagcgagaaccactatacaaggagccttttgagaaacaaaaggaaagaatagacaagcatctatctaaacaaacatcaagaccaacatcaggtaatacatcaaatatatacatgttctttcatacaataaaaatatacttatctaatggctttctcatagaaatgacattcctgaagtaggcccccattctcaaccaaaagcctaaggttagagctgtgacaacttcttctgtcatcccatagaagaggaagagcaaggtcttcccgactgcaatggctgactcctcgaagaagcagctcaaaattacccaagataagggaaagaaagtcatgatcgaccatgctgttcaggctcacaacttcataacccttaaagacaagtttgtgagcgatgagttcgtgtccaaggtcaagtgggttcctgttgaagacttgttgccgcgctctgcagaactggcctcgcaattcatgactatgttctcaagggcttttgttgcaggtaccaaggaggtcgatctcctgaggaagcaaaacacacttcttcaggatggcgtgaagaaactgaagctggacgtgacctcgaaggataaagaaatcgaggacctcaggaaggctaaggagtaagcggaggaaaaggctaaataggtggaggacaaagccaaactcttgtaatcacgagttgaggaactcactcgcgatcttgagagtgaaaaggagaacggaaagaaacaatatgatcaggccatttctgattatatttacacgactttgtccaagctgcctgacttcgacttcaccattcttggagcggagaagctgaaatagtcgaggaattttgtgctctgtcgcctactcaaacccaaagatgtggaagaaacctttttcctgaggatgctgagaacgcagatgcagaggaggtcgttgatggtgctgcaagcaaggtcgcaaactatcccatcactccagtttctcaatttttctaagttcttttttttctattgtcgaactttaatttcttttgttagcagtacacgggtactcgcgctttgtacttcaaacaaattatatttattttgttatcgcacactatatccttttgaggatactttacttttgcatacttatttagcagtacatgggtactcaaattatttaagctgctcttttgatagttgccttttttgtttctattcgcaatatttttgaccaatatcattacagcttggtgtaataacttagaatataaaaacttgcaaagaagataaaaacaatctaaaaacttcgaaaattttcattataataatcaatagtacaatattaggttataccccttatacttagtacatttattgaaataaattgac

SEQ ID NO: 27933 - DNA, 1808 bp, Cannabis sativa
  modified_base (1231)..(1233): a, c, t, g, unknown or other
atcaatttctatttacttaattggaatagtgaaacttttcccaagaaaaaaagtaaaaacttgcaataaaccaaatataggaataaaagtggtacaaatataaaacaatatctagtaacatatatttgtaaatattggtaactaaacattcacaatcactattaaacatggatttttctttgttcttcaactttttaaagggtctattttttttttttataaatatcaaacacttgaactaatacaaatgtaaaaaaacaatatatatatatatataataaatgattaagaagtataattacttaccttaacttgcttagatttccttcttttaactattttacttaaacaacccatttctaagatcaaatgccccaaaaaaatgaacctgttaaccaatacaattacagatcattcatataatattctggtcatattatataatatatatataaatcaatataaattataacttaattatgcatttaatatttataaaaccgtcccaaaatttgaccttcaaagttaatgcaaattagaaaattagcaacaaaattaataacttaaaaaaccttaaattatagcttgatcaatttttctcagttgaatatatattataaactaattttaattttttatatgtatattatacatacagaatttaaaatcatacccagtaatatgtatataatataattattcttctttaaatgataataataaaaaaatttaattaaatttaattaccttcagtttcccactttttgtgtagcactgtaacttctcatcaacagttgaataaaaataattgatcagatcatcaacaacatatcaatgaatatatatatatataatttatatttatataaaaaaggtgtactacttaatatggtgatgggtgataattgaagttgaagtaagaaagagatatcatttctttttttaaaatttaaaaaaaaaaaaatgattaaataaagactttataatattatattggtggtgggaagatttcttatgagtagggatctacatgggacgggaaattggcagagagtattttcttattcttattctcgataaggattttaatcttttttcttgtttatttttcattaaggatgggtagaaaatcccttaataggggtaagggggaacaatctcctaataaaaaaataaagtttataataaaaatttaaatatataaaaatattaaattatataaaaattaaannnttacacattaattattattcaataaactaattattatccaaaataaaatttaaaattcataaaaagatactaatatactataaaaatacaaatataaattataagttataagatattattagaaatataagaaaatactaaatggagctctgtcaagagtgtaatttatgtccttaccctgtttaacattcgaagataaaaaataatttctgtccccatcccattaggaacgggtcccatccttaaagaaaaaatgtgtactcctactaatgagatgtttagtttatgcatttagtaattaaaattattataaaaaataaaaattctttgcaaaataataataataataattaaaaggtaaaaagtgatataaaagcaaaccaaattagagagtttgtatatctaaatcacttttatttgtgttattaactatctttcacttgacaaatactcattaacttaaaataatctgatttaattattatttcaaataaaaataattaattaattttttaaaataaataaaaaataaaaatttaaatgagccacattttggtcccggcggggctcgaacc

SEQ ID NO: 27934 - DNA, 1936 bp, Cannabis sativa
ttgttgactaattaaaatatattatgtgtacattggtgtatctaagaaaatagattgaaatcaaagtttgaagaatttagctcccaaaagtttataaataatgaagattcagcatacttaacctttaaccttaaaatttagataattttttttaccaagaattaccctcctaaagaaaaagtaaacagtaaatataaaaacaaatactcttgttgggatttgaattttcattttctgtttctctaatacatatgtaaaatagcttaaccaataaagtcctaactattagagctggtaaaacaggtcagacacgataacacgatttgaaacttgcacgagagttagtgagtatgggtttaccttaaatgggttcgggttgtgtttgggttgactcgtctaactcgtttaataaacgggtcatgttcgggttgacacggctaacaaaaaactggctcattaatgacttatttaaagttattttaattctttgagttataaccgtgttgaatacttcataactgtattattggttgacatgtttaaataaaatatgtttataaacgggtgtagggttacacggatcgtgtcatgtcaatccgtttataaacgggtcatgttcgagatttattttttgacacgattattaaacgggtcgtgttcgggtcgattatatatctattataatggatctcgacacgaacacgacccacgaacacaaactgctaccctactaaccacatatttttctaaaataatggaaaatatttagttatgatttctcatacaaatattaacttatgtgatagttataactttaattggtagataacataaaatcaaaagaataactatgaaaaaattagtggcttttcctgtagaaattttgcacagagtggatctatataaaatgttttatatgaaatttctcaaagttttttttttgggggggtagaaaatgtagagctcaatgaaaaaatatatggaggttttatgaatgttttttttttaatcaaaatagttttaggaataagagattaatgagtgaatttgagttttttattttcttttcacatacttttaacatctctaaattggagaaatattataaagagttattcaataaaataatagagcaatcatttaacaatgaagtctcttctatgtctttatcttaccaaacataagaaaattctcaagtaatttttgcatctctcttttctttttcttttttctttccttgtatatcttatatatgatatctttctttatacaaaacctacctagggttaagaattgaaatatatcatagaaagtttcacaatatatatgtatctttctttattacactctaatattaaatgaaaatcaaaccgttaataaaaattataaatacccggaagaggtttttataatatatattgtaataacataaattagttgttaattaattatgaatatatgtgcattattataaaaataaaacctactatttgaaatagttatttgtgatatcatttctcagttatataatttttattgaattttaagtgtgttatatatgtaatacatgaaatttgatgatttagaactgtcttggaaagtttggtagtaattgaggaagttttgagagttgtaaaattgtgaatttttgagcaaaatttgccctgataactagaattcaagatggtacagggttatactaaccggaagtccagttgaacaatttagcaaaaaattaatttttgtattttgaccataattttttactcgattattcgtcttgaacgttctatagatcaccagaaaattcgtgaaaagctctacaacatggtacttaaatttaatcttaatttaactccaatttaattttttaatctttatgaaccaatagaataacctcaatctatacaatactcatataatgttaaaatgagat

SEQ ID NO: 27935 - DNA, 2934 bp, Cannabis sativa
tagactattagtatagagattattggtaacctttttttaaaaatgttatgtttttatgtaattgaaaggtaaaattcttgtagtgtcacttgacatatggaacatgcctttatttccttcttactgattaaaattttgtttatattccattattaataataaattattttcctaatttatttttgatatgctgaattaatgctaaatggactaacaaatgtaggagctttattatgaaaatgatgtgggagcctatcaaatgcatgggatgtcaacactactcaacattagatttcacttgcaaatctagctttactatatatttacataatgtgtaaaactttgtttttttagtacgcatcttccttaggagcaaaacagtttatcacaccttactgtctttaattacgtaatactttttgtttatttaataagattaattgctttcattatcaggatatggatgagacaagaatttttcttattagtaaatctaattacataaaatataaaggtaaaagagaaatagttaatagctcaaggtaatagtagtgttgaaattgtattcattcgtttatctcaatcttaggggcaacatttttgttgatccccaaggaaaaatatatacatggtattggcatagtttgcccatacttgcaaaattgtaacaatatataatttttgttagaaatagtcagcaatataatcagtgtgtaatgccaatcattaggcatttaatcttgaaatgagatcaatgaatgcatcttctgggcatggaatggtaagagctcccattggatgatcgaatccgaattcttcttcagcttgacttagcaattcttggaatgattgctggttcaaaattgataaagggataacaaatctcttcattctgttttccccaacataaactgccaaatacccttttggaacatcttttgaacttgaaaagggtctttgaatagcatgaactatgcttggaaatctaaatcccattcttctattgtatatatgtctctaaaggaagaagaaagaaaagagatctcaaagggtttgcaaggaagtaaagttgaatacttgagagtgaggtgataatgaacccaatctcatgtgtatatatatacacattttgaagacccttgatatgatgggaaatatcatagatctttcatctatatctgaacacaattaatgtccaaggcatgtctcttattgcaaggggccacatatagtgttggcgtagtcaaagaagatttctaatattgtatcataataattgcagcctttatcttccttcaattccaggctagtcatcatgttattatttgtgtataaaagtccttgtaggatcagataaagaaatcacattactggtttcttcatagttttgatatgaaaatgtgtctcagtggatatgggacatgcctaaggcatctcattgcaatttttttttatgaattgttaattattgtatttgactctataaagataagtagaagacaataccatgtgattgcacaaggagtatgcctcactagaccccatccaatccacctaattactctatagtgtcttcaccatttatatcatatcaagtgtagtattgattataaataccatcccaactcctcaaatttcaaagtaacaagtttccttcttacaaatcctctcagatatctctgctcactttatttttttttcttcattcttcctttagacacacttattacaatcatgggttttcgctttgctaccttagttcatgccaagcaactcatccaaaggcctttctcaagcacaaaagatatccctaaaggctttttggcggtttatgttggcgatgagagcataatgaagagatttgtgatccctgtggcatacttgaaccgaccttcattccaagactttctaaatcaagctgaagaagaattcgggttcaatcatccaatgggagctcttacaattccatgcacagaagatgccttcattgatcttatttctcacttaagctcctaatcaattgagtctagacatcattagaagataacttaacagctaacaaaacttactgttacaatttgttaggcagagaatgccatataccttgtaattaatttttccttggggattaacaactaaaagtagtccccaagaatgatacaaatgaatataattggaaattttctttcatgaaattttttcttaagaatctgacatagaatccttgtccatgttcttggtatagattctttttggtataaacaaacccaaatatattcccatcagtaatataagagatacaaattaagtaaaattcaaatgaataagcaattaagtgcatgtctcatacaaacttcatttggatgaagtatggtaggaaataaagttatgttccatttttgacaattggcctgttaattcagaaatatagtacactacttacaaagcaataaaaatgacaaaaaagagaacaaacagtaggaagaaaaggttacatacgtttgttgtccacaaccattactaaatatgtttcttagtagagaatgtgggtacttaatgacttagctttgttatgtaactatagatatatatagagagagagagagagaggaatagactgaaggcatttgggtacctttggtacttatttggagacaatcacttgaaagtccacagacttaaaccttcccaataaaaagtctgtagagaagttgcataaaattattacttgacgagtgtagtattgaagtttctttcaagaaataattaaaaggagcactacacgtttaaattttatttttattcaatatggaaataaattatatatgtattaaaatattgttataaatattattaattatgtggatgttcaaatcttttatttattaccattaattgtaatcaacattcatcttttccttagtttcccttttt

SEQ ID NO: 27936 - DNA, 1865 bp, Cannabis sativa
atacttctcttttatatgtatatagtgattttattttcttattttcaagaatcatttgaatttaaatttggttagatatttaattaaaataattattttattaatattttttcccttatgttttgttaccttattacataacaccatttaattaatatgtattttattaacttcgtttatgaatcattcaaatctttatttgtaaaccatgaatagaaattgtatcgtagttattatgtatgtttcttaaattcactttagaaaattagtagagctattagctataactgcaaaataaataaataaataaaagtctatacaaaatacatgtatatctaagtataattttaattaaaatttatacttttacttatttaaattaatagtcgtatataatatttttaaaataattagtcttattacttaaaaaattatgattatgtataggttgataaattaagttataattcttaaccatatgtaaaactaagttattctttaaaatttcagtatattataataaactataattctaaattgatgttttcataattttaatattttaaaattatttaaaatatcaaaaattaattttaaattctttaaaaccaatattttttttaagaaaaaatacatataattaaacaagaatatataaaaacatgtgcaaaacaatttttttaaaaaaaatagaataattatatacatttatatagctaagtgactaaattaatatatttatatttatatataacgtactaagtaattttaaattagtttattacaattaattgattaattatttaattttaaataactaatttaaattaattatagctaaaatttattattttattaatgcaaagttaaatttaaaaaaaaaaaaattaggctaatgaattaaatattaatttactatttataatgaattgtgtattatgtgtatttatatattttaaatttgatagtgcaacaaaatgatatgtatatattaaatatttgtagttaactcaagtttctaatttagaaaaggtattaagaaaataagtgaaggctcagtagagtctaagcctaaattaaaggaaacagggctcaattaaggttagagttagttttatgttttaaaaaaaaaagatccacatacttgtatttgatgatatataattagaaaattattaagtaagcaatactaattattaaacacattaagtaataagtttgtatttttttttttttttgatggtatatgattaagaaactaatattatagtcgtttttagatatttaaaatgtgtgtaaagaaaatgtttgaaattcggaataaaatttaagattgagattgagatttcggaagaacaataatagcgactacacatgagttacggtaataacaatagatgagatgaccatgtgtgagatacggtaatgacaacgagtgagatacggtaagacaatgagataacgagtgagatacggtgatgacaatatttcaagtttttcctacaccatcctatttatttattttatgataatattttttttaacaaagtaatttaaaattctatatatatacattggggtgcacttttaatggatattacccatgaatgagtatttaattattgaccattagatttgatcaaatgaatgatatttatagttattcataatttttttaaaattaatattttttattttcaccttttacctgatgacatggcagtcatcttattttttaaattctattctttgtattcccttatcatttctaaataattataaaataattaaagaaaatattaatttataataattgttttgattaatttgaacactttaatttatttgtaatgaccgctctagta

SEQ ID NO: 27937 - DNA, 1429 bp, Cannabis sativa
taacccttttatgtccctggctataatgtccaacacaaaatggactaggagtatttatttagtccaaccttgatggacttaaaagaggatttttgtagtagtgaaagaaagtcaacatcttgcaggccaaaaggaaggcagagatagttgatggcacagttgtggactacctgcccctggctatgtttttggcgcccaaggtttggagcgatgtggtgccttttctatagatttgatagatctcattgccaccagtgtgtgtgagttaacagtagaaaagtaggtagttacctacagcactgatcctattatgttggcacacacctccaaacaacaagctattttagtaagtcttgcatatgtaacttgttgttttcctttagtggtttattttatgctaacttttctttatctcgatgcaccaaatggccatgtttgctgagaggacttgccacgaggttcattccatggctattgaattgtattaagctaaggtcaaaaaacaggactttggcttcgaaagtagaagaaatcaagattcaagtcaaagacttctggaagagggccatcaaggagcctaactagaaggttgaggctatgtataattacttcgttagcaaggtcactgaatcccataagaaagaaatacaatagttatagaatgagttacccactactaaaaccaaaatggaatctctttccaaggaaatccaagaggccaataaacttaataaaattttggaggcccgggtattacagaggaacattgatgttagagataaacagattaagatcaacgatctgaaccttaagctaagggatgcagatgtgaaactcaaagaagaggatatggaatctttaagttggaggggaaaattgctcaagattgagacgactatattgatagaaaaggattggcagaggagacttactaacagtgagaaaattctgctaaaagataaggaaacctaggaagctgaaacacacaaagcctttgtggttgctagggctttctgtaagtcagctgacacttatcgccaacatattaaggaccattaaggagtccacaaaggtcacaagggaatgaagggaagctgcgaaggctggggaggcctaccgcataaaaagcgttgatatagcccttatgagcactctccacctattatggaagagggatccttctgcgctcaaagttttaggagaggatgaagcggagtacttggcaacggtacatgcttttaagaatggcccatatcctccacctaactccaccatctcatgaagaggctgcctctccaaaaattgtggttgtttcttttgaaattgaagcccaactcaaaataggccaaactttagctcgagaccaagtctaggaccagactcatccatgaggttttaacattcccttcttttttttttcctttttttt

SEQ ID NO: 27938 - DNA, 1318 bp, Cannabis sativa
aagcccacttttcctatttgagaaaaaaaatgccaacattgatacaatgatgagccaaaaaatgcattgtacaagatctttctatatcctcagttttttgtagaattaataggtgttgggattaaactcactcaatctgtcaaagccagtaggtccatcttttcgctcatcaaatgaatttggataaaattgctgttagttataacaattgactttgtcaccaacttaaagagaggcccaccaacatctaaataggtgtgcatctattcttttaaggaatctccaatattcatacttcaatttcaaagttatgttttgagagagaaagtccaagattacaatgagtgagtgtgtggagggatgtaatgggagagtatcacttgaagtgatttctctcgatgtgagacatttctttgtaattgttcattgtgttcaattgtattcttgagcatatctcatgttgtactactgctattcctaatcaataaagatctataattcattcattctcaagctaagtttattcttgtctaatttcatttaagttctagtttttattttgtgattggttctagtttgaattgtattttcttgaacattgtgttgtaagaatcaagttttgagggtcattgttatccgcattttgtaagtatgcacgtggattttaatcaaagaaggtcaaggagtcattaagccgcccaaatgcttcattgaatatcccgggaggataagggcattgatctcgcgggaaaagcctccatgaaggaaggctcccttactgctagccaaaagaaatactcccgggaaccacggtctccctccgttctgtgaaccaaagtctcacccatccggatgtggatctgcacaactaggccatagccacaactacaaaatgggctattcccaacggtttagaagaggattaactatggaaactgttggaaaaggtaagtggaagtttttcccatcggtttagcaccgaagcaaaaacaatctttgggatagctattgccgacggtgtagaaccgtggacaatactaaatggttttttttaaaaaaaattatagtaaatcccaacagtttataactgttaggaatactatgtatcctaacagtttatcatcgtggagaatgcttagtattcctaacatttataaattgttgggaaaagatgcattttatacagagctataatattagttcaaaaatttgggaaatttggctcgaaaatttcaaatcgtctctctagtgaagggtatcgtatataagaaagagaacagctgcttttagaccagtgaagggctcaaaaatttaagac

SEQ ID NO: 27939 - DNA, 3003 bp, Cannabis sativa
ttgtagtagagatgtaaatgaggcagattttttctttttaaatgttagtgacggtcgacgggtcgggttaggttgggtctaacttgtctggctcaaaaagcttaatgggttgggttagtacacaaactaaaaattaagaagacgtttggtatgaggtgctaaaaataatttgattaattagaataacaaaacgcgaatataattatttgtaaacttataattgtttttgattatgcataagaatatctaattaaattactgttaattgaaatattatttaactaaataaatgaatatgataaagtgttgtaaaaagttatataaaaaatattaatatattatgttcatagtattaagattgaaaggaatagttatactagggtaatcttatttccaaactaataattttttcaaacttaaaaatagaaaaacctcatatcaaatatggtaatgtaaaaaattaccattcctataaaaagattatatcataccaaacagccctaaatgcaatttcatacttacttatgtaagcattattattattattagagaagaacctaagtagagaagatgaagacagattcatttttataattaatatctgaactggagacaaaaaaaaatgtctttcggttgggtccggcccaacctgaaagaaaaagtagtgggccaggtcggtgcgaagacccgaatagcgatccgcttgttttgggtcgcggccacccgacccaacacaaaaaaaaaaacccattttgccctccccgaggtgcattgtagtttcacccatattcaagagagaataacaatattagaacttacagggccattgtaatccagaagacgggtacaatacacctctgcttcttcaaatctcttaacattcttgtagtgagtagcaagaaaaaacaaagcttcaaccatattcggtccttctctgtcttcatctttcatcctttccaaatccattttgtagtaaaacgccgcctcttcagaacgcccaagctcatgatgtagcttagctaattggcgcaatgcaataggttccttatcattgccattaactgcccttttgtaacacttaattgcttcatcaagcattcgaagctggtcggtttcataacaccgggccatggcgatccacaaccgagaatcattcggttgcaagaaaacagatttcttgaagtaatgaagagcatagtagtgcatacccatcatctcataagcttggcctaatccataccaagctcgataatcgcatgaatttatgtctatagcgcggcgataagcatcaacagcagcaggagtatttttcatttcaacatactcatgtcccatcagtgtccaagctgacaaataatttttatccaatttcaatgctctttcgaagtataaaaccgatttttcatgctgcccttttaagctgtaataattcccaattatgcaacacgattcgggtctgtatttatctgtcatgaacaccctatgggctaggaaactcagggcagcaaaacattcctttgcataaagcacattagaatacatatccatgtcctcaactcgatacggatcattttccttaaaagttcttcgaaaatcgcttcaactacttcaaattcccttaaactgtactgagctttagcaatttgagcctgaatgtagttactaaagctgaaggtaccctgcaaatactcatattttgctaaggactcattatgcattcttagttcttggtaggcactagcaagaaagaagtccttcatccaatggttattgagattaatgttgttcaacatgtcaatggtagtacataaggactgcaacttcgaccaagcatcccaattccacgggtagttattcaccgattcaacaagaaccgaacgagcaagattctcattgccttcctctttgagcacaattccatacaaatgtaaaccgaaaggatcaatcgtgccattctcgaagtgtcgatagctccctctccaaagaaactagttcgcggttcacagcactactcttacctaatggtccctcgagttctatcgtttcttcctctttgagcttttctccagcctccattaacaaaaaaataaataataatgagaaaaatggtgagtaaatcatattactaagagtacaaatacatacaagggcattgcaatctcaagtctcaaccactaacaaacatcatataaatcatcatagtagatgccaacaattaaattcctaagagaattaagtgatcaaataaagttaacagcaaagataatgattttttgatgctcaatctagattttaatggcatcttctaccttttcaaaacctttaaatttaatcaacaaacaagcaccatacttgtctagtatattaaatgtgctattttactagctaatgaggatatgcaattatagaatcaacagccaggaaccaaatattatggcatagatgcttgaaatattgtgtgttaagacaaattagataagagattttctagccaaaggaaagatagaaagaatgtgggaaaaccagatattgccctaccatattctctacagtgaaaaaatgacttagccaataggtaaaaatcaccatccacaatctcatcttcctccattaaaggagtagatacataagacacaccagttggtggagttagggcaatatcatcggtgcggaatctgcgccgaatgctagagcttccacgttggaatctggtgtttgcaggcattaacttcgcctggtctaactcaatactcacaagttgttctgctgccctgcaaaagaaaaaacaaaacaaaaacaaaaatgggtattcatggaagatctataacttcaatttctatttcttctgaaacaaaccaaaataactgaaatcaattttatattatctgaaaaccccagtttctaaaacccaaaggaaactcatattactttatactaaaattctataaatataggtatgtaaatctatctataaattccatagatacatgatatgtatatgta

SEQ ID NO: 27940 - DNA, 3934 bp, Cannabis sativa
aaaatatatttaaagtaataaatagtattttataaatatagaatataaatagtgtattttaaaaaaaactttaaaatgaaagaagagtttagaataagtatagtatttttagtgcagttttgaaatttttctttttattattttaaagactgttatgagtgctctaatacatatttttgtacgattgtacctatgtaccgaaccctcccctctcttctaattcaatgccctctctcttaaaaatttatatcaaaacttttcatccaaaagaaaatatatatattattgaaaacaaaagaacaactatatataaacattcatagggtttaaaaaaataagacattatacataaatatatagactttgggccggggcaagtctttagtcaaataaaaacattgcaattgtgcgtgtcaggactcagggaaaaatgagagaataatttgtggcgtcttttttttttctttctttcgaagtaacaaagaaggaatggaggcagacattattggcggttaggaaaacaacaacattaataagttgcagagacacatcaaattaataatatttatatatggagaagtgttaaaaggtagtatttgggtctagtatttagtttagtgtcatattactcttagtataattaagtatcagtttttatatgatttaagaaaataatttttaaagaatattattagctaatcatatctataaaaaagtattgagcactaataatattcaattacaatgctcttatatatatagggatataattttgtcttgctattgtacttttacggattgtaatctatgatgtacggtagccgtcagatgagagagttatttgatctaatagctgagattgatctaggaataattaggattaaaaagtagaaacgtacccttgacactcatttaatgtaccctgagacccatataatgtaccacaaaatacattccgtgaaagtacatcacgggacaaaatcatatccctatatattatagattaattagaatttttattttcataactttaacatatactaaattataccacttgaacttttttaggctgttaatttttttttttcgaattattgaaattattaaatttataattgtttatctaatttcatttaattttactaatatagtgattgtctatatactaaatataatcttgtcccttgaattttatctactaaatcatggcttctgatctttcaaaaatataaaattgtgcctcctaaattttcatccacgtcaggctttgtttagtaagataggacaaaagttttaaatctaacaatcttaatagttctgtaaaaaattttaatgatctaaaaagtttaagcatataatttagtacatgtcaaagttaatagcaaaaatcttaattaaaaaactgatcaccaatcaatatataaaaaggcaatatataatttatttatttgaccaatatttaattatttagataatgttctatacgctgttgacaaaattctctatacgtacgtgagaaaacgcgaaaaaaaaacacctttttgcatgcaatgtaaaagatataattgtttttccatagaaaaatggtttggatcctttaaaaaatattaataatgtcacaatatatagaattaactcacctaaaatagttaccatagttattcctaaattataactttacacatttataagaaaattataacagatatattagtaaaaaaaaataatataaccaaatcataaactttattattagatataacaaattatgtttactaaacaaaaaaatatacttaattaaaatattaatactcaatagaaacacatgttaattaccttatataactttgattccaaaattaatatttgtgatttaatgcaagaaatatatacgttggaagaagttatatatgtttattatgtatgtgttgtctaaataattaagatggtatatatatagccgtatattgtgaataaggtgctactcatatgaataagcaatatgtggttcaactcaatattaattattctttaaatactaattagtaatagaacaaaaatcattattaaacttaaatactaaaacatatataaaatttgataagagtacgtataaaatgaaataaaatttaatactaattagtagaaaaagactcatcattagaaagaaaggaaaagtaataagaaaaaagtataattgagtgctaatttaacaaaatatcaatattataaataaagagtaggtacaaatagtaaaataaaaaataaaaatgagtataataaagtagtaattaaatttcgaatgtatgttttatatgttaattagtagaagaatattgtggttttaggttgggcaatgttttatacgttaatataatttttttttttgaaagataagatatacgttaatataattatgaacagaagaatgttgtgattttaggttggggaagatactcatatttttttttatatatcttattgtaaaatatgctctttagtagttaattatatatatggttatgtaatattatattaattattttagatatcaattaatacggaattatatatatcagttaccatatacaatttcatagtaattgccaattgttatgggatactacaaccaataagtagttaaggaaaaaaagtactaataagtagtaacatctcctattatatatgaaaaaaaaaaaatcttaattttaaatagtatctatatttttattattttgatcaacttttttattatattaaaaataaataaagaaataatatttatgcttacaaaataccaaattaactacaaaagtaagtataataaaatagtaattgtaatttaaaagtttgttagtaaagttattatatattaaaatatgggtaaattgaaatttatctcacatattagcaattatttatattatgaagtgtccctatgtaatttttttcatagaaaaatatgtcttgttataaaaaatattcttattaaaaagttgttctatattgtgtaattttcctattaaagtttcagtttaattttattaaaaatgaataataaataatttgattttgatacatatatttgatgtagtgtaattataataaagataatttagttatggtgaagatattagagaagagtgtttttccatttccgttaaaaattttaatttttattcttacttatttcttgtcggggacgaaacgtgaaatcccctaataaagcagaaaatctcttaatataaaaataaaatttatattaaaaattgtaatatataaaaaatattaaattacgcaaaaatttaaacactacacattatttattatattaactattatccaaaatacaacttaaaattttgtaaaaaaaatactaatctttttaaaaacataaaatattattgaaagataataaaatattaaatgggtcgtgtcatccccctcctgcctcatttaacatttaggaataaaaaataatcctcctctagttctccatttaagagaattcccactccattaaaaagcgggtcccatgagctcaatttccatggaataaatgtatatccttaattatatacaattaatcctattaagtatcttcatttgaggaaataatacaaaaaagtgaaaatagcttattagtttgtcaatatttctccccttttcgtgtattaattttttgtttaattatcaattttttatttttcttaacctaacattttttttttctttcaattccaatgtttaagtaaaaacgtttaaattggaagaaaaaaaatgttattaccccgttactacctttgaatacaactatatataaaagagttagttaaaccatgtatgtaggtatgtatgtatgtatgaagaactataatttgttaaaataactcaaaaaaaaaaaaaaaaaaaattaagttcaaccattttgtag

SEQ ID NO: 27941 - DNA, 1736 bp, Cannabis sativa
cttaagacctggaccctgacatggacctcgaaaacggacccaaacttggactcgaactcggaccctggccctagacccagacttggacccggacacagccacagtcccgaccttagaccctggccacagtcttggactcagactcagacccaaactcggactctgaccctaaacgtgcacctaaacccggacccaaccacgatcctgaactgggccacagtcccaccccaaaccctggccatggtcccgacctcgaaccctggccacagtctcgacctcgaaccccaaccatggtcctaatcgcagaccccagccacgatcccaccccaaacctcggccatggtcccaacctcgaacactgaccacggtctcgatccctgacccggcctcagcctcggacccaacgtggttgtaaaatacatttttatttttcataaacaaatttttaaaaataaaaacttttctttttgtgattaaaaaattcaaaaataaaagtgttaccaaacactacttttttaattagttttttgtttttaaaattagaaaaatgatattttccaaaatcacattctataaaactatttttcactatataattttcaaattcagagtcaaaatttagaaaacaaaaaaaaaaaatcactttcgaaatttttttaaacaattttttttcttagttaatattttggactccgatcccaaccttgaccttggaacccagacccaaccctggacccaaacccatcccaaaaccgaaccagcatcccaaaccctaaccttaaccccgactcggaccccgaccctgaccccggaccctgactcggaccttgaccccggcccagatccgaaccccaaacttggccctggacccgcaccccagccctgaacctgcacttggactccggacctagcccttgaccttggactcgtacctaaccccgaaacctaaacctgaatccaaatctcgacccggatcctagaccccagacctagacttcaaactcgaatcctggacccgaaccctagacctgggcccgaacccaacaccgacccaagacccaaacctgacctcgaaccctgccccggtcccaaccttagactcggacctgactaaaataaaatcaatagataaaaataaaaataaaatttacagaacacacttttgctttatagaacacatttttattttttaaaaacaaaattttagttttatttttgtgatcaaaaaatttaaagacaaaagtgttaccaaatgcgacttatatattatttaatttcatatgattatagggattctcatcttgacacccttaaatggaaattacattacataattcaaattagtaattgtaaagtagaaaagcatgtcaactattatataatatggtctagttatacgggcttagctcagaaaacagagtaaacaaattaaagcacacattttcatgactcagtttctggataactttgggttttaataaacatttctgacagtcattatcagcataacatgttcaaattgataaaaaaaaaataataaataagaaatcatgttcattcatgagccagtgcatttttagcacccataactattccattcctacctctaaaagtaccaagtatttttacttaaaaatccaatataatacctgtagcacaaaccaacaaatactagttaaagatttaattagggttaattttaaattctacccattaaagggtgtttgttaaggtgg

SEQ ID NO: 27942 - DNA, 2908 bp, Cannabis sativa
ctaaataaatataaaagttggtatttttataatgtgcggtgtggtgcggtttgaaccacatattaacaattcaaaactgcaccgcaccgcgcagattaaaaaaaattcaaactacaactgcaccacaaaaaatttcaaaccgcaaattagtccccaaactagtcctcaaactttattttttagtaacttagtcccaagcttttattttcttgaaaacataaagtatttactcttaaatgatgatattttatttatttatatatttagttttgtattaatttaaaatatttttatattgatatacgttatcaaattaaaaaaaaaaatacatattatgttatttatatataattttttttttaaatatgtcaaaataaaaggaaaaaaataaaccaatacatatttttttaaatatattaaaataagaagaaaaatagtttttatttttatgcattttttttttaaattcaaacgaacacatattttttaagattacaaagctatatatacatgtgaactagaactaataatgtctttttataacaacacttacgaaaattattccatgcaccaaaaaataaaataacaaatatataagtcaataaaagtttttggatttagttccaatatctgatttattattgtattttgttaagtaattgttctacttaataaatatgattgttcaaaaaaaaatattataaccattcaaattattaataaaaaataaataattaaaataataagctaataaaactttattagagcatcattttgttttctagggttatttggtttcttgttactcttatttctcgattgtgttaataatgcttttgtctaattgataccaaaaatgcaagagctctacttaaactaacggcaaaagattgattatgttgattatcttaattatcatagccaatgaatatgattattagcaaaaattcaattgtcattatgtggtgagttatgttattataagatttattcctaataagttaagttactataataataatatattctgagtaatttatatagtacgtgaaaaacttaatttgattgtgtgttttattaagttgggactcaagtttttttatattttatcaaatttagctaaattttctaactaaatactattcatgtaaaatattatttgatttttaaattacttcggtttttcaattgagataaagtttgtatttagatggaaaaaatctctccattatttatttagatgagatcagtggggcttgtttcaaatggaatcgtccaagctcgggttgggatggaatgacaacttgtttctatcaagaaaattggccgaatgtcggtgacaatgttagtgcaacaacccttgataaaactcttatatgtcttatatattctaaaaattgattcttctactagactttctgattatcgtcctattagtctttacaatatgttttataagattattatcaagacaatgattaacagaatgagagaagttttatcaggcgtcattttcatgaacaaagtactttcttacttggtagattgattattgacaatgctcttattagttttgagtacattaatacgctaaaaaaatggaaaaaagaaacatggtgatgtggggtattgtgctattaaacttgatatgtctaaaacttatgactagttagagtgatcttttttggctaacattatacagaaattaggctttcatgatgtttggatcggtaaggtgattgagtgtatttcttctgttgaatatttaattcttttcaatgttggtatttatggtactattcaacttaacagggactttcgtcaagatgatttcatgtctccttacttgttcttattatgtgctgaagtattgacaactttggtaaattgagattatgataataatttgttgggtggaattctgtgtggtaggtctgggccgatcattcctcatttgctttttgcttatgatagtctatttcttctaaaagcatcagccttggcctatgaaagattcaaacttccactctcttggtatggtgcggcttcgcgtcagagtgtgaattttgagaagtcaagtgtgtgttttagttcttattgtttgatgatacaagtgagatacgttggtaataacaattttaaatataatgacgtttacaagtgagatacggtgatgacaacaattttaaatcatatgcaatgatcattttaaatatctaaattatatgaggatttttttatttctattttttctttactataacattttaagatactttttcattactttctttttcaaatttgtacgtagagttctttattttttaaatcccaacctctgctaacatgattcagtagttaaatatgattattttaagaaaatagttaattttaataatattcaaaataattaagtactgtttaatagaatgactatcccaaataataataataataataataataattttttaattattattattattataaaaaatcttaatccaagggatgactatttttccatttggaaaaaaggtaaaggccaatttgtaaaattgaaactcaaattttaaataagttgcggcacaaatatttaagtttaatttttagttacaaataaatacttaagtttaatttttagaaaaaataactttaaatgttaagtcattatacacgtgttattttttattagtatatttaaattatttcttaaaaaaaataaaaattcatgacttgaaccaatcagagattgccacgtgacaatttacttaacagttacaaaagttctaaagttataattattattactgctaaaaattaaatttagatatttatttacaactaagagttaaacttaaaaatttataccgcaaattagtcatcaatttttattttcatgttaatc

SEQ ID NO: 27943 - DNA, 3486 bp, Cannabis sativa
ataataataataatatatctaaattatctagattcctttccatgtaatcctcatttttgtcccctctcttattggtctactctttaattttattatttattttttaattatatatatatatacataaatctacacaaatatagaactaactagccataaaactaaaaccctagcctttttcaaatttacatgtatgtaaaacctaatgtctcttatatataaatattgcatattctccaattttgatctcttgcatggtggaaattgtctctttttatgtatatatataatatagttgctttaatctagatgtctagacatatatatatatatatacgtgctgtgtgttatatacatttataaatttattttacttatttattgattttgttacaatatataggcttattatatatatcaatatcaactatatatatggcttattgtgtaggagagaatttttataattattgatttttatgatgtgtgatgatttgttttgttatataaaaaataataaagaacaccataaatatatatatatatacgtaatacgttaaattttcgtttaattaaactaaagtgatttattaacaaatatgtatatatacttatgcatcaaatggtatatttgtatgcattattaataatataactgctattcttaattttattgtaatataaatggaaatgctatggaattaattatatagtttcaaattaattaaaaaaaaaaaattatggattaaacaaattttcaagatcgattatttgtgaagtgaagtaaaaggaaatctgctattggaacatgggtttcgtaaggtaattattaattaacttagtctaagatataatatttattacaaataaatattattgatatactataatatatccatgtaattaatgttaatataattcatttcatttggattgatatatatatatatttttcgttgtatatatagctctctttctctgttatatatcatgatatatatacatatatataaattcatgcagttctaattgcatctaatttcttactctactcacttggaactttctttttatatactaaatcgatatatattgctggctatatatagctctctctctatatatatacttttgataaatatttatgatcattaataaatataataggttatttatatatatatatatttatctagggcaatatacataaatataaaatcagacaattattattataacgtatattctttctataatattattaatattatgtgtgttatattttctgagaaaagtagttaagaaatattgttgtgtgttattattataactgacacttttacgattagctaggttggatcactatattaaattactcgtactagtagtttaaaaatgagttattatatatggagaaatttgcggtgtaaaaatataaatttaaactcggtcacagataaatatttaagtttaattttttaccgtaatattacttaagttatatttctgaaactttcgtaagtacttggctgttagtcacttaatggtcaagtacttacggaaattttaaaattataacttaaatattattaccgttaaaaattaaatttaaatatttatttacaatcaaatgttaaaattaagtatttatgacagggaaattaataggtgacattatatatataatcattttcacaaattaactacaaagaaaaaccattaatttgctgtatattaatctttacatgatgattaatgtggatgaaacaatattaatatctctgttaattattactaatatatatttatagttaatttaaatactttttcaatgatcaggggttgaattaattattattaattagctatagctattgtaatttttgctaggtgtgcaaactggatttaataataaatgatatatatatagctttctaataatttcaagctacaaaaaaaaagtacatattaaatgttaattattaatttgttataattatgtgtaaataattattgaaggcatcactttttttctttcttttctttgtaattggtccctaagtaattaatttattacctctgtgccaaacttataggacataaataaataataagtaatttaatcaatgaattaatttttgcaaggaattaataaatcaattagtttcctttgaaaaaaaaaaaatctattttaattaaatattagcaaaacaatttaatcaccttatttatgtgtttacgataggtagaagtattatctataattatatatatatcgaggaattttataattgggctaattacttttgttattattagtaggaacgtaatacttatctttttatttttaacacttaaatataataagtcattttttaatgatagatactataatagttatagcatgtattttaactgtattcgaaattttttaaataatttatataatgctaaaaacatggttgtaacattaagttgtatgtgtattttttttttattttttttttaactgagtatgaatatattatatatttagaactttactttcatatattatttataatttttcaaaaattgaaatacctatacaataatttaaatacaataaaaatcatcataaactataatttcttcaaatacataaaacaaagatgagtaaaagtataacacatctctcatgatgttttagggaatatatatttatatatatatatgtgtgtatatatatacaaattgttgctctttttcttgtgatatatgtacttctcttaaataagatagagcttgtgaagatatatataccatgaaaaaaaattgtgcatgcatatttttgattaattaattgatttttcaaaacattgcatgcgcccaacataataacatgatcaacaatctctcacactctcattatttgtggtgatttttattcaaagtatgttcaaattaatttatttaattttgagatatatttttacttttcaaattttgacatatattaaattatttcttttgaactttttatgtcattaaaatttttttctgaactattgaaattggtagattcaaagttcggagttgaattgatacatgttaaataaagttcagagacacaattcaatagatatcaaaattcggagatgaattggtcgtagatattaatgtttgagaaacacaatttaattagtacatgaacaatcagcactttagtaaagtataacggaattagacagatgtatgaatttaacaatctcaataatttggaaaaaaaatttatgtaaaaattttgatttagcgtttgagatatacctttttcttttttgtataaaatataaaattagctaatttagaaaacattcatttattgatattctacttcttcaatgcaatgcatttttgtgtgttcatcccaatttggatacataatacacattaaaattaatgtgtacgttaaagcatcattatttcttagatatgctgcaagaaaat

SEQ ID NO: 27944 - DNA, 1926 bp, Cannabis sativa
  modified_base (58)..(61): a, c, t, g, unknown or other
ataatgataatttataattaaccacaactatttatctttagtcacaaattttgttgtnnnnaaaagtaagattttttgtaatgttttcatatttgatttccttgctcacacccatgcatattaaggtggcacatttagttagagggaataaataaaataaaatggaaataaaataacttttattttatttcttgtttgattttattttaaaatattgggatgtcattcttatttaagttacatttttattccttctaatattgtcatttaaagtgagacttattaattaggaaatacaaatcccttgtcattcaaatttatttaaataattttacattctcattctcatcaaatctaaaactcataccaaacacttcataaaacttataataaacaacctatgagtgtaataggattgacgtccaacattgctcgtgagtgaattataaaatttttaagccttaaatcctatgattaaatttttgtaatcaaataaaagctatgtttggtgtgctaaaaataataattcgttaactattttatcgaaaaataaataaaaaaataaaaggttaatgtaggagagagggaactgaaaaaggtggtatgctaatttacacttgttatctctaaagatggatcgagctgtaaccaccatactcaaggtgggtagattcccaatctcatttctcaactgtaaaaagataagtgctacactaacagatgagttggaatcttataataatatcagtaatatatataaaaggtaaaaagcaatttaattagaggatataaatttggtttttggtatctttttgtaccttactttgtatgtatgcgtttcctagctagctaggtcaattaatttgtgtagatatagtttaattaatttatgaaagactaggcctatttataatcatgaatcatgatttggtttaattattttaataatgagcttaactaattagtaaatgtttggtagacttaaacaatatatatatatatatatatataaatatatgtatttcttttttttttttttatttcaattttaaaaggatatggaaaaaagaattttaagatcaatatacgagcacttctaggtcactaattataatttgaatctcgtccaaacacacttaattacgaagttatgaaaaaaaatctagtgcataaagttatttaatttaattcacactactacaaaattatcctttagtttcagttattttgggtctttagcttgggttttgataaaattcataaccgaaggcatttcaaaccaaacgaaagaggtcaaaaaaatagaagggaaaatagactctatgcccaataaccgaagccataagtaatatatatactaatataaaaaaagaaggtaatttgattaaagacgaactgtccaaaatgatattaactgtgtattatgacaaaagtttttgataattataagtacattaaagaaattgtacctaactatatatagtagtggtatactatacactttaagggttttttgtggccgggtggagggtcttgtgttatatagtaagagtggaagaagataaatattcgtggggtatatatttagattccaagaagataggagaaaaatgagtaattcacaagatcagtatggcctaatgaatgattgaatgggttgcactctctcctttagccaaatatggctccatttactttcatcttattggaagataaaaggcttccattatcagacccacattgcatgcttctcatatgaagtgaaaaagaagtgattataaaaaacccatcttttttacttgctgtctctgtcaaaattagtctttggaaactaaaaaagattggatgcctcaaatagctaggtaaagggtatatatatatataatgcataatatatatatataatgactcatgacccatgatgta

SEQ ID NO: 27945 - DNA, 3292 bp, Cannabis sativa
taatatttttgtaaaaaattccgcatgacggtaaaattataaacttttaccaaaatttagtatttttgtaaaaatcccaattttatttgaatagtttttataactaaaatgtaccaattatatggtaaaactttatgaaaaatgcactttctaattcttaaaataccgtaagttatatttttctattttccgttactaccattttattaagtgatgactgtacttattaggatgccaaaagtcatgttgttattggtccatctcaattaagtttaaaataattaaattattattttgaatgaaataataaaaaaaaacttattaaaaactaattaattaataaatttttaaaaaaattatctctcaaatttatatttatctgtatatatgaagttaaagatatgaggtagtaatatgacactttaaaatcactccaaacaacactatttattatctctttaattctcttattttttttattagatttataaatatttatttattttctcatatttttttctattttttttttatcatttcatcattattaattatatcaattattagttttgtttaaacatctatataacatggctaatttttaagaaaatatttatttatttgataagttttatgttatgtgtgttgatctcgcttttagccaacgacattaaatctttaaagtgatagcaattattaagaaaataataattaaataagagcaataagaacacacaaaatttatagaggttcggttctaataatgataatagtctactcctctttttgctatattacttatatagaattatcaagatcacagggggtctgatcaagtgagttttttaataatctcgagaaaatttacaattatttttgcagagtaaacttaaatatcaaatctcatgattttttcaattgtataaagttaatctcacaaagataggaattctaaatggactatgattgtagagatatttaaggaaaatatctctgaagatctttactcgttgtatgcttctgtcaggagaatgacacttgattggcatgcctagactgcatagagtagtgcgaggcttggggcatgcccgaatggtaaatactaaaggtccagacttaactattttgggtctgacttgatcttgacaaaactataagtgggtatacttcatccagatttgaatatgtatagcacgtatcatcctgttgagtgctacaccaccttgtgcacaatttgagataacaacgtgttcgtggttttgagttttaatttattactttttggataaatttgaagaaaattaatcaatagtttcgaaataaaaaagaaagaggaagagagaaagagattgggagataatttttaaaatgttttaattaattatttagttttttaaacttaatatgagatgaacaaataataatatgacatgtggcatcctaataagtccagtcaccacttaacagaatagtagtaacgaaaaatagaaaaatgtaacatatggtatttatgtcgttgaaaaaaagtaagtatttaagtgtataaattcaaaaacatatgatatttatgccgcaaatattttttcataaaaattgcttagtgcaagtgtttactgagattttcgaaaactaattatgaaagagttaataaattaaattaagtagtagaaagtagagacgaagatttttacgcggttcgagtgttaataaaccctagtccgatagtcaatcgtatttgtctaaatagtcttgatgtattacaatgttcttggcaagcttaagaaccataatttcttgatatagtgtttacactatgaatttccaaccctttttatgagggtataacgtagtatttataggctaaaatctaggtacgggcatacccgtgactctctagggtttgcatgtaagcttgacccactaattgggtaaatacataaaatacactgatttttggcccacggactgaggcccgactcgtgggacaaaggtgaatcgtatgcttaaggaccacgcgatattgaaagatcgcatgtgtgtgccgtctttgtgcactgtagtgttagaatagtggccgtcagacaaaaagtaggtttattttggtggtgcgcgcactcttagggtctgacacaggggacaatcccctgattctctaagattcagagtcagggggcgctatgtcatcctggacttggttttggggacacctcttggaattccctttcgaatgtatcccatatgctcattcgaatttgttgctccttcttaaatgggcaggatgccctttcagatctggagagattaggtcttggatgtaaatttcttgggtctggataggtgtgaggcccatccttctgtacagattgggactgctatcttgttagggcttttgatcaggtcttaaatggttaattctgatttagaaataccacatgtcttccttccaaaaacacgaataacaacaagaataacaccaatcttgttatagtccatttataatttccaccttaaaatagataagagatatgtgtggataaaaatattgaatttggataaaattttctctgtctatttcaaatttttgaattacttttctcgtcttcttcttctataattgatttatcaacggatgaaaatgtacttaattagtctcaatatttatgggtgcatttgtaaaataaataaataaataaatttttaaaatataaaaattgaaataatttttttttttttattttgaaaagttaaaaacacatttaataattatttttataattgaaaacataattttatttatttaaatgaggagaggaaaagtaaagtaaagtggccaaaagaaaatgaagtgaatattgataaaatagagtacaaaataaactataattaaaaaatatttaaataaattttaagttttctttttttttttttggcaaagtaaagtaatttagtttcaaaattttgattttatgaaaataattttaccaaatatattttttgaaaatatttttacttttttaaatatgttttaagtaattattaccaacataatggggcatgtttttttggagctgataaaatctaaagtacaacattgaataatgagtcttaattatgtatttggtaaagctaattaaataagtaattaactaatgagtcttgagaaaaggtcttggaaaaaatactcttagttgtagtatgtacaaacttgggtacctattagaaggaatctaataagtagtcaaaatcataataaataaataatcatttatccctcttcaaaaaaaaaaaaaaa

SEQ ID NO: 27946 - DNA, 1691 bp, Cannabis sativa
cgttgttctcggcttctggagcagtttgtactgaggttattgacagtgtggatagacttgtttctcccgtggctaatgaggagttcggtgcaccggtttctgaggaggaggttcgcaaagcaattttccaaatgcatccggacaagagtcctggacccgacggtatgactccggccttttatcaaaaatgttggaacgtgattaaaagagatgtcattgcttttgttcagcattttttcgacaatggccagcttgattcggcttgtggaatggccaacgtggggttgatccctaagaagaagtgcccagatacgatgaaagatttacggcccatagctctttgtaatgtcctatacaaagtcataacaaaagtgatggctaataggatgaaacctttcatggatgagattgtttcggactcacaaagtgccttcattcctggtagattgatctcggacaacgtcatggtctctttcgaggtccttcattatttaaagcggaaaagaaaagggaaaacgggattcatggcgctcaaactcgatatgagcaaggcgtatgataggatcgaatggccatttctagaagctatattgatgaaaatggggtttgctccaagatggattggcttattaatgtcttgtgttacctcggcaaattatcgaatcattcatggctgccatgaaatgggtcctattatcccgtctagagggatccgtcaaggagaccctctctctccgtatttgttcattctatgtgcggaaggtctatcctctctcttgcggaagtatgaaaatcatggctacattcatggatgtaaggtggcaaatggtgcgcctcgggttacacacatgctatttgccgatgatagttatctatattgtaaagctacattggaggaggctggtcgtattcaagaactgttgcgtaagtttgaactcgcttcaggtcagcaagtcaacttggctaaatcttccatttttttcagtgccaattcaacgccgtttgtgagacaacaagtttgtaacttcctcaacattggagaggcggctgagggtagcttttatttaggattgccaagcacaatgtctcgtaataagactattgttttgggctttctaaaagacaaggtgcggagacgtattcaaggttgggaaggtaaatttttatctcgggcgggcaaggaaatcttggtgaaaactgttcttcaatctttaccaacttacgccatgagcgtgttccttcttccattggagataagtagagaaattgagagaatgatgacaaaattttggtggcaatcttcgaagaattctaataagggaatacattggatggcttgggacaagcttagcaaaaataaaaaaggaggtgggcttgggtttcgtgacttacgggattttaatttggcaatgttggggaagcaagggtggagattaatcactcggcccaactcgttagcgtcaagagttttcaaggctagatattactctaatggctcttttctcactgcccaacttggttccaacccaagttttgtgtggagaagtatattagaagctcaagatttgatccgaaaaggtatacggtggagtgttgggaatggtcattcgatttcagtgcttggtgaaccgtggttgccggatccatcgaatccttttgtggcttcaagtcacccagcacttgcgacagcc

SEQ ID NO: 27947 - DNA, 4669 bp, Cannabis sativa
gatccaattggatattcaaaaataacatccaatccgatccgatcacaattggatatccaatatttgacggtcggttatcattgaattgtacccctttgaaaaaataactacttcaatttgaaaaaataaaaattatcactatttaataattttagaccataataatttaaatatacgtttttaaatttttacttctaaaaaatttttttagaaaatttatcatcttaattattaagatacaccaattagtaattttttattctatattatgatagtgtaagaaaaacttaaagaaatacatattttcatgttgttaaaatatttttcatttttatttaatactgtatttaaagtccattttataaaaaaagttttctttttattacacaattttatgaaaaagtaaactaacaatattttatgggacataatcaattagtggttttgtaaattaaaaaaatattgagtatttggtaacaaattttaattaacttttacattataattttttaattaaaaattaaaattttaaaatttacatatatttttgtgattaaaaaattaaaaattaaaaaatattaataaacgatcccgaaatattttaaatgatatccccatattatatatataatatttcaagattagtaaacttcagcatattaataaaacttgatgctatacaaaaaatgagcgtctgccttttctagtgctctgtggcagttattgtccttcatggttttacagttactcatatgatactcatccttttttctgcatcctttttccagtttttagcagttattatccctcccttagcagttttccaattggtttttgcttttgataatctcctattgttctaagcaatttaacgattctcatcaatggatcctctgactaacaagatgaagtcaaagatcactctattgaagatgaagaaggcgtgttcgaattccatgacactgaagcggttgttcctgctgtttccactgatctagtgttgtatgccaaagtccttaccaaaaagaaagtttggttatccacattgcagaatcaaatggcagagcactgggatggtagatttcctgtgaaagtctcggaatcctctgatatgtttttgttaaccttcggctgtgaatgagacaaaataagggttcttgatcgtgggccatttcattttcagaaccatcatatagtcttgcatacaccagaaattggtaaaaacttcacttctgaagaccttaaatttacaccattttgggtgcaaatttatcgtttaccctttctcagcaaaacaaagtctctggctgtggcacttgggaatataattggagagtacattgatgtctttgaggattctttaaatgaaggttggggacccttcttgcgagtgagagttaaattggatgtttctaagcctttgaagaggggaaggatgatttctttatcaaatgttcgggataaattttgggtagatttttgctatgaaagacttcccgaatattgtatggagtgtggaattattggccatccctttaacaaatgccttgtctatcttgaaaaacttgacaatggggtagaacttgatcttgagtaccgactgtacatcaaaggatctgcactccctacttccggatacgatcgctatcgtacggatttttcaaaagggaatgcatggccattgttgactaggcttgccaaaaaaggtctcacttcagcaattccccaattggaacatagaggtttacctcaaccacgaaaattgctctttggtgagtcctctcgttctaatgctcctgctgcttatgaggacgttgctaataatcctgacactatattgaataggcctcccgtaaatgaaactcctggttttactcccaacttgaaccaaatacatcagcctgtcacttttgcaccttcccatcttgataagtcatcgatcattccttctaccagtgccacaaaaagttttctcaagtctgctacacatcaaaccattggcaacttagagaattataatgatctcaccgggatttttaatccaatggcttccatttccaacaacaataattatttcgccacttaccctcctgccactaccccagttcccgtccttaataccactaatcaaatgatctacccaacttcatcttccatggcattagccacgtatacatccacaatggctgctggttctactaatggtcaggaaaatatcaatccaaatgtgcaatcaaagaggaaaatacagagtctttcactaaggcaaacactgaaaagatgcagagcaaatccaccaacaacctcaacttcttccttgtaagatgaagatgatttccaccatcaagtttctgttgacaacatggattctactggtgtaatggacaattctgcggaggctggttaccagtcccgcaatcagccatgaaattcattagctggaatgctcgtggcttggggaacccgagtgccatccgcaaacttcgtttgcttgtaaaagagcaaaaccccactgtacttttcattatagaaactaaattagcaagtaattctatttcccgttttcgaagtcttttacatttcaataatggacttgaagtccctagagtaggtttaagtggtggtcttatgttactttggaaagatgatgtagatgtaactttgcaatattttaatgaaagtgtatttgatggttatatcgctgttgcaaatggtcccaaatggcacttttcggctttctatggtgctcctgctgttcacaatagacctttaacatgcgctcttctaaaaacactcaaagatgttgcccctcaacttccatggatggaaatttgtgattttaatgaaattctttcaaatcaaaataaacttgggggaggattaaggaatgaaacacaaatagatgacttccgtgcagtgttggattattgttctttttctcaactaccttttgagggggatccttacagttggatcaatggtagacataatgttaatgccatcaaggagcgcttggattggtgtttcacaaatgacttgtggaataccacttttcaacccatgacaacctcacatttggattatttttcttctgaccatcgggctattgctgtcaatgtgttgtccatctctttagttcaggaaaaaatagcaaggaaaataagatttagatttgaaaaaatgtggctagatgaacctgaggctgctgccatcatccgtgagtcctggtcaataaattcaagtggtggagttgatcatttcctacacaatctgcacttttgcactgaagcattgcaacagtggcatgtatccaagtttggtaatttcaaaaaacaaatttcagaggtgcaaaagaaggtctcgctgctaaataatgcaacagcaacttctcgaaatttggtggagttacagactattgaatctattttggatgaattgcttgaacaagaagagaaatcttggcatcaaagatcaagagttgattggctacaaagcggggatcaaaacactaaatttttccatgctcatgccacttctcggaagtccaaaaacatgatcagagcacttatcaactctcacggcagtactgttacatctaaggctgatctcaccaacaccatatctgcttactatgataacttgtttacttcagatggggttgatcaagtgtctctgcaggaagttctcagtgctatcccaactaccatctcaaatgatatgaaccaatccttaattcaccctttcacaagtcaaaacgtgtatgatgctctcaaatctatgagtcctgataagagtcccggttgtgatggaatgtcggcaatgttctaccaaaattattggaatattattggtaattcagcaactcaactggtgcttagtgttcttaacgaaggactagacatgagggatctcaataagtccattatcacactgattccaaaagtgcctaacccgagctcaatgatggattatcgacctataagtttgtgtaatgttatatataaacttatttccaagacgatcgtcatcagattcaagaaggtgcttccttttgttatctctgaaacacaatcggcttgtctgtcgaatagattaattacggataacatcttgattgcttttgaactcattcatcatattcgtaacaagacacaaggaagaattggatattcaacactcaagttagacatgagcaaggcgtttgatagggttgaatggcactaccttgaggctattatgctaaagatggggtttgactatacatggacttcattgattatgaagtgtatatctagcagctctttctccttttctcttaatggtgacatagttggacaagtgcaaccctcttgggtttaggtcaaggagacccactctccccttacttatttctcatttgttcagaggggctctcaagacttttgcaagcggaagaacaagctggtatgttgacaggccttagattgacgcgacactccccttctgtttctcacttgctttttgctgatgacagtttattattctgtcaatcaaatgaacaatcagccatatccattaagaaatcacttgacacttaccacaaagcatatggacaagttttaaacaatgccaaatctgtcatgtctttctcgccaagttcttcaccagcagctcagaattttttctccca

SEQ ID NO: 27948 - DNA, 1722 bp, Cannabis sativa
aagctcaaattttagtgagaaaacatcacaaactctacttctgatcacaaattttgtcttccctccaatttcctccgttaactgttaggggtgggttgtattgtagcaaatttacactagtcattttaattaaattattcaaagaaaaaaattaaaacttaaaaaaactaatttgaaattaaagaaaaatcataaattaaaaagtattcttctaattcttccaaaaatcaccattcaccaccaccctctaccaccacggtaacctatttatttgtcaaatctatatcaacaccaaaaaaatataataaaattcaaactgaaaaaataaatcctcatctaacaactcatcacaaactcaaaaacaccaaaatagcacataaattataaacacaaaataaaactagatctgtcgagaaaaaaatcttttaggagtcgataagctagcatttcacaccattcaaggagccagtcggtttgacaactcaaggagtgctggtacgctggtttgtgcgcgagagagaatatgcgaaagataaggagggagatcaagagggggcaatgagatgagatgctttgatctccattattgggctagacatttttatatctaatgcttgacgaaagtgagggagacatttttcaaatctagcattgttattgtagttaactataagtcgctgtcattatgggttttgttagttagttccaaatgattaggaatctgttatggttagttaagcctcttttatttttctaactaactaactctactatatataaatcatgtaaaaactggttgatcaatgtaatgaaaataattctttttgattcaatttttcactttctttctctctttcctttgctctatctttccactcttcttcttcttcttcttcttcttaaagtctgattagttactattcaatgtgtcacaaagatctaatatggtatcaaagcgagaatttcctccatggatggcaaatatggcacaccttgggaataaaccgccatcaaacagttagggccttcctcgacgaacaaacttgttaattaactaagaaatagagccactacttatgtagctcctgtctcgttcaatcacaatttttcaattcaactcaatgatcataatttcttgctatgaaaacaacaagtattggttgcgatcaaaggtaataggctacaaagatttatcttcaatcatcctaacgatgaagatcatgttatccataacacaagtcctgcttacaaggaatgggaggtgaaggatcaactctgtgtttcttggctcctatcttcaatgacagagagtctctgctcgaatggtagggtgcgaaatggctcgacagatctggaacactcttgagaagcatttttctcttcaagtttcttccaagattcttcagttcatgactaaattgtagcagatcaagaaaggatgaatgtctttgaatgagtatcttttgaaagttaaacaaatgcttaatcattttgcatctattggagaagttctcattccttgggatcacatagctacaatttttaaaggtttacctagtaagtatgacacttttgtcatctcatctaacactagaattgaaggctactctgtagctgaaattgaagcttctactcttatcagagagtaagattgagaagaaggatgttgaaattgatctcaatgcacacatggcaatccaagatttggatcagattgaagct

SEQ ID NO: 27949 - DNA, 2418 bp, Cannabis sativa
  modified_base (1051)..(1059): a, c, t, g, unknown or other
  modified_base (2162)..(2162): a, c, t, g, unknown or other
tgagtctagttcaggcaaggtttgtactgaaggggtctctcactgacatctcagctttcgacgaggagagtgagtacacgtgtcattttcataggagtcccatctcgagtttctaggtgagaaaatctcactataacagttttcttctcctaataaaaaactattattgctaacataattggtatttaaaagagattaccaaattttagtttttactagcaaaagaaattaaaacaaaaatataacaaaattaagctaagatcaaagcaggttccaaagttgaaaagtccactcgcatctgtgtgtatcttttcaaaacattgatgagagtaccatatgctaaatcgccatgtttgtcagactaccatactatgtcgatcaagacaaaaggctccaagttatcattaaaccttccaatcttgctattcaataaaattaattttgtattaaaataaaactttatttcacaaactttatttatcataccaacaaaaaatgacctcactggtcttactaaccatttcacaaccatactggtttaccaaaaacaacaaaaccatattggcttacataaaaattgcaaaccatactggtcgtacaaatgaaaaacacccaaaggtgtaaaccacaaaatagaacaaactacaccacaatttttttctagaaacactaaacaaaataaagcaattcatttataaactaaaaaaagaattaattgcatcattatatagcagttactaaggaatagacaactattataaaccgacgactataatttagagttattgtcggtttataatagtcactagagaatagcaccgagtccattatgaaccgacatctattcctgtaaaacaaaggccacaatgaaaagcccatacaaaaccctagtaatatatatacgtatattcctttttcaaatcctaaaaatcagccccttatttctctctctcaaccgatcctccctctcttaatttgttacatgatcgactctctctcttcactcgattgattctctctctctctctctctgtttctctctctctctctnnnnnnnnntctctctctctctctccctcctcacacacacacacacacaatgacaaagattggagctaacatacaaataatgaacatatcgtcgagcaatccacattaattaagagtcgtccccaataataaccctagtttttcttctttcgtgacaggacgaaactaattcctccacctcctgctgtgacaatcgacccccgaccccaaaatcgacgtctccaaccctaaaatagacattaccattcccaaaatcactaacctcaaccccaaaatctttactcctctaaagtttttctagcccgtggaactccaatttttttactggcgctagagatctagagtaaggtaacactatttgttatcccaatttttttaccacgtgatgtggcatgtccacataggcaagatttatgccacgtggagtatagcttgttagtaagaggaccaagtcaacatgaacaacgtacaagttgatgaagggtctaaattcttaagtaggagaaagagacaacaaactagccaactagggggtccgtctaggccacccctagtcggccctagtgcaacacaggccagccatcctctaacaaggggtaggccgaccagcttctcttttggtaggaacttttaatgcctctatagctttcaacctggacagacattttcagttacgaattagcttcaacaacccacaaaaataggggaggggttcaacttcagttatttgcttattctattctttaggactaattaataagttattttcttatttatttaatgtgtagcaaataggtgatatctcctcattttaagggatatcaacctactatcttatgtgtgctctctcctatagaaggagcactaggttatatcctaaatctcctaagttttgattcctaagatcttgagttcatgcactcaaaaccctagctcaccctctctcctacatgccacttatagtgtaatatggactaagtctccctcatctcattaccatatatatgtcttgcattttcaccattgtaatacatagagagccactctagaactcataacacttgtgattttagtggtattatctctcatatcaatacaactaaaaggggagnaggtcattacccgctaactaagggagatgaacctctataaaagtattgtgtcgatttatttacttattttaattgtttacacatggtgattctgatcataattaagactttgctgtctagtggccaaatttgaggtcaatatttttgtgctttcattgagagcgttgtttattgatatgatcaatcaccatgactgtaataaggagaattatggctacgacttgtgctacatgaggtcttcctcaagaccccatga

SEQ ID NO: 27950 - DNA, 1658 bp, Cannabis sativa
tattaatttataaaattactattttatccttatagttattttttaataatatttgttgagggcatttatgtaatttacaataattaaatatgaagagtttccatcctttttttactggagggattacaaattagagatttaagtggatttgctatccactcacctcacctttctctccttcactctctcttgcgaaacaaagagatttgttatctttggccccacctctatccattctttcctctccatccctctccacttctccctcttaccaaatatagtgtaaaagtcacatttagtcacaaaaaatatatgttgtgacgaagaggttgtcactgaaagtagttattttttagtgaataatttttaagatttttaaatcatttatttatttatatttatcataatttttttaattaaaattatgagttggaccaatatactttgatatgttacaatttcaaataaataaacaaatagttactaacaaatttacaaaaaaatgtaaatttatttttttcaaaataatcagtcttcttatttgttgtccgcactttagagaaggtcacgtattactacctttgtcctaagagaatggttaagaatctactaattaagtatagttggtaataattatcttgaatgagaagctacttacgttctcctaccacgacttgcaggcagcgaatggggacactgccctcgaggcccgatccgaataactattcaagtctcgcaaaaatttcgctgtttcggtaagagttcaaatttcactattagtggcagagccacaaggaatcatgtgggggtacatgatccagctcaagttttaaaagattacatttttatatagaaattttaaaataattttaattttgccggcataaaatttaatttttagtaattttatcctataaaatgtatttttttaatttatatttttaatgtttttatgtttattcccataaaattatatatattttttctttttacctccataaaattttaaaaaaaattctccaacaaaatttatatttttcattaatatcctacttatataaaaaaaatttggctgccctaaactatatcgctggctccgccagtgcctattacaacccctcataggaagaattatatgtttgaccttttgagagattagcttgttgtgacagtgtcatttttaatgggatgataaccctcgagatgcatactgatgacctaattatgggagatgaggtataaaactcttataattggtacgtggttctcaaaattatttaagctactaaaaaattagggaagaaatttgcaccgggtcatattttcttaaataaaaaaaaaaaacacatgaaaatttccctcccacacacataaactagaccgtccatgctgagctcatgctttgttcagtgataagagttatagttttttttctctcttttttttaaaaaaactcaaattatatagtatctatcttgaaaaattcttaactttgaaatctccacataattagtctgcatggatactattttgaatatacactaccttttagattacgtgtttactttcctccatgacataacacaattcaatcatatacccaccattaagggagaaaattcatatatataacacaaatcaaacccgtgattggtcta

SEQ ID NO: 27951 - DNA, 2501 bp, Cannabis sativa
acatcttgaaatttagaaattgagagcaagtacatacatggtctctattttcttataatttattttaaataaaatttgcaacttattcattaaaccaaatcatatccatcaaaatatagaaaacattcttttattcaacttctttatcaagctctttagtattttttaggcaatattaccttacccttctttgtttggattgctcctcaccaaatcaatataagatttaccgcgaagttcgagtgcgaaaaattttctaaagtaatcctcaacacgaattgttttgaactgtgctggtgtctttggtgttacaaggcttggtgccggacctatgtcaccatacaagctcggaccataaaatgtgcctatggaaagtctctccttttctgcattaactgttgcacgatgctcaatactacgataaactccatttgtcataatctacacatccatacaaaatataatatgtatataagtaggaaattttatttatttgacctaattagaaagagaaatattaaaacgcaccagtgatatttagtaccacttaaagtgttatattgctatggatagaattaagaattaggtcctacatgatttaatttattaattataattgaatatcgttagtcatttataaagcgttacctcaatatagtattagacactactggtatctaataataataataaattaaaaaattgttgcatattcactaaaatgttaagtcattgatacctctagcatgtctccaatgttgacaataaaagcattaggaaggggtttgatagggatccaaattccatctttcttgatttgaagaccttccgtttcattgatttggagaagaattgtaagacctatggagtccgaatgagcgttcaagccgatcacaagctcgggttgaggacacggcgggtagtagttcatcctcatagtttgccatccttctccaaacaattcactcatttcattaggcttcatccctagagcttttcccattaagtcaagcactttcttggctatattttctagctctattgagtaagcttcaatggtttccctatgcaaagtgtgtgatattttaataaattttaaaaaaactagaaagccaatttgagcaaccaatattaattcatatatataaatgttggataaccattgcaatttcaaaaaagttaaataatgtatccaaatttttttagataataaacataatcttatattattattatagtacataataattatatttacatatatttatttacttattcttcttttcttcttaataatgtcttgttcttatggaataaaaatagaaaatgaataatatttataattaattatagttatatttaaaaatatatattaattttttatctaaggtggattaaacctgcctttaaaatctttctaaacttggagctccaaaaaatatattttttttaataatttttttttaaaaaaatcacatatatttttttagtaatataacacatatagtcatgcatggtgggtctacactaaaattaatgtgattagttttccaactactacattatcttatcttatatgatttaacatattagattctagaaataattagttattattttatttatataacaaataattaatggtgaattagacaaactaataatttacaaaaaattactaactagtatttttttaaaaatacattatttaaacatgtgaaaatatatgtgagatttgatatttatttacgtaacagtatttaaattaaaattaaattagtgacaatttgtatttaagtccgaccttaggtatagacagattagtcctgtgtctagggcccatttaaccctgcccccctaaaaaacttttttttttttaaaaaaaattaacatattttttttactaattttaaaaaaatatcataatttttttctaaataagagcctaaaaatattttacatcctatgatccacaaaatttcagagaaagccgaccatacttgtatttaaatactacttttacaataagtaattttttattgtaagtagatttgatcgatatctttataatcatattaataaagtgcgatcgaaaatattaataattaggttataattattacctgaaaggaagaggcaatttgggtaacaaatgaggttttctaaggtgttttgggagtgtgacaagaaagaacatgtcagcccaatcaagtttttgatcatcagaaaccacaaaagcttgccctaatccttccaaatccccaatttgttgcctaaacttgtttttttcttctattcccatattgaaaaattcttcaaccatttttttcacattctccaccaacaaagggcttactccatgatccaccaactataaatatataaatatatatttttcataattataaaataattaatattattacacaaattattataatacatatttaatcaaaaaaataatgattataaatttaattataattagggtaaataccatt

SEQ ID NO: 27952 - DNA, 3322 bp, Cannabis sativa
aaaaaattactaaccaattattaaatttcacatcggtatggcattaaataccttgaggtgctaatagcaagtgcaaaaaattatttactaacaaaatagtaaaaaaaaaaattaaacgataaagacaagtcatttttgttgattttattataatgtttattatggatatgtctatggtagggtacattgattttgtttctatggtaggaatatttttacaaccatagataatgaatctaatggtgataaattaataagtgcatagcaatagttaatatttaggatatactagattattttttattttttaataatattttattattaaataatagtttggaagagtatgatttgacattaccaccaaatcaactttgtcattaggaaagaagggtccctgaaaactcataggcctctacccttcgttcttggatggtgttaaccatgtctgaaacctgaaaaaggtctgaagctctggttagcagtgagcttcgctctgatcgtcaactcccccagctgcgatagatcttccgaacctcccttttatcgcaaaccaacatgactttgacgttggctcgactcatcttgtctttcagaaagtacaaagaaatggaaattagagaggaagaaatggaaaaatatttgctgaataaacaagaaaaaagagatgataacaattaaaaaaattaattgggtgttaatttttttttaattaggtgtcatattttttttaaaaaaatgaaattttgataacctaaaaacaaatacatcttagacaatcttaacttttaaaagtcatataaatcgatggctaaaaaaaaggtgtataatataggaacaaaatcatagtcactacttgtaaatactgttagttaattcagctaacactgtttcttttaactgtttcttcttgactgtatctgttacattggttttgttttgtaacaaacttgagtctctcagcttgtatataaataagcctttaatcaataaagaaatacaattttggttttcaaagtattctcctactctgtttctctcccttttatttttcgtgcgttgtttttcttggatctcatactctgagatcttacatggtattagttgccttcgacaaacgtcatcaatggagtctacttcctccgatcctgctctggtcaccaaaactccagctccagttgcgcagaaccaattgcaatccaactagaatcccttctctcactctctaacctctattttgactgttaaactagatcgcactaattttctgtcatggaaatctcaggtgatccccactgtgatcggccatgaattggatgagatcttactggctggcatccctcctctgcaaaaacttgtctctggagaaccaaatcctaagtatcaccagtggaaacgaaaggaccagctacttctgtcatggcttcgatcgtcgatgacagaaggggttcttgcctctgttgccagtttttcctgctcccatgttgtttggcgcgtccttgaacagaagttctcgagccaatctaaagcatgactgcttcaactaaagaaccagttctctacaattcgcaagggaggacaatcaaattctgattatgttgacaagatacaggccatagctgactctcttgcagttgttgggtctccaattcttgatcaagatctcattttacaacttctaaatgacctcgaaccgaaatacgatcctgtagtgtctgggatcactgcaagaagggatgttcttacatttcgaagaagtgcaagctcttctccttgctcatgaaaattgcctcgaacaccatagttctgtcactgatcttgcactcaaacataacaaggatgggtctctaaataggtacaagtcaaggttggtagctaaggggtatttataagaagcaggtattgacttcgatgagactttcagtcccgtagtgaaacccactacaataaggatagtgttgtccttggctgtttctaacaactgggatgtatctcagttagatgtgagcaatgcattcctaaatggacctctaaatgaaacagtttatatgtctcaacctcctgggtttgcagatcctactcatccaactcatgtctgtaagttacagaaggctaatacggcttgaaacaagccccatgggcttggaatgataagttgaggcacactctcacttcttggggatttcaaagttctaaagttgattcttctctctttatatatggcaaaggcaacactcttgttatttttcttgtatatgtggagaacacattgataacaggcccacactcaacattaatctcgaaactaatctcagatctcaacaacaatttctcattgaaggaccttggtcatgtccattacttcctaggagtggaaatatacagagatagcactgggatgtatctttctcaaacaaaatacatcactaatttacttgtcaaatggcacatggagggtgcaaaggcctgtcctaatcctactagttcaagtgtcaaattatctctaaccgaaggggagccatttcatgacattactttgtatcgcagtacgcttggggcactgcaatacttatcacttacaagactggatgtcgcatatatagtaaataaactgagccagtttctacatgccccaacaacagtccactgggaagcctgcaagaagctactgaggtatttaaaaggcataataaaagaggggttatggttgcgacctgcatcttatgacacttcatgcatattcggatgcagactgggccagctgcataaacgatcgcagattaactggaggatatttggtttttttggtgacaacttaatcagctggtcggccaagaaacaacacgtagttgctcgctccagcactgaaagcgagttcagaactcttgctaatgcaattgctgaactcaagtgggttcgttcatcgttgcaggaacttcaagttttgattgtgcaaatccctgtcatctgggttgacaatcaaagtgcctcggcacttgctgcgaatccagtatttcatgcccggtccaagcacattgaaatagatcttcattttgtaagggaccagattttggataagcaagtctctgttcggtatgtcccttcattagatcaagttgcagatgtcttaacaaaaccactatctactgatcgatttctttacttaaaatccaaactaaaaatggtaaatacaccatttagtttgagggaggatgtaaatacagttagttaattcagttaacactgtttcttttaagtgttttttcttaactgtatctgttacattggttttgttttataacaaacttgagtctctcagctt

SEQ ID NO: 27953 - DNA, 2240 bp, Cannabis sativa
gttctatataaagacacacttattatactaaacccctttgatgaatgaagattcattccttttactcctccattttcctctgtttttgcaactaaaaaagtgtgttagatatatagaaaagtaatgatatgaacagagaacttatatgcaccaaaatacacatattcacatgaatattcacttatccatgcatattttggttaattaacataggaaatattacattttaaataattactcttacatattgagggtaattattttagtatatattttgtatgtatgcacatattatattactctataaatataaagtaatgtatactcgtctaactagtagcattaataaaaatttgtatattaaaataagttatgttgtttttgtattactttcaagtaatagttttaataacatggacaggagcaattaatcaaatgacaaagaatttggcatgtgaatgggcgaaggacaacattcgtgcaaacacagttgctccagggcttaccaaaacctcaatgttggagaattattcggtagggatttactgtcttccttttcttacataattttgaataatttgtggcataaatatttaagtttaattctctgttacaaataaatacctaagtttaattttttatggtaataatacataagttataattttaaaatttttgtaagtacctaattgttaactggtaaataaattgccacgtggcaattcctgattgttccaagttaataaatttttattttttaaaaaggttatttaaaatacactaataagaaaatgatacgtacataatgacttagcatttaatgataaggtacctacagagttctaaaaatataacttaagtattattctcgcgaaaaattaatctcattgtgatatttgttgtaatttggtgcagataatttacttcttttaaaatcgtaaatatgagctaattaaatattcaatttggtaatgaaaattatttttaagaaatgtgacaattagtttgtaatttaaagtttttaaaagtttgatttgtgattggatagtaataaggtttttaataaaaagaatgattttgaatacttaaaaccattttgccttcattttcttgtttaaaatacaactttagtggattcatataatgtataattttataaatatgtgttatcaaccagttaggggtaaaacttttcatgctcacacaaaagagtgacataatgaaaaagtgtatatatatatatctacttactctttaaagaaattgctttatattaatattgcatatcacttaaaggatattgtttttttataaatacaatatatatttgtggttccttatttataattatttttttttacttattttataactcatatttagttatcattaatgcaggaagatggtaatttagaaggagcactcggcgaatttattgatcgaactccaatcagacgacttgcggagcctaatgagatttcatctatggtggtttttctttgtctgcctgctgcttcatttgtcacaggtcaaataataagtattgatggtggatttactgtgaatgccttcccaagcccaacttagttaaacactacaagcaaatttaacatacacataactattggagatgttttatttgcaaacaagtcagtttgttagtgagaggggattaagttctgtgccacttggcaccttttttgtaatttgtatttctggattctctctttgactttttctcaatataaaatgttcactctctctattctcccttggtgttaaaatattcaggactactacgaaaataagcttttgtgacccccatgactaaagatttttagggacctttaagtgtgaattattaatgtggctgattgtaaaggtaatatttagtgattttttaaaatcttttactgtgtgtcattatagatttttagagtcttacatcagacccagggccgtttgtcatagtttttaaaaaagctaaaagctgcttttcagaaaaactgttacaaaaagtgtttggtaagtagttaagaaacagcttattaaaaaatttatggaaaaactacagttaaaagctaagctagtacaacccaacttttagaaaaagttgttttgattaaaggctaattatgatttagcatacatcaatgttcgaggggcataatttggttgatatcaaagtctggtgagcatgatttagtacataaacaatcattgaaacagtaaaattgaat

SEQ ID NO: 27954 - DNA, 9065 bp, Cannabis sativa
aaatacaacttatattttaaaatatagtgtaattactaaattgtgtaattaccaccctagtaattattctacctcattacacaattacttccaaacacagccaatgaaataaactaatagaaaggaaataacatgtcttgctcaatagcttgacaagcacaagagaaagaaaaccccaatatctgcataacactagataattggtcaatactcttctcttccttattttcagataaaatctctaatctaatttgtaatgttttagtgtatcctatgaatctaatctaatttgtataatagctaaaaaaaatcacagatacataatcagatttttgtcttggtgaaattaataatttacatacttatgacattaattaataattgttttgttaaaagaaaagtgccaaaatcgataatcagtggattccatctcagttaagaaccgcatacaaataaaggaacaataataacatatttaatgactaataataattgaggaacaatacagagaaagaaatataaacaaattattacaaatctcaattatttctttaaggcaaaaattaaactcaggaggttgttttggtcattttcattttttttaaaacttgcgagcaagacaaaatagaataaaaaagaatatagattttttttttttggttatttacatttttttattataattttttttaactaatctctaactctaattttatatattataatacttcgtaaatgtatctatctgtatttattacagctacaatattacttatgtaaatttttaaaaaattctatataatttacaataacaaaaataaaattgctaaataatattttaacgtgtattgaaaaaacttcatatttatattgggattggaccttggcacgataaattatttgaaaattttcaaaataatattgtaactataactaatggtgggatgaaattctttctaatatatgatttaatgattaatatatatattatgatgttaaaattttaattagatttttttttgtattattaaaactttaattgattgatttttaaaatttcattataatatttgataataatgatagtgtaaatcgctcaaaccacatcgcactataccgtatttttacagttttaaaatctcatagtgcgattgtagtttgaggaattacaaaaaccgtatatgcgatttgatttgaagaaaagctataacttgcactaaccacactgcgagtctacgaacactcccaattctaatatgatcagcattgctattagacaccagtagtgtttaatatttctagacatgtcgcgttgcgattagttagcgatatactccctaaaaattattatatttaactatatgagacccgatacttagttggattctaatatatattttgggacacaaaaattaatattttttgttttgaggtaaaatttagatttgagaagtgagagagggagagtggccgaattttggttgaaaaagaagaagagcgcgagttttccctcccttttcaaaacccctttcgtttcttccctctcttatttttccattcattcattcattcaatcacaaaattctcagtttcaaaatcctaaccttattcatggatcttcaacctcctaaccctaaccctaaccctatccctttcttttcctaccgatcccagccctcttctcctcaatcggaccaagccatgcctcatcaagatttacaacaacctaggtcttctttcgattctcaattggcagcaattgacgatctttctttggcttccgattcccctctccaaaccctactttcttctcctccacctcatcagccccaaccgatttctgttgtggatagcaagggttcgtgtttgaatggcggcgataacttatcttatgctaggtttgaagataaagaagatcacggagatggaaattccccggcttcgccttcttattgtgttgatccgaaccggcattggtcctcatttgacgacaattcattttatcttcataagccgaaaccctccatggtggtaagagcttttcttttttctctttattagttttttcattttgtactgaaaataaaattcttattcaattgtgttcatcttcttgttttgtgcagggtgcaggactggtcaatttgggtaacacgtgctttgttaatgcagttctgcaatgctttacgcatactgtgccactgataaaggggcttcgttcttgtaaacatgaattgctctgtagaagtaagatttgaattcaatgaattttatatttcttcgatttcttttatcaatttacatatcttatttggatactggattttatcaggtgggtatagagagttctgtgttgcttgttctatgtacgatcacattcaactttctatagattcttcgggaggctgtatatctccgtggaagtttgttgataatttgaactgtatcctttgttttaagtataagaactaatgacacactgttttttgccatttttttttctcataaatattgtctttgcattcgaaaagcaaagtatatctgctttcttggatttgaaaagaaaagtatatttgctttcttggatttgaaaagaaaagtatatttgctttcttggatatgcatgatcaaagaaattggagttcatatcttggtgaccttgacttataatcaattagacttctctgcttctttcatgagatataaccaggaagatgcccatgagtttttgcagtgcttcttagataaacttgagatgtgctttttgactcccaaaacaggggaaataagtttgaatcctcccgttgataaccttgtgcagaaggtttttggtggccgtcttataagtagagtatgttgcctccttcagttttttttttgattaagaatatattgtgaatttattcttttaatatataaatgtcaatttactcactgtttttcttatgatgactggttttcagcttcagtgctgcaactgtggtcactgttcaaacaattttgaacctctgattgatttgagtctggagatcgaaaatgtggatagccttcctagtgctctggagtcctttactagtgaagaaaagattggagattcagatagtaagttcacttgtgaacattgcaaggaagaggttgcagtggtgaaacagcttttgttagatcaggtcccatcagttgctgtgttccatttgaaaagatttaagaatgatgggtcttatgttgagaagattgataaacatgtgaatttccctttggagttggacttgcagtcctacaccactggtgcaagtagtgatgatgtgagtattcttactttatattggattatttgtgatgctagttatgatttgttagtgatttaacataattggtacatcacagcatcaattatactttacaaccacattttttttatcaaataatcttatcatttaattgttcatagataatgtacatcactaatttgctttgacaccgatgctattcatatgagacagtattgatgtttttcttatcacttttttgcaataggatgagttgatgtatgatctttatggaatcgttgtccatgttgggttatcatctatgtttggccattacttcagctttgttcggtctgctcctgacacttggcacaggttggatgactcaaaggtaatatttgcaggctatacaatcattttgtttacattacctttattatcatcatggagtagtttagcatttttgcagcaaaacaaataccgggatgatttgtaaaccatttatttacctgctcaatatatacatattttgaattacatgagctttcaattaactgattttgacatgctatgttgtctgatattttgatcatttacaatggcattggttattctacctgttttgctttcttagtttaactggttaaaatgtgattaggacttttgatatatttcttacgataatataatgtacatgcatgtaggttactagggtcgaagaagaatttgttctatctcaggatgcatacattcttttctacgcaaggcgtggtaccccctggttttcaagtttaatagatgcagaaatgaattgcttggacccggccattttatctacatcacctcagtcggttctagatgctgctgagaataattgtccacttccaaattcagcgtatatctatgatgcttcggttgcacttgatgctgttagtctcctcccaaatctatcttttgttgatgaaacttgcgttgctaagcctattggaaaaaatgattctcagggtgttgaatccagtgaagtaaaagttaatgaacctattagagaaaatgattgtgagggagctgggatcagtgaagttaaagctagtgatgtgaattgtaatgctacaactattagagaaaatggttgccaaggagttgaatctggtgaggtaaaaactagtggacatgaaattttccatcctcttacaccgccaagatcaccaagtccagaattgtttgctcttaagactccaggtaacaaaatacataaattgtgattttattcgcttgtgatgtgaattgtttttgaaggaaactaacttaatgaggtttgtggtgcgtttagtatctttaggatcaggttttcaaattccccgtggccatctgaaatctgaggagcgaactactttacgtaaaagattgtcaaacaaggtgcctgatgattcaaagactaaggaggcaataagattcatttcgaagagcatgcctagctcgagggccggcaaacttatggaagccatgtataggcctcaaagtgctgcaggtgcttcaaggaagaagaaacgattggattcaccgtgtaaaagggctggctcttctaatgttcgacataaatcaagccatggatcggtagtccatccggtggctgcagttctacgttgactgtttctgaggattttcttagagatgggttatatttttggccttaaatgttgtttaccaaagtgtgttttgttcatatagtaaggcttcgaatctttaaaatagaaactaagacggtttgtgttgtcttttattcaattgcaacgacgtacgtggttggtggtgtaacctagtttgtagaatccgacaaccattttatagaccaataatatttcacaagtgtaaagtactttgattgtggtatagtactgtactatctttgttttaaaatcattttttcttggatacaccaactaaaattggacgcttcaatgctggaaacttacagaagaaggttgtggtgtttatatatatattttaaaatttagaaaaaatctttagcacatctcctaaaagagtgtttcacccaattttccatttattttgaagggttttttggtttattttcttttgcataaatgttataagacacgcgtgcaatataatagtgtgactttatttttggactattcaagttttttttgaaattttagtaacaaaaaaaaaaaaattagaagactttcttagatgatgaaacagaaaaatggacatttgtaggtaggcgatatatgtttgtatatgcaattaaaaatcatacggaaagatatgaacaatgtatgctgtaatgatgctttttatatcctattgttggtggtacaatgcttcattttaatacagtattctagctaaggaatttgcaatacaattttgatctttgccaggcaattttgaaaacagaattatgtactaatatccaacaatactttattgagatactatgtaaaattgattctcaattgcaaaaatcaaaaggtgcggtgatcccttagcaattctctctaattaaataagatctagagataagtgttgaatcttttgaaagatatttgaattatagatattcataggtgggaatcctcataattgtcgaaaaacaatgcttcgtttgtgtaaatgtacttattagtacaagaaagtagccttgaattgatcgtttgaaattcttaaatttgcatttatctatttagacaaggctactacgaatgtataagaggcaagttaagtccatctagcaaattcccttttggcaaaatatttgatttttgtacaaatagtaggttggttaattaaaatgatggttttttctagattgggaggcaataagcagcagaggcagagtcacaaacatttgagaaaaccttttataataaggaacataagtacttctgatcttaggtttcatgatatggttgatccaaacggatcaaacccaagtaaaaatattgtgattgtgatggatggcttggctgaatttacaactgaggttcttcaatgggttcttcacaacatagtgatcaattgttctggatgtgtcatcactcttcttggagttatgccttggcttaatattccatgtaattagcatattatattaattatttattatttattatgataaccccatttataacctcacaaatgttttcatgtttgtttaatttgttagtgtctacaaagacatggttggatatttggtctgtggatttagaagaacttgccaaagagagaagtgaaaatatcaagaacgatttcaagtatctaaagttgaaggctgttctcgatctttgccgtagttatggggttagtatccgatattaaattatactaatagtaacacctagtgttttagcatttctcgtaataatatatatgcaggtggtgctgcaaaagaaagtcgtgatgggatatccatcgcgacatctggtcatcgagcaaatcataagccttgatgccacatgggtcgtatttgataggtataaaagttataataattgtgtgagattcgatacttaattatattatataacgaaataatgttataatttatttggttacacatataattatgatacaggcatcaaaagaagacagagttttatggggaaaaagttggatgcaagatgattgtgatgaacgaaaggggtgaggcagacatgattattgataacaaattagtagaaagtgctaccaattttacaagggctgctggagaattgtctactaatactgagctccacatttcaaaccaacaatgtgatgatgacaatgaaataattttacatgtttaatatatcaggactttttccaatgatctatatattattgtcttatttcatctattactcatgatctatttctccttttcttaataagttaatattgtctgttttcggcctcataattttatttttgggcacttttttaaaatgcctcgtactaatagagatattgtttatccttatatatattttacatttttagccaacatgaaaatttagttgcacactcaataactattgtaatttgtaatggcatcatcatgatgatatatcaaatattgcgtttttttttctaataatatttgctgccagctgttaggtaatggttgtttttttttaactgtgaaaatgtggttgtattttttaatcatgtaaaaattacaatgataatttttgactgaggcatatgcacatattcaaatgcaagattaattttttgtatcttgttcatacatctaagaagatttataaatagagctctatctatttcatttgcttatcccatcacaaccatcacaagctattccaagagtgaagatgaggctcttgagagaaagagaaaaaaatctcttagtgagaaaatctaagagagaaaaaaaagttcctacaaaattgtgagaaatattttgtagagagatagtgagattatcatattagtgagtgtgagtgttttgagtgtatttatcaagtatttgtcaaaacttaaaagtgtaatattgtgtactcattattatcgagtttggaatgatcaaaaaccccatagccacgacttcgtctaaaaaaacggcagattgttttcttagtacagtggcaaaaggcagaaaatggtcacagctcgagttttaaaaatctttttaaccccaaatcttttctaacaccttaaaaatgacaaaacaaaaatgctcaaacagaaaaataaaaaaatattgaaaattgacaatttacagtaagcttttcgaaaagggtaatttacgggcaaactccctatacttttaagtttgttgcgatttaaccctcatactgaaaaaattagggctaaactctccaaacttgacaatcgtttagatcagcactccttctgttaatttttggttgttaagtgctaaatagacctactactgtgtacacaagtatacacgtagcgaaattttattaggccacctaatattaataatttaaaatatttaaaaatttaaaaaaaaaatattttttttcttttttatttctttcctttttttcttttttctttctttcattttctctcaatccagccgtgaaaacaacaacctcgaatttatcatcatttgccctaaggtatttgagcagtttatcaactccaagtcgtttcaatacgcagaaatttagagtttctccttcgattctcaaccgtacgaagaaatcgaagcgttttggaggcggatctggcttggaatgaaccagagtctcgtctagatctaggaatatcgtttgcttcttctctagggagatcaaaggagggaggaggaggccgccgaatgaggttagtaatcgtcgaggattgggaattagggtttcaggggtctttttgaggatcttatatcctttattgttgtggcgacgatttgatggggttctgatttgggtgagttttgagaagagtttgatgaggcgacggtggcagttgaagaaggatttttaatggtggaaatgactgttgaggctgaagctgttgatgatgatggttttttgaccggggaagatttgcggcggtggcatactcgattgtctttgatggacttggtcggagtttttctcaaaaaattagggaaaatatgagggtttgtctttttttttttcctagggcatcgaagaagaagtagaaaaacaaaaagaaataggaaaaaaagaaaaaagagaaaagggaagaatgaaaaaagaaaaaaggaaaaaaaggaaagagaaaaaagaaagaaaaaagaaaaaaaaattaattttttctgatttcttaaatttt

SEQ ID NO: 27955 - DNA, 1584 bp, Cannabis sativa
ggtatttttgccatcaaaaataaaacattaggtatttaagtgtataaaataaaaaacattaagtatttatgccgcaatttaccctataaaatttgaccaaatataacatttacttatttttctaagttaaatttagaataaaatttacccttatttattaaagatgatgtaagagcatctccaatagaatattaaaagtgtaatgcatcttcattaaagtgaactctaataatggtgtataaagtagtccaacatattaaaaattgtgctaaatttgacacaaaatatatcatataccaaattttacaccataataaatataacaattttttttactctttcacctcttagagcactcacaatagcttctctaaattagagaagctttcaaaaatataagaaatcgtaccaaaaacacactatagtagaagctttaaactctttttttgctttaaagtttctttaaaatttacatttataaaatactattgattactctaaacatattatattaattattttaagttttattaattatttttgtatgagaatatatgtatatattaatattatatatttgaaatgaataaaatatgataatttttttaaaaaaaaattgagtttttgtgtattttaaaaaagttgatgtatagtataatatacaagtgtgctggaaaataaaaaatagatttttggtgataaattttaaaaatagtccagagaaactattgagagtgctgatactaatgtaattaatgtaattatcaatttttaaaattttattttttatatacttctgatatataatgtttttgttgattttttttacacttttttatcaaaaaatattaattttaccactaatgcattgaatcactataataaaatttgggccaaatatgatattaatcctttctttttagctaaatttagctcaaattatatgctatctattagagatggtataaattgtgtagaggtatttatttctttaattattttaaatgttaaaataatagttttatactgtaaaaaaaaattaattggcccctcctctgattcatccctagttttgccattgcgataaggtaccagaaatacaaaagatacaacatgtaagtacgaatagactagctcaaaaattatggtacgcgacaagtaaaactaaaacactaaatattataagtatataatttaaattattaaaaaatgtaaactaaaactatatatttatttatttataaagtaatgcaaatttaattatttataagttaatatttaaattctaatagtaattattttttatattactattaaaatattataaaatctataaattatacatatagtttaataattaatttattaattataaaaaaatatatatgaaaaggtaaagtacaaattcaagtttgatataaaaacaagttccctagaaaaatggatcagcagcaaagcacgacacccaaatatacaaaaccttttcttttaccatttgtttagaaaaatcctacaatttttttaggaatttttacacaaaatgactattttgaccaatttttaacatttatattatcctttcta

SEQ ID NO: 27956 - DNA, 2998 bp, Cannabis sativa
  modified_base (2766)..(2766): a, c, t, g, unknown or other
tctcttgggtcttcatcatcttcccaaatttccattctgttgatagtatcttcctccccaaccaaggcttttgaatttcttttccttgtatatattactggttgttttccattcttattaacctctactgcctccaatttttcattattatgcagaactgaatttcatgtttcttttctttgatcttcaaagtttgcccagaaattaattatagccactctgaattctgccctcttttttggccgaatcctccttagaattccttcgaaaaaatcatgtatcacttgttttggtgttttcttattgtacaccgccagctgtttctcccacctgtcaagtctatctatattttccagacttttattccatctaaatccatttacaacagagtccaccattttttgctttaagattgtaggaggtcccaccttttggcccaagataagattaaatgggcccttctggtaataccacagtccattaagctgaatagttgttgaacctattatctctctatttttagagatatatttactaagctcataagacttaagccccatttcctctatattttcagcaaaggcccgacccatcacaacccttccaaatttaattctatctattgaatcataagaaagacacgtgttcaaaaaattagaagggtttctaatcacacgtggctcacttagactattcaataaacggctaaaaacatgctgaagaggaatcgactctcttccactacttgaatttttatgaggacactcaatcggcatactcctatgcacacccataattaatcattaattccttctctgactgctgtaccgatgcctggtcgcccgtctcagtcatggacggaaaatctgcagattttggctgcccctcgttcgcctgggtcaccaccgccgactgtagcacaaaatctgacgacgagctctgatcgcctccctctctatttgtctcgtcgccgccaaccacctctgccacattctcggacgacacaattgtcgcttgaatcccctcagccaactcgcctccttctcctcctttaatcaaatccgcctctccctcattcgtcatcctctgttctttttcttttttatataactcagaatcttgatgccaaataatgttgaaaaagccactgaatctatatccccaatcgtttaatttgaataatttcagtgatatttccaagccttcgttatgaaacgagatgagtgctggtacgaaaccatgctcattcccttccaatttaagtctcaaatgatgcaggaaactcttttctgtagtatccttttcaatatctagcagccctccacacaacgctccaattctcctcatggttttcatgttccacagatgtaatggcagcctttcgatgcctatccatgagcttctacattcaactttcacatctttgttatgttcttccacagaccatctaatgaaagagacaatggtgacccatgttcccgatattaccatcttgtttaacttcaatagtaagtccacctcatcctcgttcttacaccaaattatagtacgatcatcatacatttggctaaccaccagctttctatctatttcccttgagagattgtagaatatggcactccatggagtctcgctattgtctctaaacatcatcaccgccctaatccattccttgtcactcttttcagcttttgaatactcgtagaaatttttctgctctagtcttttttttggaaacttgtttcttggtctgaagctctcgttcccttttggtagaaaatctcaatatcccagtttgttggttttcctcaacactggaggaagtctttcttttggaatattatcattcccacccctttatttagtgacatgctgcctcgaacttttgacgatattagcccatgattgtgagttcgccctgccttctcctatcttcactttatgttgctgtgttaatttgtcttcttggagattttctggcttccttttaagtacaccaaaaagacaatcatataggtcagaccatcctttagcttctgcttcttctggaataatcacctttctgattttattgtttttcaaggctgaaatcttcaagaaagctccattagagttagcaaagcattccataaaataacttccactattgtttctgaagaatcttttgaatgcatccctttactgtccaattttctttttcagttcctccagaattccaatcatccagtccgctgcatcgattattacccctatctcgtacccaaaaagtcttgttctttcacaaattctaaccgagcctccatcttttgacaaggtgctaataaatgccttgtgtttagtatgaaaactccaaaatttatggagtttctgaccacgatttggatcagagaaattttcccagccaacaccagtggggtgaaggcctttattcttcccaaaaccaatggtttatggtgttttccacgaccagaagggccatggaagcccccagtatgcatgcccacgtttcttagaaagaagagagagaagagagcataggggagtcaaagagagatcattgcttaaaattacactcaaactcaagaagctcaatctgctaccttgctaaaagtaaagttctttcttcaggtataataatcgttgtcattttgtttattttacgaactacgaactctgcctttctttacaagttgctccatgttctgctgaaattcttccattattccatataaccaagttgttgcatcaatgattatggtgatctcntagccgatcaatctagtactttcacatattgtgatcaatgatccatgctttgttaaggtgagcatgaacaccttatgttgggctcaacaactatcaatacctaaacgatttgtatatccaaaatcactgggtattaaggataggcttcttccactagcaagtatggccagcgaattcttagagaaccttctatgtccattcggacaatgaaagcccctacagtgcatacttt

SEQ ID NO: 27957 - DNA, 1794 bp, Cannabis sativa
tttaatgttacatactgaattattatgaactttgtcatttcgggttttccaaatcatgtcaaccacaatcgaggcatacggaaaaacttccgaaacctccactcctctatccttcaagccccataaaaatttgatccaatcccaaatacgagcccctgagtccaaaactgacatcacccctaggggatggaccgctagaagtgataagcaaagttgcaatagagaaaaaaatgttccattattttctcttcctcaccacacatggggcaagagacatcctcatccttttagatacttcatacgattgattaattactaattatttatgctaaatcaaatgtagtatgatccaacaacttgtacttgatatatatatatcaccataaataggacaaatttatgaaaattttctcccatataatatatgtattacgttcaatcctatatacttgataaccgtaatattaataatttgattattagaagcttaagcgtatcaaactaataaacctaaagtatattgtaattaaatttttcaatacataattttgtttttaacaaaaattgaacaaaaattcattctcatacgcaattaatacataattttaactttgaactcattaactattgtagctgcaatttcaaaattaagctatgtgaggtaagtttttttcttttttctttcaagtgggtggcttgctaaggagtaaggacatttcatgttagtgcaataatttggacacacattatcaaatagattaagcttgtgtcatggttaatgaaatttccttaaaccttttaagattttattttactacattgatttggctcttttattaattaatgatggaacatgtaaaagaaataaattaaataatgatgaagatcgattaattaggtgatcgtgactgatgaaaataatcacaattttaaatttcattttataaataacaaaaaaaaaattaattagaatctagagaaagattggcgtgggctgaaaattttgcgtagctcatttcttaaaatttttccagaagaattcttgggtatggaatccacaaatgctacgcgccttatctttttgtatggtgccacctgcgcatgcatatataatacatctttaagccaattaatacaatttattaaaccttaataaaacacatattaatatgatatatagggtgcttttataaataagtgtactaataatatactagtttttttttatatataattctattttttatatataataatatattttgtagttattatttaaaatattctataaatattataaaataaataattagaattcaaacactttatttcatacaaaaaaatatgtgcaataaaataaagtgtttgaatctaatttttgtaaaatattatatttctcaaaaatttataaattatcctaaataactaaattatttatatatataattaagattatacttattcacgtattaaaaacactataagctaggtgcatggatatatatatttttttagagatgtggtataaaatattcttgtacctttttggccacaaagttcattacttctgattccttaaggatgcttttaagttttcttaccacaactgccattggtacctgaccagcttcttcatctggatatctgtaaaatgtgtcttaattttagaatgcatatataattatcttgtaatattattagaaattaattatatttaagtaactttttacaatttgttaggatcgatgtactttttagtaacttaatttatttaagttagaaaatatattagtc

SEQ ID NO: 27958 - DNA, 1449 bp, Cannabis sativa
taattaaacttacttcaagcttgcttaaaataattatcgtctttttttttaaaaaagaaatagagaaattccattaaaaacattaagtttaaaaaatttcgagattcaaaaaataagtaaatttagacagtcaaatccataggtaaacccgaccactaaacacaggtctcgtctaaatttagagctcgttttgctaaagaatgaacaatatggttcttagactaattataatgagtcagggatatgctattaaaagattttcaaacatgattagtatcattaaagacaataccaaactcattgagacaagcgctactattgacagcaagaactacctgctgacaattagagaaagtagtaactgatgtataccccatctgcaggcaacaagaaagcccatgaagcaaagctttggcttcagcaacgtgaggctccaaagattccacgcatggagctgcactcgaaaaaaagacatgcccaatgtgattgtaaaccaaggcctccatccctattgtaacgaatcccaacatccacaaaaaggttgaactcgccaagaaccatatcaatcttagaataagactttctattgctcacattgttagacgacagaggacagacccatagaagctggcccaccagtattagcatcttgatactttcaagatagttcatggcccaagcactaaccatattgtcggagaggagcttatgatcatgtacaaaaatatttcgcctattctaaatacgctagttaagagtaatgaattgttcaagttcttgtctactattcacacaactcagtaacaattcataataacaattgttaactaaatttgaaaaatttggacttaattaataataaaaaaaaaagccacaatatatatcacgtacaaactaatttattattgagatatgagatattgttttaattaatgttttttttttttgacaacttttcaaaattaacaccaaattattcaaattgcacataaaaccgtcaactcaatgcattgatgaaataatatgaaaagagtattattattaggcatagtagtgcctagtattttttataggtatcaccttaattatgactagttagttatattctctaaaatttattttttttaagttatataggacttgttacttaattataccaatagcagtatagaatgctagactccaataatatctcttagcgagaactgctaaaggacactacttgtacctagtaccctcttacgtgctaatatcgctattagtgtaattagagcttcatatagcataatataataatttttataaagtatcgctaaccaatcacaaaataatatgtttaaaaagtgttaagcaccactaatacttaataacaatgctcaattttcacgtgaaaatattgctggtcttgaagtaaagttgaataggttttgtcattctcactcaactggt

SEQ ID NO: 27959 - DNA, 3861 bp, Cannabis sativa
  modified_base (3625)..(3627): a, c, t, g, unknown or other
  modified_base (3724)..(3724): a, c, t, g, unknown or other
agagagagagagagaagggaagagctaagatgatattagggtttcttaatttagggctataattatttatactcttttttgttcttttttttttattctaaaaccttttttattttcttttattaaataaaaatttctttttctatttgcgatttttgtttcctaaaaatttcttgtataactaaaatttaaataattctctaataatatttaagatctcaaataaatgtccaataatattttagtccttcaataattttttccctccacaataaatttttaaatacaactaattgtatttataaaattaacctctaatagattcataaataatacctttaaattattctttaattaaaaatataaaatttatagaatatacatatttccaaatataaaaaatttctccctaaatgacttttatttgttagaaattgataattaaatttgtatttgataaataaagctaattaataatttatttattcccgtaatatatttgaaaatgtatttgttttcatcatttgaacccttatccaaagcactttcataatttataacaattttttaatttaaataattatttacaaattaattcctataaatgcctatttaaaaaaagtacatataactttcgattcataaattacacttaacataaccgacaccaaaataagtcttaagtgtcaattcaaaactgacacttaagattcttttagtgtcgattataaaatttcgattatgaaccaacgtttatacccaatctttataaatattattttttttttaatttttttggtgtcagtttactaaccgacaccttcaagaaattataagtgtttgtttagaatcaagacttaagatttagagtagttttaagtatcaattttttttatatttagtgacattttaaaatgacatcaaaagttcattttgtagtagtgagaaatcttgtgaaagaacacaacaaaagagaacaaatcaacaactgtgtcttgagctgaggcagagtttggcatcagagtcgttgaaaaagagttcgccatgattggagacaaaaagaagagaatcgaacaagaaaactaaaatttcatatttaatattactaatttattttttaatcaatcaattaattaattgtgaactaataaatataatactgaaatagttattctgtaactgcagaacaaaattctgtaactacagaataaaaccaaaatacaaatagtgtagaaaaaagaaaatacataaggtttttgtatgtggtatcaacaatccttttagattgttactagtccacggggtcacgcctagagataatattcattagatagatatcaaaaatacgaagtaattgacttatgcataaatagactccatcttattgtatatcgcaagcttgatgtattttactttctggtcgaatcttgctaaaacttcaaagtgtttgaactccctttgacctccttgaagagtgcttacttctttctgaggtagtacttgaaaagttatctcttgaaagcttgtagaaccttctcctgaaagtggcactgttgttcttcttcttttgtagatcattatagactcaagacaatacaaaatacataaacatagaaaaagagacaaagacactctttcttacaagatatgaatgaaatacaaagatgtgaaagagataccaaacttagttgctataaagtgtatttataatcaatatatatcttattaacaactcatacacggtctgaacaagaccacaattcactatacatttccctaaaatagatcttcaatcagtctaggaatttttaactctgtacctacagactcgtgaattgtaagagcgattttctttttatagaaaaaagaaagtcttaatttgtttttcttaacaagaaatatgatcaaactaattaggaaactcatatgggatcataataacacatatgaaaagatagaaattgatttattcattaaacttaccatttttgacaaatattccaagtatagaaaagaaaagataatcattcttcacaccttatataaattaatcaattaaaaacaaatatataaaaataaaaaatacaatttagctgaaattaaaatttaattttataaaatattcttatcaatttattaatgctaaatttagaattaacaaaaactatagaaaaaatttgaaaacctactatgatatttctatcttgattaactgcaaagaaaatgctcttatacttaattaattacagacttaaaatatcttattaaaacaaaaagataataacttaattaattacagattatacataaagataacttaatccaactaagttataacaaaagttgttaaaattggctatatataaagatcactactacaaaaggaagaattcgcgacggttctaaaaacgatttttttaggaaacgttactaaaaaaattaagtaattgtctaaaaatgtcggaaaaaattagtattcacgacgatttataatagtgcctaaaaaattagacgatgtttttcattaaaaacacaaaaaaagaagagggattatacccgacggttttaaatcgtcagatataagggatcattaaaaaatcggcacctacttctcgccacatttctaacgtgtccacctattttttttctatttctcacatgcccacctatttcttttctatttcccacaccctaaaataaaaatcttaactctccaaaatcccacccacggctctgcaccatcgccctcctctctcgccgtcttcctccctctatgaatctccctttcttgtcgtctcactcgttcatcgatctccacccacccctcaaactgtcggtctccctctcctctccatcgcatacgtcggaccaccaccacctctcatcgttgtccctctcatctccgtctcatacgtcagaccaccaccacctcctgtccgtcttcctctctctctttctctttctccgagctcggtataaatacaattatttatgtatatattttttttatttattatatatatttattttgttattgtataaatttaatgtgtttttaagttagttgttattgtaataaaattaattagttgttttattttaatttaagtaaaattataaaactaatgcaggaaaaaaaatgggagaatgacagaaaaatctctattttttttacattcccgacagtttaaaatcgtcgcctataccctgttataggcaacgattttaaaccgtcgggaagtccacattagcgatggtttttaactgtcgcatattttacccattttgcaacagtcgtataggtgacgattatagaaattgacaagaatactttaaacgactgtttaaaaacgtcgggaaaaactatttttgtagtagtggaaaataacttaattaattacagacttaaaatatcttattatcaatacaaaaaattactacttttagtgataaatttttggtaacaacataatttttttgtggctaaatgtgacttttagctacaataaaatattacctgtgactaaaatatattatttagttacaagatgtcactaatttagttttagttataataagtattgtgactaaaaatatatttagtcacaataaattgtaatttttnnnactaatacttttagccacggatcttttagtcacaacttaagaattgtgatttataattagtcatattttttaacttttagtcacaaattttgttgtnactaaaagtaaaaaaatttgtaattaaaatataagaattttttttgtaagcatctgtaggtggctttttaagtccgccgtcaaattccagggctcaaccttagacagacggtcaaaactaccaagctggagtacggt

SEQ ID NO: 27960 - DNA, 3948 bp, Cannabis sativa
aaaaatacatgttaacataaatcatttcaaatctctcaaattgataactaatcagattgtaatgggttttatttaagacacaaaacccaacagacacttccagcaatatgtaagggggcaggacaatgtccaagaccagcccaatctacccagtaacccaagcgaccagggaccataaccttcctttgtaggaggaaagaatacttcgtttatctctagaggagaacatgttgcaagaaaagtgggacaaggggcattaagtctggtcaagcaattacgtaaaagtattgcaaagtattcaaataccggctcgcaatggctgccatatagagttgcaacacagaaaagtcggtcgtcaaccagtggcagttaggacaaactactgaaaccgggatcaattcacctggaacctagggaatggcaaggattgatcctggatatcgaaataattgtgggaatatgttagggattgaccttgagcatcaaaacccattctatcaaaaccagatgcttctgaaagattgataaaataaacaattaaactgggaaagttcttatgagattaaatcgatggaaaactaatgattttataccgcattgctgaggtaatattttgaacttcagttgtgaataaagtaatcatctctttcgacaagtaattataaaacatgaccccttaaaattatttaaggggcatatatgtatgattaaccagaatttatctagaaatacatgatataatacaaacccaccactttaaaaataattttttttgaattttataaaggtttttgaccaaacctttttggcaaaaaaggggtcaaactgttataacttcctgactaaacctttttgacgagaaaggggtcgaatcgttataacttcctcatcaaatctttctgatgagaaagggatcaaacaactataatttttgattaaaaacctatctgacgggaaagggaaatcaaaagttataaatgagatataactcataactcgcgtgaagctgaatactaaaagctcgcagtaaaggaaagtattaaacgagacatcaaggtgtcttgggaaaagtacttaaacctaacacatggataaagaattcaactatccgtgtaagcaactaaaatatatatacaaatttcaaggtcattgaaactatattcaagtatgcttgaaacagatcataactgactagtgcgaggcagaatcaatgactgctcgcgaattgagaacatggctgatgacgaacaactcgtgtgtaaattaggccattaactactcaacgcaaaagagatatgtgagcgatggaaacccctaaaatttgtgtgatcaaaatatgattgtttaatttgtgaatgaaacacaagcatacgactccatattgaagttcaaacataaaagtacgaggcatcaaaagataaaataaaaagtaaagttggccatccaacttcgcaaatttgtctttaaaatggtaccgcaaggggcaaaccattgtctcggtcctaaggccattaccttacaaaaaaaaacgatgatgaagaaagagatatataaaaaccaagcctacatagtaggagacttggatgtatcttcttctaccattgcttcggcctcttcctcctccatcccgaccttcttgcaataagccaaaacttccttctcgtcttcctccaagaagcttgtgaccatgttaggatttgccatcaaggctcgataaacggtacgaaggccgacgttgttgcatcgctttacggtttcgacctctttcccttcgagttccacctcattccctttaagttcgacctctttctctgcgagtgccttcttaagttcgttgcactcgtcaatcttggtctttgtggccttctcgcctttttcaagacttttcttcaacttctcagcttcctgtttgagacggatattctcctgctgagtgtcgttccattggtgagtcaagacctcgcgttgagctagtgattttcagacctcaccctctaggtatttgagccgcttcaggatttatgatgggaggtaaaagaaaggaaagaagcctggagaattacaagcaaatgaatataaaaaagagggaaaggaaaaataatacaacaaacttaccatgagggtatggtgcaagttcctcgaaagcgtatcttctggattcccgagattaattagatcccaaacaactaggcaaattcagaaccagccttccctgctgtggccaacaaagcttcaatggcctagctcgaggaggcagaggcatgagttatttcaggaggaggtgctttggtgttgggatcaaccggaggaggagcccattcatgggtctcagattcagagatctcgaggttgatgggctcggacactatcttctttttgtaggtagtggttttctttggccttttataaggcaccacctcgtcctctgcaggggcccctgagtcagctacccttttcttccctttccgatccatgacatcctcgaaacgcatgtctgcaaggcaaaaggaattgttacaattattgaaaggcaaatgaaaaggaaaagaggagtacgattttccacctaaggaatttaccaaagccattagaaggcaagctatcactaaaagaaggggtagaaagaccgtagtatccactaaaatccatacaacctgtagtcttgaatatatcaaagggttcgattggttctaaatcccagctcacatctatatggcttgccctatctgttatggtaccatattgctcggctataccataatatgacttgttacagtaatgtggacgtggaatctagggtaccagctatcaaatctatgagcaatacaatctatgagaagggaattccaaatataaaaattaaggcggctatctttgaaggtaactaatgtgttacgatcagccctaaatattgtgggtgaccaaccgcgttgattatctcgggatgctccttcaccggcttcccaagggtatgtgttttgaaggtatagtgctcaagccatgcgatctcaggctttatcctccttcagaatgggaacctgttgccaagaagaatacttgggaaatttataattacaagtgtactccttgtcaataagaaggcgcacggatctcagattggcctcgtttagaagaaagtcacacgacctaaggccatgaggaagggtcagcaggagcttgtaccggttgaccatcccgggagtagggacgggtcttttgagagggctataaaaaagaaaaaccttggtcacaaaacatagaatggaaagacatggaacaatataaccgagcctaaagaaaacaatcacttacgtatttttcggaaggaggttgtgccgattggggagaggccagttgtccaaaagaagtcgtctttgaaagatactttgtttagcaagtctataataattttaaactcgctagagtgagtactgagataaataaaagccccctgcgacatttttcgtcgctggaacagccttaacagagtagagatctactggtgtagggcactcccatttcataattttatacaagaccttcaaactagcaagaatttcgtaagagataggattcagttggaatggggcaaccccaaggtggtatatataattcttgaagtagtcacgaagagggagtatggcccctacactaatgtgttcgagactctaggcacctatgccagtcgagccactgatactggtctcaccactggctccctcaagggtctcgcctgtaagacgcgcaggggtaacaactaaactcaccctctcgcactgacctaacttggcatagtcacccaagttcgattccatatgtcttcagtatatcacctatgtagcctgagatagttcgcaccttcgattctattaactcgttgtcaaaggtgacgctaggatcctggggattctttgatgtacgtggcttgggagacattatttcaaagtc

SEQ ID NO: 27961 - DNA, 1629 bp, Cannabis sativa
  modified_base (1344)..(1375): a, c, t, g, unknown or other
aagctgttgaattggtctgacccgtttttctcaagccggaccgcttcatcgtcgacccagaacaagcgcagcaaaccgacccagagaggtagagagagaaaagccgggtcaaatggaaaatttatgtaaatatccctattatttttattatttaaagttaaataaaaataaaaaagaaaggcaaaacatgtcttttctaactatgtaatcaccattacattggttttataatataatagggattacaatatatgatttaatgatcattacattgtaaagtcattacaaagctttaaaagttaaaacaaacaatataatagtaataatgattccattacaatcctcattctatcaaaccaaacatgctcttagtttattgaattttcaaagttatttgagagtgaatgctaaatcaaatagacttattgctattcaaattatttgtagttcttttataatactttttggttttggtttagtgattaagattataaaggtttattgtaatctttaaataatgttgctttatgttttgtcaaacaatctattaattgagttgtgcatttttttgcgagacagtctcaagtttatgttggtgattatatgtttaggaaaggggtgtctcttctaaactttatgctatcatttttcgtgattacttctagtttaataaaaataaatttcattttaaaaaaaaaacattcaacattagttcacatgtagtcacaagctttatgcctagtgtctattcttttactcaaaattaaaaacacttacatcatatgctttataatatagttttttttaagaaatattagcggcaaaactacacgaattttatgattcttgacactttaccacacaaatttattttttgatggcaaaacttgctaaactcacattcttattttgctctttacacttctgttcaaaaccctcaattgaatgccacgattgactacctacatgtacaagaatacacgtaaaaaaattgtggttgtctacataattttaattttaaatataaaaaaaaattataaaaattatacaaataacaaaaattattaagagtacataacttaaaaatatatgaaaagattatattttttgtaaataaaattataacaattataaaattgtttaaaattctgtacaattgtattattgtaattttttaggatattagcggctaaaccagctgaactttacgttttgtaacacttaactacaaaaaattttggtggcaaaacctactgaatttctattcagttttgctctatacccccgtctaaaaatcacagttaggtgccacagtggactgtccacgtaatattaattttaaannnnnnnnnnnnnnnnnnnnnnnnnnnnnnnnaatcagaaaaaaaaaattaaaatattttttttttactttttttctaaaaattataaaaaaaaatcttttattttttattttctttttattttattttttttccttttctttttttttccttcttcttcttaactgaaccaaataaaaaaaccctagttgctcatctcttccatcagttgcctccccccttcttctcgcagaccctttcctctcttctctctcgctctcagaccctctcctctctctctctctct

SEQ ID NO: 27962 - DNA, 1110 bp, Cannabis sativa
aactcatattcaaacctagtacttagatttgttacatttaaccggttacattttttttttcagttttagagctgttaaacttgttactgagatgagatctttcaagttgtaatccaaattcaacccaaacacatctgttttaattcttaattcatttgttgaattatatagattattgactaatttatattgttattcaccttttgaaagtcaataaaacatggggcataattggagtaacaatgatttactacactttattattaaaaaatgatcaatagtaggaaaatagtatgttaattaaagtaaagtatatcgttttcgtaattgtacttttggctctaatttttaatatcaatgacaacatgctacgtagaacacatcccaaataagattaatcccagtagctgattattcatttcgggaccaagtaattctgttatgtatatagtaaattaacaattgaagattttggtattatatttatttatatatattcaagaataattttgaagcaacaaaatatattataggtgatttgtttttttttttatatatatatattatatacgctactgttaattattgttcacgcacgcacgcacttaattgggagttgggaccaattgaatatgttattctgtgaacaaagtttggtcttttgaattttgatgatttttaagcaataattttctagatctccttttattaagtggtaattagggcataataccttttgagttgtaaagctccattaaaaagatatatgtatatatgtctatatttatacatatatggagtattgcaagttgaagctactcaaagttgttataagcattcttaatacaatgtgttgagatcacagattgaaaaagcctatcaacaaaagagctaattaaataattaggtttactaaaaaaagaaaaaaaagataaagctagataaagccccatataagttttggatattggttttattttaatactaattaagtaaataataaacatttttctcccaaagttggtaatggtatcatagatattagataatagagagagaaagagagaaaatgctgtctataagatatgcaaggaccacagtgattgtagc

SEQ ID NO: 27963 - DNA, 2504 bp, Cannabis sativa
aaatataaatataagcatggtttattctcttaattacggaacatataaaattaattagacaagacaaagactttttactcaaattgaaaagatcacaccaagtcacgactagctagcgtgcatgcatgcatgtgcctatataaaattacaaattgaacaattcatcgttattatcttcatgagggtaattaatttaattatctatataaaatactctatatatagcataattataactttgaatcattatttgtataccctcttatttgtcacaccttaacaaattcatataaaactcttacatcacaaattgaatgaaaaacaattgaagaaattattggttgactttcctacaattgacacggacttgaccttgagatccagtcaaaggcttaatatttcccatcttaatcatagacctagcgaaatccgaggtgaaagcttcgccattgcggctgtaatgactgaccaattcatccgtggaaccgcctttaaagagttcttgatcggagtggagaactcctttgtaggaagtcaattgggagaaatacttattgtcaaactcggacggtgaagggtccaagggagagagatttgagtcacctccggtgttagggcatgcttttttgagcatttctgcgaaagctgggtcaatgttggcctcgttgtacaagcgagccctgaaggttacacactgagcaaaccctagagtgtgggccccggagaggaggacgaggtccctctcgtcgaggccttggtttttgaagtttgttatgagtgccggaaggtctaggaatggcggtgggatatcgttgttcgctaggtctttgttggctgtggttgagtcttttcttcctagtggcacctcccatgaggggcctgctagctgtttaaataattagacaaattatatattaatttttattttaaacacacttgagtatatattttgatcattttgagaataaatgagaaaattaataggttttatatatataaatatatataagatatgcgtgtgtcacatattatagctagcttataagcataaataaagattaatatattcaatttaaaaagactttttcatgaagaataataaaaaaataaaataaaatggaaagtttgttttatataattctacattgatttaatttgattattatatcgatcatcatatgacaaataagagtaataatatggtgaaaatgaacttttaaaatttatttgtcttgacattagcattttataaaagatgattttttttttaccgaaaattgatgtgtacataaattattattgtaatttttttcgagatatatgtattacaattttcacaatggtctgataaattcaaaacaagaaccaagtattatagtcatactttgattgatcattaatcatttaagaaaaaaaaaagcatatattcataatatatcttaattaagtagtcattttataaattaatatatatatatatactcaccgcagctacagaatcacgagcagcaacagccaaaatatcagcacaagaaacaactgggccaccacaaacacgatcgacctcagccttgatgtcatcaatgacctcgaatcccctaatggagttcacattaggatttgctagcttctcactatcaatcgtgtcagtcgaatcaagaagtatcgatccatcacaaccctacatatcatgacacaagttataaaattagataatatataataagtacaagtatattcagaatcaaacccgtttttattcagagccgaccctttatatagttagcatatatcgttcaagtgacatacttggacgaaacaatcatgaaagtgaagacgtaatagggaagctcccatacgacgttccttcataacggcagcctcaacaactttcttgatagctggtaaggcagctggacatgaataatcatagaagtttgtagagagttgagctgaggaacttgttgtttcataagccaaaattattgtgagtactaatcccaccacatacaaaattattcctctctttgaacccatttttcttaataattaattaatttaagtaagatctttatttgtataaggaactgcttatagtttttagtgatgatatgatcctaaaacattatgtttagcatatttatagtatagatggtgagactaattaagagattggagagaattaattaatatgtaaattaatttgtcactcttttggacttggacaaacttttaatactatagtactatatatattgatcaaggcaaatgtatagaaattcctggatatatatattaattaattaattaagtaagctaattcaaattgcaagaaatctttaattaagaagaagtcaatcaagttaaactaattgattattaaattgtttgtcagaagcaaatgtattaattaattatctatcaccataatgttttataatttttcatatttatttcacaccatcaccaccaaagtaatcgctataatatatcaattaatttat

SEQ ID NO: 27964 - DNA, 4113 bp, Cannabis sativa
  modified_base (174)..(177): a, c, t, g, unknown or other
  modified_base (366)..(374): a, c, t, g, unknown or other
aaaactagaaaaatagaaaacatcgaaatgttgtttttaattttcaaaaataattttttttgtctaacatattatattttatatttttgctcgcatactcggatcttagacccggaaccatacccgaacttgaacccggatgggttcatgtcatggtatagtgttaaaatattnnnntttttagtaagaaaaaatctaaaagtagttttaaaaaatttgtgccaaacaccattaaatttttaaaatgacaaaaaattgttttctattctcacttttaaaaacacaattttaataactgaaaacacacccaaacaagctcttgatttccctgggtttttgcttcagccaagagagagagagagagannnnnnnnnagagagagagagagagtttcaaaagatggattttcatattttgtcttttcttcctatttcattaattaatgaaataaatcttaagtttatttaccaaaaaccatctaaattgaacattctaataaaatccactaaaagaaaaactcactaaaatggaaaaattccttgcttcatacttaagcaactaaaggcttagggtaaaatgatcaaataccaccaccccgcttaaacctgacattcaaatatctcttgtatttatcccactaataaataggctgtaaacttacccatgttactctaatggccatctatcgcattttctattgtcaccgagaaaaaatcataaacattgcatatttcacatttagcataaataatactctaatagtttaataaaatctccagaattgagaaattataaccctaattcctatttcgaaaaatgggacccacaataattataaaattatgtattattataagacgccaataatcaatgctaattgccttaactaatacataatctaacatgcgctcattatacactaacgtagagctcattctaaagtccataacccgaagaaggtgacgaaattcagactgatctccctttgcaatttaacttataaggttatatccaagatcattgccaataggattaagtagtcattccttccacggatcatcatctgccctacccaagcggcgtttgtgccaggaaaaaacattcaagataacaacgtccttgttcacaagattatccactcctttaaaatgacaaagggtaaagaaggttggtttgctatcaaaattgatcttgtcaaagtgtcagataaacttagttggcagttcctagaccaggtgatcggtaattttggaacccttgcttaatttcgtaactgggtgtcccaatgtatctccacaacgtctcttaacatttgccttaatgggggccaagtggggaggattttgccttcttgtggcatccgtcagggataccctctatctccttacaagtttatctgggctacggagattctttcgagacttcttgagaacttcattagccagaaggagattaaagggattactcttaaccgaggaggacagccttatcccacatgttctttgcggatgacctttttttttatgaattagctattgtttcattactccaataaactaatttacaacctaagagcaccccaagtaatgggacctcaaatatattcttttactatatgttacacagtactcccaaaagtgaaaaaattacaaagacccaaaccatttagaatcttttaccaactttcctaggccatacattatgaattctttgttttaccatttcttttattgtacaaatcactctatccatatcttcagtctttgaattccataacttgtcattcctagtattccaaacatggtagactaaactagccaaggtagcagaaagtacttgttttttgaatttgctacatttgtttctttcaatgaaatggtaggaatggcttatatcgaggaagctaaggggtactggcagtgtttagacagattctatgcttaatttggtcaacaagttaacaaactcaaaacatccatcttctttagcaataataccagcgaaccaaaaagtagcgaacctcttgatgaaaaatagggactgatatatttagaaattgaccctcctatttgatcaggagactgttgtaaacattcatggaaagggtaaaccagatggaaggggcaaggattactgggtttgaactagagaagctatgggccaattcttttctaaatctgcttacttgatccaagccttgggtagaggtcctcagtgtgatgtggctccttctctgtggagcaggttatggaatagtaaaattttggagcgccacaagatcatgtggtggatcattctgtctaatgtgcttcctattcgtaagatttttgggcaacatatgacaattgaagacacttcttgtcctatttacggaggaaacgaggactatggaccatttattactggattgcaatttagcgtgcaaaatttggcgttcgtccccttggggccttattcccatcaatgactctagtacaagaatgtgggattgggtaagtttttatggaaccttaactcaagaggagctaatgttaatgagatctttgtctatgcatccatcattgttgatacaatctggagggcatgaaaaacgacaatatacacaataataatgtacttagcatattgtactatattgactctaataaacattgttatgcagattatgcctcaattgttctccctctgaaagtcgtgcatgctgtgtttgggtgggatctccctcccattgagtggattaagatcaactgtgatgcaagaagagagagggagaccatatgtgtatgttaggagtggcttatgaccatttgggtgcttttgtgtgggtagttgtcaacaattttcctttctctgctcccctcattactgaagcagttgcctgtcttcttgctgttgagacatcagtagctttggagagtgaatctgaagttgtcatcaatgcgattagagggctttcacctcgatcgaagattgatagttatattagtaattgtagatctactgctaaatttttatcgggttgtgattttgttaaaatttattaattatgtaattttactgttgataatgtggtaaagtgggcgtatgccaacaacttatctagtatgatagatgtttcatcaatactgaaaaatattatgtgtaattactatgagatttaaaccatttattatataaacattttcttttttaaaaaaagtatttgcataatcaattaaaatacacaataatatatatttttaaatatatatatttataaatcaattaagaaattaggcaaggattgaatgccagatgttaacaacgtaaacgcaatcaaaagggcaacctcgatcactgtcaaatgtactacaatttaaaattgtactaatattatatgaactcccgctctctagaaaacttgcaaaggtgacaaagtaactttgactttgggcaacgaagttggtgaaccataaattatattatttatttctaacaatattttagcaactgatcctaatcaaccaaaaccatcatccactccactttatttaataagacttgcttaaatttaatagtactataaaatgatatgaacatatggaataaaggacttgtcttcatcaaggagaataaggttgattttgctttaattttgaagttgatttttctttatttatttatttatttggtgtgggcaggtgatctatatatgttggtgcaatgtctagacccaaaattagttatatgagttgggacttatttgtccataaccagaactatgatttggtgggtatggttgcctattggcttctctattcactgattgacacgtggcattgtggttgatatattcggtgaaattatgagtctcaatgttccatataaatgtctcagtcatcttcttcgactggtaagtgtggtttagcttgtgatcaggtcactgactacaaaatgattctatattatttccatcatttaccaatcattgaatgttttactaggtctaagtctgcacgttggtcgatttatgttatattttattcaatgatcgagttataaaattctaagtacaacctgtccaattaaaaaaaaaaaaaaatagtaactcgcccaatgaaattagtcggttta

SEQ ID NO: 27965 - DNA, 2748 bp, Cannabis sativa
  modified_base (34)..(40): a, c, t, g, unknown or other
taggatgttaatcaaacatacatgatagtaaatnnnnnnnggtaaaataattccaacaagaactacacaccgtgaagatccctgaactttctttaatcaagtaccgtcaatccacatctacaaactgactaagaggaatggatttaactaatgtgtagtcacagcttgatagcacatcctttagaacttcattgtcccattctttagccattggattcataactgccaaaacttgttggttaaacaaagttggatgagaagattcaataaaaggctaatccgcatcattaagccaaggatcgttcaaaattctagtggacttactcaaacccatacaacgtcgagcacctaagttaaccacaaattgagcttcaaggatgcttctccaaatgtaacttgggttattaccaatctcggctgtaaggaaagttccagatggaaaatatcaagctttaaaaaatcttccccacaaaaccatctccatttagaagcaaacaccatccttgtttagctaaaagagagagattaaagtctcaaaggttatggaaacccataccacctacatctttatttctacctagtcttttccaactcatccaatggataccaccttcttgagtagatttcaaacgccaccaaaacttactcatcatgtgttcgatgtcattgcaaatctcatccatcaataagaagacattcatggtgtaagaaggcagagattaaataacaaatttaagcaaaaaatctccttacttgcacgagataagaacttgttattccaactctgaattctttggcaaactttgtccttgagatagccaagtaccacatttttgttcctacccataagaatcggcaccccaaatattttcttcttgaactcccatcttcgagcaaatataggttctcatatgagtagaagtatctccaaaaaagaagacagaggatttggaaaaattcacctattaacctgaaactttctcaaacacttctagaagtcgaagaacaccattattttccccatgtgtggccttgcaataaaggtagctgtcgtctgcaaacaataagtgaaaaatcacaagagctctattggccacccgacatccatgtagccacttttttcgtcaaaaattcctaattaatgcttaaaaaccttcagcatataccagaaaatgataaagtgaaattggatcaccttgtctaatttcccgataaggaacaataaggcccaagttaaaacctccactaaaaatgttgtagcaaactgacgacaaacattactcaataagccttacccatttataatcaaatcccatcttggaaagcatggcacataaaaaaggccactccacccgatcataagctttactcagatcaagcttcaatgccataaaaccatctctcccagcttgtttacgttttaggtagtgcaagacttcaaacacaatcattatgttattagtgattaatcgcccaggaataaaagcactttgattcaaggacaccacttgatcaaagagatgcttcatacgattggccataactttcgcaatgatcttagagagaacattacaaagagagatatgccttaatttactcatgcgatcagggtttttttcttagggattagaaccacattagtatcattaaggccaaccgacataatctcagtatgaaaaaaatgttgcggagtggccactacatctcggccaacaatatgctaatatttttggtaaaaaacaggattcataccatcagggcctggggattaatctcgatgcatttgaataacagggacatcttaacttcactttcaattatcaaccttagtaaatcttcatattgtctatctgaaacagaaggcaccacacaatctaacacttcttcccatttcgatgatcccgccataaaaatttcctcaaaatacttaaccattacattctcaaggtcagtgtcccaagaaaccaggttaccattttcatcatgcaaactagtaatctgattatttcttcttctttcattagcagtggcttggaaatacttaattgggagtatcacgactcttttcccatgtaaaaggatgcccctcgcaattctaaatcacaaaggccacaagcttgtaacgcctcttgaaaaccgtctatgagccaagatggatatggtcttcctcccctcttatcgacttggcttaggacattattgaaatccccaataagcaccaaaggatttgaagcttcatctttaagtgtacacaataggttccaagtttgacgacaatggcttctgtttggttctccataaatttccgttaaacgaaagttaggggtccatgcaaggaaaccatacattcaatctaatttttagtgaagctattaattttgacaccatcaatattttgcctaagcattgaaataccaccgcttcttctttgggcctcaacaacaaagaaaccttcaaaactttgcctactcaaccattccaccttctttctatgacataaagtctcacaaagaaaaacaatcatgggcttttttgaaccataagttctttaaggaactgaatagtccgtggcggtggcccaagctcacaacagttccaaatcaaaatactcatgatgattgacaagctccatctccaagccccgccattggtaagatctttgaaagcccattattaccttggcccatcaatgaaactctttcagaagtaaccgatgccatctttctttttcctgatctgaagcaatca

SEQ ID NO: 27966 - DNA, 2818 bp, Cannabis sativa
  modified_base (688)..(689): a, c, t, g, unknown or other
ggtcagtctttcacacccttcattattcatgcctttcataattaattaatattttttatttttatcttttgatgagagttaattttatttaattttataaataaataaataataaaaagtcagagagaaagtaataaaggaaagaaagggtgaggtgatgaggtccccaaaccactttcattggttcttgttgtggttcccactgacaacccctttgttgtttggcagtggaccctatcgatgtgcctatctcatgcataacacatatcaagaatccaatcaaaattaactttggtagttaattagcaataatataaatgagttaatataatgttctacattcatgggtttcggttgagagagtttaacaactaattttacttaccataaaaacaatcataattaccaacaacaattccatttattaacactgtcaaaagtgataaatcaatttaggctaatcatgattttaaaaaaataaataaatagagaaaaagaaaaggtcaatccccaacaacaagaggatggttgcctactgtacggacccccctaatatgggtcccactagatgtcattgacatcactctcctcgtgggggtgtgggcccattttgagatgattaaacacccatgtggctgtggggttcttcattgcacgtgcatttctgcttttatttttttattttttnnttaaaaaaaattattattattctctcttttggtcaaaattaaaaataccaccactttttttatttattaaaaaaaacaatggtcctcactcagtcggtctatcctggctctcaaccctttttttttctcgggaggagagaaattgcattatttgcataagttaagaaaagaaagtacagtcaagatttaaaaagtttctgagaaaaaggaaggttaaggcaacacgatactgaaaaaaattgcctaaaaaggtcgatttccacactagtggaggttgtaaattaaggtttccattagtcttatgtatgaggttttgtttttctattggacctcatcctcatatttatgaattatgattcatgttgcttcagtttctttcagttggttattatatgttattaattattgttattattttattttatacctaaattgagaaattgatatccatgtagaaaggtcacattagtgaaataaataataaaaatagagagtgaaaagaaaatgacctccactaatctatatacccctctctatatatgaatttttaataattaagtgtccttttctatacttttattttggctcaaaagtaatttagcaaaagtccaaaacaaactcaatagatttgtcaatttgcccaacttgattattaacctttaaattatctctatttttttacatacttttttttctctattttgtggtaataaaggagatgaagcaacaaagtagtgatcaaagctcaacatcatcaagtaattataattatggtaataataacagtttcatgccatttgggggaggaccacggttatgtgctgggtcagaattggcaaagcttgaaatggctgttttcattcaccatttggtccttaattaccattgggagttagctgagaaggatcaagcttttgcattcccttttgttgactttcccaaaggtctaccaatcacagttcgccacctcaactcttgcatataattcattttctctatattcaattattattattagaagatcaagagatatatatgaaaatgtctatgatgatcataatatatctatatatatttctctatttcgggtctcttctcccatgtttggatatatatatataaaagaaagtactgttcaacaaagccccatttgtatgtgatgaaaatatatattagattgtatttttcttcttttagaattttccaacggcttagtgcaacttctttcaattaatttcatcacatcaaccaaagccaagataagcacctttatttatatatatttatcatatattatgtaggaaagaaaaaaattcccttgtaaattttatctgcctctcatgactagtacttgagagtttttatttacttgtatgtatgtttatatggctctcctttgtaacccttcttcccttttgttttttttagtataaaatgataataatttatgggattttattctattttatgtgacaattaaataataccatatattatacgtacgtatacttgcatgcatgtttacattttatatatattttaatacgatatgatcacatttaatgtggcactactgtacagctgttatattagtagtcaatttatttatttttttgaaggaggtagtgactagtgatcaatttaattatttcaatcattaatttatattattaaaggtttttttttaaggatttatgtatgtaaaagttagcatatatatataacaggaaattatagaaaaattattttattcggtcgttgtattagttatttattattgtatttgtttatgttttcacgttgactgaaaagatttaggaaattataatattatactattaattattgtaatctttgtagttttgactttttgtttctctctaatcatgataatataccttcaaacatttggctgtgaaaaattctacagtgcactcttagaatttttagtccaatattttaacacatcctatagtgtactcttaaaattctatagtgcactctaattatttaacacatcttaaatatcaaatttgaaaaaatttataatgttaaaaataggatttaaattttttttaacgcatatatatatatatatactaggtgattgttacgtgccaagccacgta

SEQ ID NO: 27967 - DNA, 3231 bp, Cannabis sativa
tgttcgatcctagaagactcgacacgggcctcaactgtcggcatagtgagccttgtagaaaacccattaagaaaagatgcttctttaaaatcgaaattgtcggaaattgatgatgataatgatgatggtgagtgtaggggtttagatcatgcagattcattgggactagttttgataagcaccagagcaagaatcttaatcaattggctagtgaatgcattgagtagattgaaacatcccaattcagaagatgggcattccttgatcagaatctatggccccaaaatcggatacaacagaggacccagcctggcattcaatgtgtttgactggaaaggagagaaggttgacccgaccctggttcagaagcttgctgaccgtaacaacatttctttgagctgtggagttcttcagaatttttggtttgatgataaggttgatgaagagagggaaatggggctagagaagatgagttttgttgtgaacaagtgtagagataataaacgcgagcgatgtgggattgtttctgtagttatggctagtattgggctgatcaccaattttgatgatattttcaggctttggggttttgtttcaaggtttttggacgccgattatgtggagaaggagaggtggagatacttggctctaaatcaaactacaatcgaagtttgaaataagttgatttgagttaagttaattcttttattcttttttcgatcacttattattagattagtatcatcattggtttaaggattattttctctcactttcatgaaaaaaaaatttattttgcttcattacatggagtcgtggaatattatatctatagcctatactatttttactacgattatcattcctttattacatattctgtagagatataataagtcttttttttatacggaagtaccattagactatgtttatgattacaataaatatcatactttacactaattttttatcatttaagaattcaaaccaattattgtaaaaaaaaaaaaaacacattcatatataagtaaatgtatgtgcccgattttggatctgtatcagttggtttctttttattttttattttttttttggctttttaactattttattcggttttctgggttggttcgtgttcccttcaatttttgggtttgtttgtattaagttttcagttttcttcaagttgatccttctctgttacgacaaagtgtgttctatgaactcactaatagattctttgaatgcatctctcactcactgaagagaagagtgctactgtctccttgccactcacgtcctgtgcacgtacttctggctcgagttcttactgagagaaccgtgtataaactaaattttattgatcagatgccaggccattgaaaggggagatttctagttacatttactaaacacaagggtgatatgttccatatagcttttggatgcgaaggggatataattcgggtgttgaataaggaaccatggtccttttaaaatcacttaattgtattgtactcaccaaatgctctacaaaatgtctccaaggaagatttagtttatactcctttctgggctcaaatctacagactgccttttcttagcaagtctgcagtccttgctgaagctttacgaaatataataggtgaatttttggaagtttatgaagactcaactactgagggttggcgaccctttctgcgtattcgtttaaagatcgatacttccaaaccactttttcgagggagaatgatccgtttgccaaatattcgtgatgacttttgggttgattttcactatgagcgcctacctgaattacgctttgaatgtggccgatttgggcatccttttgagcattgtatttcctttttggaacgtatggacaatggtaatgatgatgatgtgcaatatggttcatggatgaagggtgccaaactccccaacaatgcatatgatcgttacaggaacgattttttaacgggaaatgcatggccttcgctaactaggctttcacgtaaatctctcacatccaccttgccaaagttacataatcgtggtcagccacaaccctctgtcctttttgctgctgaaatatctaatccacaacttctctcaaccaattatggttataattccttcagtatatcatcaacccacatcatggaacctcttcaacctcctcatcgagtaacaaacaaccataatatcaggccatcccatccaactccacccactatccaccaaccagaaactcattttccacaaacaacaagcactatgatgacaatttgtcctctgcatatgtaccaaatttgaagtcccaataccagaacttttttgctacatatccaccacaaaactagtctgcatcctgataccaacaacacccacaaccacgtcaccatttccccgtccttgccacttatgacctcaacctcccctataatatcaacacatcatctgccaatatcctctacatcccacaccagtagttttgcacaagaaaatattaacccaaatgctgcttccaagagacaaaatgacagtattactatgtgcaaatttctgaaacgatgccgaggaccttttggtgaagccacttcttctttgtcagtagaagatggttcaaaacactttgtttctgctgataatgtagatctggtttgttctcatgactcttcagtggtggttggttcccaaccccgccaatcgccatgaaaattttaagttggaatgcacggggtttggggaacccaagtgtgttcaggcatctgaagttgcttgtcaagcaatacttaccccatgtattgtttcttatggaaacaaaacttactaataactcagttacttgctttagacagatacttaatttttttcatggcctggaagtccctcgtgttggtttaaaaggtggtttgatgctgttatagaaagatgatatagatggcagtgttcttagctatggtcctgcctatattgactgattcatggttgctgatactagtacatccttccatttttctggtttttatggggcactagaggttcatatcagattagattcttggctcctcttaaaacacttggcagatgtctccccatctctaccttggttagctatcggggattttatgagatcttatccaatgacaataagttaggggacctttgcggaatgaatcacaaatgtcagcttttagatcaacacttgatcattgttttctgcaa

SEQ ID NO: 27968 - DNA, 3754 bp, Cannabis sativa
  modified_base (3677)..(3685): a, c, t, g, unknown or other
tgtttctttctctcatattttcaaagtctagatcactgaaaaatagttcaataatactaaagaataacagaacataaaacagggtaacacatcttcaaaattattgaatgagaaaaatgaattcgagtttggttattattaatgatcgaacttagaataataagaaatattcatcaatcttcggtaaaacttgtacaatttaactgtttctcagtctacatatttccctgctcttaatattttcttggacaaaaaatgaaagtgtcgagggactaatgattttcatgtgctggcttgagctgtctagaatattattattgttgttgttgttactatttattatcattagtttttcttctttattattagaataacatgaattctagaaagtcaatttctagatcagtctaccctattaaggttggtacaaattataagttagaaccatcaatctcagtagacttttctcttgtgggtcagcttcttctaccatgtcaataaggcaattttttttaataagtctttgtagtctttctttaaatatcttgtattcttactaatccacttgtgcaacttgcccgcactccaattgaaatggcctataagatctcaaagaagtggttcctgtcacactaacccaagttggtcttagtatctaaaaccggcatttggtttggaatggaacagtaaagagagagaaatagagaaattgaatatcactatctatggttccaatctacataacacaattagtggggaattcaatttgtttccaccactcagctacggacaaccgacttagaaaagtattaagcacgctttccttttcatctcactattaacctttatgtgattattttaaagaggtttgtgtttatttttttattaaatattgaagaccctttttagcagcttgttaatgttcaaaatatcatttcttttttaaaataatttaaataatggttcgtgtatttgcttgtagacccataattggcagttgaagggttacagttggatatatttatacttgttttgataatttcaatttgtgtagcaaccattatccacttgtaccataacctttgttcttgtcttttctcacttgaccacaggcggctctaaaggaaaatggaataaattatgcataaaaagtctaaaaccaaaacttaaaatttttaaaaagtcaactaatctcaactgggattagccttctttttttctttcgttcattccctaagtgctgttggaaggtcaatcaataaagacagggtattggccttttaaacaaacagagaggtgcttttatttgactgtaattgcatgttatgaagataagggttcaaaatctctttgagcatattaaattgtttaaattggtaagtatactttcccaagtggataggttgtgctaacattttgtaataaccttatccttaccaaaacactcattgtcacatgttttacagtgataggctgagttgggtcttgattattttgctttctatccatactgtgagaagttatacccacttaattatgtattatgtggtctgctatacataaaaaccagtatgcttgagttggaaaagccattaatcattgtgagctgtatatctacatagagaaaccattgaaggacagttatgaccctttttaaggtcttttgacacattattatattatcaatctagctcatccttcatttaaatgcttccaaagctcttctgagtagactcagctctcggatgtagtaatgtagtctgtctatcatcaatgcaagaaacaaggagaaccctatttaaagaacagagaaaaaaaaaaaaacagctaaagattgtcacaataatcacattttaaatctcaatcatatcgagatttattgaatcaaatgaagccaattttgcagataatcaaacttagtatggcttaaacaaggagacggacattaaatcagagtcaaatgaattggattgtccttataatatttaacatttgttaaaatatattttcgaaaacatgtgtccttgcatttattctttattgtttggttttaagttttataaagacaatgtgttgattagtggttatttaaaaaatatatgaaaattactgaaaagaaaaaatagaatattggaatgtctattttatcgcattttgtgtcagtagtacatgcactagtctttgaaactgactggttaatttagtaacacttttttaattaatattttatttttaaaattagaaaaataaaaatattttttcaaattatgttttataaaactgattttactttttaattttttaattaaaaatctaaattttaaaaacagaaaaaaaaaaatactttcaaaatttttttaaatagtttttttaataaattttttagactccgactcaacttagatcttagaaatcgaacctagacccgatcccagacttggacccactcccgacttaaataaaatcaataaatgaaaatgaaatttatagaacacttttgttttttgtttttaattgtttttaaaattaaaaaacaaaagttgttatagaatacattttaattttctaaaaataaaattttaaaaacaaaaattttactttcattcttgtgaattaaaaattttaaaaataaaagtattaccaaacgccacctatattctattttttttttatatatatagaaagtttaatttatattttaatcaagtacaatgtacttaatcaaaattcaaaattgtaaagtaaagttcaactcataaaactattcacttttcattcaaattcataacatgcttaattaaaatgttgtcaattacaactaagccacatcatttatttttaacttttttagggtaacccaacatcatttcaggtgtgatttttggttcaaatttctttccttatatttttggagggttttgattcaaatcaaaggctaaagataatcaaaataaaagtatgacagagtattaaaaaatatatataaaaattgaaacctagccaaataaaggtgataagttgagatttcaaataaaagttaattagtaatacctataagagatgcctgtaaaagatgttgtgcttttagaacctcatcagtgggattaaccacacctgctgcatcagttgaacgtttttggatacccatgacaacatatatggttgaaataaatatcacaaccattgttcctcccacactcttcatcactaatggccctctcccttgcttcatctgatccatactcaaaatgaccagtttccttataggacttttgaacattagggtcaatattagtgccatttccccaattacaagcatgaaaagtaaatgaatcattctcaccagaacaaaataccctccttgtgtttttgcagattttgatctaacaaatgtgtgaaaatatatgggaagattttagagaatttgttgactatggaatgtttaggtttaagttaagatacttctatggaattaaaattaaagctttgcataattaagtaacttatgggccactttaagaataattcttcagatagctctaaaggcatgtaatacctctatcactaatgggggtaaagagtaaccacactcttgtcttgaaatatgaagtttacaaaaccagcaagttacaatttaaatgttccacatttatttatatactagtaaaaagttacgnnnnnnnnnacgtatactaattttatgttaggtattttttactttatttaaaaaatataattaataattaaagaaaaa

SEQ ID NO: 27969 - DNA, 3758 bp, Cannabis sativa
  modified_base (2292)..(2301): a, c, t, g, unknown or other
actctatagacaagtctgctatagacaagccatgtctgaagaaattctagctcttgctagaaataaatcatatattgttgtccctttgccagaagggagagagcctattagttgcaaatggatacttataatcaaggacaatcctgatggctctgttaacaagtacaaagctaggttagtagccataggattccaccaacaacctggctttgactacactgaaacattcaaccctgttgtgaaaccaattaccatcatagtcgttctcactttggccatttctaaaggatgaaacattagacaattagatgttaataatgcttttttttgatgaggtattgcaagaagaggtctacgtgacacaacccctggttttgaaatcaccattcaacccaatttagttgcaagctacacaaggctctctacgggttgaaacaagttccaagagcttggtttgaaaggttgcatcactgtctcttatcattgagattcacttcatccaagtcagatcattccctattcattctacacaatgcatcctccatcacacttgtccttgtgtatgtagatggcattttggtcactggaagtgaccccagaacagttgcatctctcattacttcacttcacaatactttctccctaaaagacctaggggaactaaagtatttccttggaattgaagttgcaaaaaccaacagtggccttcttctatctcaagctaagtatgctaaggatctcctcttcagagtagatatgcatgatgtcgaacctatttctacacctatgatcagtggacaaaaactatttgcctatggcagtgatgtctttcccaatcgacaaatgtacaggtctatagttggagctctacagtaccttaccataaccagacctaaactatcttatagtgttaataaggtttgtcaattcatgcaaaaactacttcaaaatcactggcctgctgtcaagagaatactttgatatgtggctgacattattcattatggtcttcatttcaccaagcctcaaaactttgaagtaaaggccttttgtgatgttgattggggcactgatacagatgataaaacatccacttcaagttttgccatcttctttggttcaaatctcattgcctggaagtctcaaaaacagcacactatttccaaatcgagtacaaaagcagggtacagaagccttgctaatgtggttgctgaacttgttgggcttcattccttattttctgagctccacatacagctgccccaacctccaactgtctggtgtgacaatcttagcatagttttgctcactacaaatcctgttcttcatgctcgcaccaaacatatcaagttgaatttgtacattgtcaaacgtgttccagcagtggatcaactggcaaatggcctaaccaaagtaatttccaatcaaaacttctctagttttttgatccaaagtcaccattgttgatgcatttaatgctgagtttgtgggggagtgttaagggaattcagttgtaacagttagtctgttaagttagtttactaacagtctgtactttttagttagtaggttagctttttcgattgtaactaatcttgattaattgctttcagctccattgtataaatactgtactagctgttctcgttgaatacaattgaactctttcactctaactttgtgtttctttctctcctctttcctctctctctctctctgtttttcaatttcagtgttcttattcattctttgaataataatgtaaaagagattcaaatctcctaacacagtggaatgatttgctattactgaatttttcatttgattcaatattttaatatatctttttttagtatgcatattgtaattacaaacccttataactaatatatcttttttttcttctcaaaatatgtcattgaaaactgttttctagtttagtatatgttctagaaattttggttacatttcattttcaaaaatggtataggtagataatattatatgttattttagaaaataagaatgtaaaattgatgaattttttcttttagaagggattcatccttgagataattacataagacactatttttttgtaaaaaaaattacatttttacgttcaaagaattcttttttacatttttacggtttttcataaaaacaacacgaaaacaacaacaaaactacataaaaataataactaaataacaacaaaaaataacatacagaaaacaaaaaatcaacagcaaattaacaagaaaataatatattttctgtaaataaaattannnnnnnnnnaaaaatatttaaaattccgtaaagttgtttttctgtaatttttttttgttgtttttgtgtatttgtgacttcatctttttcctcaccactaccacacaaatggagcccaagtttgaaacgttttgtgaaatgacttatgagatgggcctggaaagtgctaatagcccaatcatgtatatcagaactgaactgaagtatattattaagagctaatgctaaattcagtaccaccacaagtgtcataatctattaggtcaaattaagtatttaggaatattttatatatttttataaataataaatataatgaaatattatagaatactattaattatttgcactcacttagtgtggtgagaatgcctaattatttgattataacaattttttttttaaaagaaatagcggattttatctaattttttaagaagagaattcaaatttattaatattattattttgataaatttttacactataaaaaaataatataaatatatttttcgagacagtactagtttctcatttaaatcaaaattttattttctcaattcatatctaataattacacatttcacaccatttacaatacactatttttatggtgtagcattagtattagaatataagcattgtatctgaaataaattaactggcgtggatggtatatttctatttaattttacaatgtctagaacgtgtctctaaaaggagtataaataattaaatataaccttgcaaatttaatcccacaccacacagagattttcgtgaaacccatttacacacgcacacaactaataatgataggtcgcaatctttcgttcttattttcttccattttggtctcactcacaacatttaagataataattaatgaatccaaacacaagacagaataattaataattattatgcaatacacaatataatgatagtagaaattatttatttaaactaattataactagtttaccaccccacagctcttcctaatttggccattggtcccagttaaaggactaatattccccatctttaccatggcactggcgaaatcattgaagaatctaaactgtctattactataggtcgtgactaatgagtcttgtgatccgccattaaagagttcctgatcagagtggagaagtccacgcttattgacgagttgtccaaagtagttgttatcgaatctattctgggtggcgtcgaagggagcaaggttggtatcgccaccggagaaagggcagttggcctggcgtgtggtggcgaaggttgcgtcaatgttggtgtcgttgtagatgtgtgttcgaaagttgaggcattgggacatgccaagggtgtgggcaccggaaagagcggtcatgtcagtggcactgaggcctttgttggcaaatcggctgatgagagtggccaggtccgagcttggactagggaggtctcggttggcgtcgctt

SEQ ID NO: 27970 - DNA, 3087 bp, Cannabis sativa
ttcataattttttctaactcatgcatatatatcttttttaagaaaatttcatataattttttattttaattttttttcataatatttaaaatataatttatttttactcaatagctgtattttttaagaatatgaattggaagaaaaaagttaaaaacaaaactcagtataattaaaaatataaattttatataaaataaaaatttttaaaatagggtgtctttaaaaatttttagggtataaataaaaattttctttaattttaatttttagaaaaggctttctacaaattggcaataaatacattactggacttgaataagtaatttgggcttatttattgggccttcaatccacattcttaacataaccataatataatatggtacatatattgtgtaaactatatacatataaatatttagaggaacttttaaatttagtgggtttttatattttttgtgatatattttaaaaaaatatattttatggaaaaaaaaaaagaaattacattacatactttttttaaattcatgcctttaatttttaaccccccctttaaaatttattatatttaccttttttttttcaataattctactattatccctatcatttcacaatagtctctttaattctttaattaaaattttaccccattttttttgcaaacctacacatctatctccaaagaacacaatctattatgtttaaaattatttcttggttatatatgtgagagtgtgaggataatcggagacaatactcataaaaagatgtatatttaaattaaattttatttagaggtaaagcatctccaatagagatgcaaataagtgatacaaatataaaataaagctcactttatcaaaagtgtactccaatagtgtgccaagttgtgatgcaaatatctcacataataaaaaatgatccaaatttatatcacaatatagcatgatgcaaaatttacatcacaataaatactatgattttatatttaccactataccatttttaatattttattattattgtttagttagcatgttcatttgcataaatgacttttataattattattatttaattattaaactttatatttacttttgtataattattattttatatttttaataaattattaaatgagatattaaattttgcatcattatttattattatgcatttaggcataatagtaaaagttgatacaaaaatatcacaaaattattatttgtactaaatatagatcaacttttgtatctcttattagaaatgatcttagggtaatcagataagtaaccagttactataaaaaggtaacttatattatttttcccatatttttttaaatttttctaaaaagtttcttacttgttaaaaatttgaaatatattatttctcataacaaaaaaaaaaaaaaaaaaaaaaaagggtacatttttaggtttctagatctatttattataattttaaatctttaaatttgctaaaaaaatatttaattccaatcttgaaattatcagaatttttttctagtttgctagaaatactttaaatcacaatttttttctttcaattccaatcaacaaagagatattatttttggtccaatgttcggaccattctatataaattatatatatagcttgtaggaaggctaggaccatgagattttttttaagcaaggtgaggaccatagttaaatatataataacctttttttaaacgtgttataaattgattttttaaaagttatacatatataataaatatatttgctatcctaatttttgtacatgtgatatttatttaggtgacgtaaagataattttataatttgggttggcagttcgctttatgatataccgtctagagtgattatttattgcttttaaatgattaatttgaagaagaaactaaaaatatccgaacaaaatatgctataccatccgaccagcagtaagttcgtgtacatcgaccataataaatgcgaatacattaccttaagagatgcttttcataaatcttcaaatattcaaatcacgattacttctgtaattttatgagatagattcgcactaacaagaaataaaaggaaactgaccaattttttttttatttgtttaaagaaaataatcaagttttctattttaatttttattagtttttggaaacatacctgatgtaattttcttttataaatagtgaagtagatattccactattcagagatccaaaattattttttcaagagaacacttaattaagctgctaaaatcgttataagagttttcaataaagatcaagaatttcttgtttcttttctcacaatacaagtaaaagaggagtagactattactactataatgaggttgaacctctgtataataatttttgtgttctatttgcttaatcattattatcaatcgtttctaatcactttaatttgattcattgtcgttaactaaaaatgagatcaacaatattattaattaagaagtgaaggccacttatataacattttctattatatcactacaagaaatgttattttgtcagcgcagtttgctactgtgctggtaatagttaccagcggatctcgcaaactgtgctggcaaaaaagtcaaaattttaccaatgcacatttgtcgtgaaaaaatctaacttttaccagcatatttatgtgatgagaaaagttatttttgctaacacttttcatttagcgctggccaaaattctaatatcaatattgatttgctaactttttttgctaactcattgaaagtagattttatttggctaacacaataccaaactatgtaataataataataataatacgttggacttaaaattaatatacactatgtacaataatgtgtggtttttttaataataatatttaagtgtagagatgctaattttgttttgctcattatttagctaagatgagttttaatactaaagtatcttctagatgaaaatggggatattaatctaatgctcgtgatctccttaagagtgacttacctattctatgtgttggtggttaatataattttctttcaaaataataataat

SEQ ID NO: 27971 - DNA, 2457 bp, Cannabis sativa
ttatagagtgaaaaacacattatcttttttgttttagaacatacagtttagtcaaatcaagttaaagaaattattgtttaaatcactatggaaaagggatagcagatttcaaaattaggtgaaggtacaaacagacagccatgaaaaacacagataacatagtttgcatattctgaaaatgtataattagtattggccttttcctcaatttacagttaggagacaaattgaggacaaaaagataatcttaatttgcagcagaacattccactcacttttgcaagtagattgttaactaaaatttcagtcacagaaacaagcaggcactagcagaaaaataaattatcacatctttctaataactattcaatagaagtaatagaaaagaattctaattcaccttgcctatgaaagctgaagaacctccaagttttgcgatgccaacggccacatttgcaggagcaccgcctggagctttcttgaaagcaggtgcttcagcaagtgaaactccagcaaccattggcacaaagtcaatcaatagttcaccaaagcaaacaacaagtgaattgttattttctgatactccatttgtagctgaggaaagatcatagtaaaaatgattttgatagtataaataactgcatagaattaaaaactatacattttagacatgctataactgatattcatggtaattctaacttaattactagactaattaagactggagttttgtgttcccctccctagccttgagtgggggtcatgattgaagcctagagaaaatgaaaattaagaaattatgaaaatgaatcagaaaatcgaagaaatttaaagcaaaaatataacaagaatgaaagagaaatgatttcattttaaattcaaacaggtactccaactggtatggggcgaccaaaaaggcccctttttattattattattttttttttaattttaccagaaacgacacgacagaaaatctgttcgatcattccaaagataattcttaaaaagaatttcattcatcattacaaaatttcccaaaagcctaaaaactgttttggctgaacttttcaaagtcatgagccatgaaaaacttagcatattgacgagtcgtgcaagcaaggaacacttgacaacatttttaagattcagatttcagagtaactcatatcatacacaaataaccaatgcatgattacatattaaacataagaaaaatgactgaatttaaactattattagcgcacaaactggcactaagactaaggatttgggataaataaaaatgattcacgcatcagaaaaaacgccactaatcaaattgtaaatatgtattgctcgatcaaaatagagagagaagaagaataaaacaaaagaacacagattcagcataagagcagaaggaagaaaacccagaacaaatgaacaagaaagaaacgatctttagctcataaaatagctcaaacccagatacgaaatctcttgaaaagcatataaacacaaccaaaatcttaatatttataatcaagaaagtaaagattgtgtatttatgtacgtatatattcatatataatgtgtaaaaaatcaacgaaagatgtgaaggagacaaagcaaacctgaggtgggatccgtagccataatgaagataaaaatgagaactgaggtggtgcaataagaattgcagagagggagagagaaggttacaggttggtgaattgagagaaccaaaaaaagttaagaagaagaggagaagtagaagagtggtgggttgggttgggtttaaatcttgaataatggtttgtgaggtgacagtaccaaacaaatcatttgaccattcgtcctcagtttcccaaaccagttttataacccaggccgacgcatgttccagtctttttcttaaataaatacaattgaaatcttatttaattttttatttcgggtaattaattaaaatcttattccctgcatttcccctataaatggtgttaattattgaataaagacatgcagggtttccatttttcacacatggacaaaattagattaagtaacataaatatatatattttttcatttggaaaggaagattatttatgaaatactatctatttttttttaggattatagtacttatttgccaaataatttgtaaatatataatttcttttcaaaacacacgcacacaaacaaatatatataatttaagagcaacggttggtttggttgattttttacgcaaaaaaaattcaaaattcgattttaggttttcagggttataatccgaaaaccgaccgactattatacaaatgtaaaaaacaccgaccgttttaactcacggtttggtcggtctaaaccgaccaaagcgaactttattttttttttaaaaaaataagttttaaatttttttataattatttgaaaactaaaaatttagagtattgtatcaaatatcat

SEQ ID NO: 27972 - DNA, 1905 bp, Cannabis sativa
  modified_base (1363)..(1365): a, c, t, g, unknown or other
atttgaataacctcgtcatccattcaaagaactcctatcagttctctgattatttcttcaagagactctcagtggcatccttttgtttccacctctgaatcctctccagagaaataggtggagaaggtcaaaattgttaaggttttagaaatgggtatatgattttatgttaaatttatcgttaatgttaattttatttaagtatattgtttttttcccttgtatatatatttagttgtgtgttttgtcaatttgttggttagaaaatcatatatgcgtttctgaatttctctcactttttttttgcgtaaagtcgatgcattcaatacgtgttcgatgcttcctcgattattagtattttcagaggtacgttagggatgatatttcgaacgttcgatagttgctcgatatagattagttatattacttgttcgattgttatacgatatattcggtataagataagttgtgtggtttattcaagtacttcatgatatgcatgttcaatgtactgatcaatatgtgtatttaatttatacattttataaattttttttgtggtatttattttatattgttttaaattgatagagtcaactctgttcggttatttgatttataatagtgtttgggagcgcaaaaataaaatatttaagttagtccgttaaatattcgattattgttcgagtaattaagttttttttttttggcgagtcaatattcattcattcacaagattaatattcccgttaatgaaaaaattaattaaactaacaaacaaaaaaaatcatagctaagctaaaatttgataatgataatagtttgaatatctttcaaataaattgtgatgtacgaattattaattattaaaatatgttgtagaggtagctaggctaggacggttacctaattttcatacaattaattataaaaggagaagtttgtattatatataaacatatttatatatagagagggagattgcaaaacaatataatattaactaatttaaagatgttgcataccattccattggctgcctacaataataagcttgatcttgccacgtgtctccatctggaccgttcatcttcattatcgtcatcatcatcaatctcggccaatatgatttgcagtgatggtacgtacgtaaaatttatgaatatatatatatggttgaataatttgtattttgtagcacatatatatatatatatttatgatcatataatgtataaagataagtataattatttgtgggctcgtttagaacgtcgtattaagtcgtattgtattatattgtattatatccaattactttatatattatatttttataatattatgttaaattttaatttannntaaaatattatatatttaagtgtccataaaaattaatattacttatagttttacataaaaatattgcgtaaaatacatttcaatataatactatacaatacaatacggtataatacgacgtaccaaacgaacttgtgtaaattttttttaaaccatatgtagattattttccttagactcaaatatttaggcttatatatttaattgatcaatgatgatctatgtatataggtaagaattttaaataggaataatgtattattgcaaaatttaagtttttatatttaatttttctatctaattaaaaaaaattctcatcattttttacattatatgggttgaggcgtaaaaaattaagaaaaatttatttatcaaaaaaaattgagtttgacttagatattttttatacaaacatatttttttatatagtatataaacagatattttttaatattcttttaattaagtatataaatttgattttttttattattcgtaataagatcaaaatcttaaaatttaatattatagttaaatttt

SEQ ID NO: 27973 - DNA, 3159 bp, Cannabis sativa
atgccacctttatctctcactcaactgtaatagacttttacacattgaataaagctaaaactttctttaaattagtcgctgctagctagttcctgaactcaagtgattgagttccagtgtgtgatctgtgaattggtcagagttgttaccaatctaagtcaagtgactcttgggattctatggtgtcggcgtaagggaaagtacttaacatattatgcatggcccatttgtatgagaaaattatcagtttgttgcatgcatgatgttttaattttcttttgaattcagagaccagaaaattgtctaaccaacaaaacagaacacttaacaagttagacactgagagacacatccaagaattgatgaactctagcgaaatgaaggaggaaagtgagaaaggcatagatgtaccattttttactttggaaagtatactcaccgcaacaaataacttctctgtggaaaacaaactcggacaagggggttatgggccagtttacaaggtacatatatagcttcagtatttttttttgcctctattataagtcagagaccaatgtaattattggatagtggatacattaaaataaaagaaaagtgactagtttaggttgtttgtttatgtgggttctagtcagcctgtaattgttaaaaatcctgcatttgctccttattttaatattgatacagtctatgattatgaagaaacttatatatactcattgataagaacccaaaaatgagcttaaataaattcgcttgtttattttaatatttatttcgatataggtatgaaagttataaaacaacctctaggaacctatttacagtttgctgcaatgagtttcttgtaaacgcttaaattaaatagtttgtattgctttgttattaatactgtttctaagattaagcacaataggaatggtgtcacacttttccttttttgaacaaattatgtacatgtgcttaaaaaattgaaaaattacataattttctctgatcaaaatatgtttactgtgcacatcagggaaaatttccaggaggccaagaaattgcaataaagacgctgtcaagtatttcaagacaagggatacatgaattcaagaatgaagtgatattaatagcaaaacttcagcatcgaaaccttgttagacttcggggatattgcatagagaaagaggagatgattttactctacgagtacatgcctaacaaaagcttagacgccttcatatttggtatctatttctactatatattctccattttatccgtgtataccattgaacgtaataatttattgttttgggaaaaattgaatcatttgcaagatgacacaaaaaggggcttattgaattgggagatacgctttgacattattatggggatagctcgcggacttctttatcttcatcaagactctagattaaggatcattcacagagatttgaagaccagtaatatccttctagactgtgatatgactcccaaaatatctgactttggcttggcgaggatggttggaggcaaagaaacagaggacaacacaaatagagtggttgggacttagtaagttttttcatcttgacacaatataatttatgaattgagaattcatgcatcatttaaaagaatgtttcaattccataaaagttgtcaaaagttgtataaatgaagattgacaaataacttataattcattaaataataatattaggttacatgtctccggaatatgctcttgaaggacttttctctgtcaaatccgatgtatttagttttggtgtggttctacttgagatagtaagtgggaaaaagagcacacgatttgttcattcagatccacccttgaccctcctgggttatgtaagtagctctatatgtatttctttttcaatcaagttatattcctctttcagtttaactaaatgggatgtcaacattttcctcaggcatggaaactttggacagaaaataaggtgttggagttaatggaccagagtctacaggaaagttgcaaagaagatcaattgattaagtgtgtaaatattgggctcttatgcgtgcaagaagacccaggtgatcggccaaacatgtcaaacattgtaaccatgcttgacagtgattctgcaactcttccatatgtcaaacaaccagcttttgtccttagaagaggatcaagtaacacagcttcttctagttataagcctgaaacagcgaacaccgaaataagttacaccatggaagaaggtctatggtagtgttgtgaaaaagaatcccggtgagtcttttgttcgattactttatatgtatgttgttcttattttctttttaggctttaatttaaacatgtttttagtctacaatcaagatatctttttttgtatttgtaataaaagctagccttctctattgtatatccaaatcaaatcaattgtttttttgtacgtacttacatgatgattttgctataaaataaaaatacaggtacaaattaaacgtattcatcagagcaagaaatgtatacaatgtaggaaggtctacataatcaacaaccttcatttatggtattagttaacacattttcagagaattgtttagtacaaccgtcataaggaacagagctttccaacacaaaagttggttgttggggacttgaaatactacctgcttgatcattttcaagcgtgtagactgcatttgacatgatgggacaatcagctgggtatcttgtacacaaaatgctatatcaagaattcatcttcgttgtaactgatctccctcaatgtttggtatagcagatcaagtgcattgttttctttccataattttcatgcttgtaataccattaattaattagactttggagaaagcaatacgtacttacataatgaggaaggctcatagctaattctgattatatatcaaaatatttatgattgaaaacgactcatgacttgaataataggaaaaaattcatggccactttaagaaacagtaattctgtgatagcctctcaatataccagttcaatttaatatttgatgttgaactttgacaatcatattatttataaattaataaaaaacgttcataatcacaaatactaaagtattaaatcgacatggttagtaagtctagtagtgtggtaaggaatta

SEQ ID NO: 27974 - DNA, 3815 bp, Cannabis sativa
  modified_base (132)..(138): a, c, t, g, unknown or other
  modified_base (203)..(214): a, c, t, g, unknown or other
  modified_base (3386)..(3386): a, c, t, g, unknown or other
agactcgatcgggggccaaaaatgtcataatgggttttaattattagttttgatgggaatattgtgataagttgatagtgtatgtattgtggtaattaggagtatgtagaatttaacttagcgccctagaannnnnnntttcttaatggctaagaaataataagataatttttattaataaagtttttttattattattattnnnnnnnnnnnnattattattattattatccttattttaaaaaaaaaaaagaatcagattatatctttatatatgaaaagtgcctatctaacgatattttttggtttaacagaatctactttacaaataaaagaatattctgttaaatttaaccgcaaaagaacaatccaccatttttttaaaacgttttcttttaacgcctttaaccatccctttcttcacacgattcttttcaaatgaccctaaagctagccataatctcactctcaatctcaatcctaatcccaatcccaaacaacttttatccattccacatcaattgatctaccctttaaatactccctacaatagaaattccaatcgcagaaatttgaagatcttgatcggaggtgaaaattccctgacgattcatgagatcttctacttattataacatatagttagttttctccggttccagattgattcaggctttgatattgtgatcgatggcccaaatttcattgatacaaagttcctcggtgtgccctatactaactgatatttgccttaattgataaagatatgggatgggtttaaacagagtcgataccgttattttcttccattgcgctctctaagcaaggcttttctttagttttttttttttttgtaatttctttcttctcaatgaatttttttttcatggatgtccaaatttctgaattgatattttttttttaaaataaataattaaatctgttattgtatttgcatttctgacttacgacattgtctaaatacatgtgaattagttatttgagaaaggagtaatgggtttgtaattgcattatagagtaagtgctaaatgtttgttatagaattttacatgaattgtgtttttggatgttatacgaattttactgacttgaaattttaagaaatatctaactaaaaatctatatttctcagtttttgggtgatttttcaggtatcagacgttaaacaatggaagttttccatcacttaatcttacccacaaggaggtgggtgggtctttgtacacagtacaagaaattgtcaggcatataatcctagaaaatagggttctaggtcctgcaaagttaagtggagatggtaaaagcaccaatcagttggaagaatacccactgggttcaattgctgtagctcctcaatatcatttgacacaattatcaaatggatctcaaataataacggatgaataccatggaagtaatgaagaaccaaatttcaggagctaaggtaggcttttggtgaagcatgttatgtcatcgctacatcatttaataattttgacactcaagagtcaagattcacaaaatgtcttgtttaagtaaatattgatacattaaaatatttgaacaagataattggtactgcttgtttctattctttcttccacaattatttataatttattgagttgtgtttgtgaatgcatttacaggctgtaaacgttctaaatggcatcaatgtgatgtatattgacaagagtgttcgtaaatctgagcatttgaaaactgagaaggagctgaatgaaaatgaagttgatgctcaacaagtgggccagccccagaaaggaagtaatccaactttagatagaatcaatctgtaagtaatttcaaatctcataatataaaataatttcaattttaatttttttagtgattagtgatctttgttctattaaaaaaattaggtaattcaaactgcctcatttggacttattcatttgtccatttttatctttcgcagtgaatcttggggaggggcctctaagaaccctagaaaaccagaaggcaacccaatatgggtcgttttaaggtgtttgtagatgtctttgtgaagttttggtctgaataatgtttcttcagactgatgcttaaaattttgttgctatgctcattaattgattgtatatctgataaaatgatgttgatttcactgagtgactatacttttgtgtttagattatagtgtgctcttaaccattttcaggagctaatttaggcttttatagtcatcatcatcagccaactgttagtgagaatacaaatgagatatctcatgaatgcaaaaagagaaaggcactcatgatcaatttggatgcctctgagtgcagctcaggcaactcttctcctccagtctctcaacttgttggggttgagaagaaaaatgtaaccactttgtttatatatctatatcgatattattctatatatgtaaattaatgttacatttttatttttacgtttcaacatttaatgtttttaattggttgcagggttccgaaaaagggaagagagtgaaaaacaatacagtaaaagtagaagagaaactaagggaggttgttcatgttagagccaagaggggccaagccactgatagtcacagtctagcagaaagggtataattattataataattaattatattcttctataagccagtaaacacatttgattatgaattgaaataggttgcaaatatattacttgcaagcgtgccaaatatttgataagtgaatagtttataggatgtgctaaacaaaatggttttaattattgcacaactttctaaatcttgaaggtatagcttcaaatatcagcatttgaaggtatctaatttttatattaggtttttattcaaatatactattctttaacagaataaaaattattcaaataaaaaataaaaaataaataaaaaaattattcttttcaatcgtattttataaattattcaaataaaaaaaataaaaattttaaatattcttttcaatcgttaacttgaaaagaaaaaatattatacaatttagctactgcctaaaagtttggaaattattttttacactctaccttattcagttgcatatagttccacttagatagatcttaaataaaacaaaaattttatactaaccgttatatattctgtataaattattagtgcaagaacatatatacatctcgacgatgataccgatttgttggatgttgtgatgttcagagatgttgcagaaaacatattctcatgtactgcagttcaattaaagtcatattcggacgaggtaaatatacaaaaataaatatctaaaatttatccattttcataaacagaagtataataaatcttattactaattatttttacagaaacatangttgtttgtccaaaaaattacggagcaattatcagccaaaaaatggagaatacagttgtatgtagatcaaaaccgaacgatgagttcaaagtacaatcatttcaccattcaagcagctgaaccaatggaagattgtgaagaagttttactatactctttttagtttttctaataatattttatatattaggactgtttctaataatcttttcttctattttaagattgcacattttctttaatttttgttacataatgtttgctttaaattttgcaaaacttatatcttgttcctccaaattttctataagtaaataataagtattattttgtcatgacttatacttacccaattatattttaccaactaattataatagcacaaatattactttaatgaaacaaatcattcgcatgatcataccttta

SEQ ID NO: 27975 - DNA, 3625 bp, Cannabis sativa
gtcccaagttccaatcccgatctgagtctggatttagttctgggtctatgtccttggttcagatcctactctggtttcgagtttgggtccgggtgaaggtctagttttgggtctaattctaggtgtgggtttgagttcagctctcgagttccagtccaattctggatttggtttcaggttcagttttggtccttgttcgtgactaggttcctatcctagtttgggttcggggtaggtttttggtccgggtctgggtccaacgtcgaatttccaggtcaagggcaggtcctggttccagtttgagtcccgaattctaatttgtatttgggctctcgagcctaggtccatggtcttggtcccctatctaagtccgattcctaggtcctagtctttgtcaaggttcgggtttgggtcccacagtcttggtttgagtccaggtcccggttcaggttttggtccaggtttcggccccagtcttcggccgagttcaggttcggttccttgttagggtctagatgctggtttgggtcccagtgagggtttaggaccaggccaggtccatgtcccgatccaggttcaggccctaggtctcaggtcccagacctagtcaaggtcttggttgaggttcttgtctgagtttgggttatggtttgggttctgttttggtctcacgtttgggtcctaaacacagttccaattcttattcttggtccggcatcgattccgagtcaaggtcagagtctaggttggggttggggtccgagtcttagtctgagtccgggtacgggtttttcggatctcggactgggtctaggtctgagtaaagctcccatgatcgggtctaggtcttcgtctgggtctgcgtctgagtcctggtcccatgtttcgatccctattttggtctgggttagtattcggtttcggctttgggttcgtgtccatgaccaggtctgaatcctagtctcggtcaaaggcttattctgggtctgggatcgagtcccgtgttcaggttagggttcgtgttcaagttggggttcgtgttcgagtctcagtcctagtgtggatctgggaccggactaggtccgagctcaagtttcaaggcttggttatggtctagttcgggttcgagtcctgagttcggatctaggtctgggttccgacgccaaggtctaagtcccccatcaaggtccgggtcctagatcccagtctgggtccatgttcgggtttgggtccaagtccaagtttcgattttgattcagtgtctaggttcgggtttgggtctgagtctgggttgcggtttgagtcctgatttgactctgggttcgggtctaggtctaggtccaaatctcggtctgggtctgggttcaggtcctggtccgagtttgggtcccgagtgcgggtccatgtttgggcatgggtcaaggtctcgatcaggatctaggtcctgagttttgatcccgatctgggtccagatctgggttcgagtccaagttgtatttgaatccctatgtaggtccgagtttgggtctgggattgggtcccagctctaggtccaggtccgggtttgggttcggatctttgtcccagtctgggtacacgaccatgtctcggccctagttccggtctcagtttgggtcttgggcaaggtccgagttcggttttaggtctgggtccgggtcctggtcatagtcctagtcttgttagaaggtcttggtctgccggttcttgttcaggttcaagtttcgggttctaggtttagttcagggtccgagtttgggtcctggtctgagtctcagatctggatccctatcacgtgtcccagtcttgttctggttcaggtcctgggtcccaggtccgagtttggtttcggggccttgattggggtgcagttctaggtcccggacccagttctgtgtcttgagtctggttcaatgtttgggtctgagttcgggtcccgagtctaggtttgggttgggatcctggttagggtctaggtctaggttggagttcgagtcctggtccatttacggttctgggtctaggtccaggtccggctacggttccttgtctaactccaagtcctagttccgctcccgttctcgggtcctagtctacttccagtttcggttccaatttcaggtcacaaggtccgggttcaggtccaagttttggtctgggactgggttcgggtggaggtgtaggtttgggtctgattctgggccttgggctaagttcgagctccctgtttgggttcgggttcgtgttcgggttttgtcctggtgtgggtgcgggtttaggttactaacctggtttgggtcctgggaaggtttcgggtttaggttactgtccttggtccaggtcaggtcgtagttcgggttctagtcctggattcagatctgggtctggattttggggtctaggttccctatccatgtcccgttcctaggtcctagtcggggggtccagattcgggtttggatcctgagtcttggttttagtgcatgtcccagtccggatttgggtccaagtctcgatctcagtcttggttcgggttcggggtcgggtccttgtcagggtatggatcctggtttgggtcgcgggtctcagctctcggtgagggtttaggaccaagtcaggtcccagtctcggtttaagtctggatccaaggtctcaggtcccagtcctagtcaagatctcagtctaggttctggtctgagttagggttacggtttgggttcggttctggtcttaggttcgggtcctagtcatagttccagtgctaattttgggtctgagtttggttctgggttcgggtctgggtcaaggttggggtcagggtttgggtcttagttcgagttcgggtacgggtttttcggatcccagtctgggtccaagttagagttcgggtccaagttcaggtcctaggtatgggtcttaggttcagatcagggtctgcatttgggtccgggtccaagtcccgtgtttcgattccggtctgcgtctgggtcggtattcgggtccgggtctaggttcatgtccatgtcaaggtctaaatcccagtttaggtcaggggatttgtctgggtgcgggatcaagtcccgagttcgggtttgggttcacgttcgagtttcagtcctactctcggtctggaaccgggtccaggactaggtttgagccttagttccgtggttgggttctggtctaggtcgttctcccggtcccgatcctgttatatggtcttggtcacgttctggttcaagtttcggtttagggttcaaggcttaaggtttaggggtatgtataaagagtttaggatttagggtttaaggtttagggttcgggtcacagggtacgatttaaggttcgggtgtgggtctgggtctgagtcttggtctgtgtctaggtccgtgtttgtgttcaggtccgagtaatgttcccaaatccaaacaccagccacatgtcgagtcttattcgagttctggtacaagttcagtttctgattcgggtctaggtctgggtctaggtccaattcaatgatttagacattgactatgggtcgggtccgagcctcgggtcttgggtcccatgttggaaattatttcaccaggatctagatttactaaca

SEQ ID NO: 27976 - DNA, 5421 bp, Cannabis sativa
gggtgacttgctcttgcattttctgagatggaagttcaccttgttggtcggccagaggtgcaccactaaggggatggctggccaaaggttggccaagcgagggtgttgtcaggccagagatccctacccgatcccccacactggtggttttcaaagtttggttgttctcaccactagatccttgtggcaagacttttccatcattgggcaagggaaggtctgtcctggttccaaaagaacctagttggatcgtttgtctgtagaccctactcaatctgtcaactagtctctcttggagaggatctatgatgagatcctgacctctcccagtagttctttcattaaactggcttattaggtcacttgcttttctattataacgatctagctcttcttgatgagatcgaaaaatgtactcctagtcatccatccttctgagaaatttgtgtctctattgtgcgaatacatcacaaccaacaatgcgtggttcttcagtttggctaacttggcagatggcctctctaagtctggctaactcaagatcttctcccaattctacgtgaggctcgccaatggctagcttaccaattcatggtcccgtctccccggcataatactgaggacaagatctagttgtggtggccaggtttgtgatgcctgccgagatgggaggcttggccacattatcaagttcgtggagattctagttgtggctagaatacaaatatccggatcagcagtcatatggtcttgaggaagacctgttgaggtggaagttatagttggagttctccttatattaaccatggtaattgatcagataaattgacaatgctctcaatgaaatgatcaaactgttaatctcaggtttggccaacagactgtggaatcgtatttactaccgatgctaccacgtcaacacaataagaacattaaagtaaaagagacacaatattttttatagaggttcagacccctcagtaagtgggtaatgacctactcccattttggttgtataaatactcaagataataccactcagagcacaaaggttggagattctgaagtggctctcttaagattaaaatatgagaatcagtaggcaaatctcaagtatgaaagagagagagcctagggcgtctaggagagaagggatgagagaattagggtttttgacttagaacttgaaagattagagatcttgagacagagaaattacggttaggttaacgctctttatatatgagagcttacaagagattaataaccaattatccctaaaaaattggaaacatcaagtgtttgttacataattaaataataaatggattaataatcccccaagaataggaaaatagctgatatttctccactttttttgggggttgttgaggcccaaatcgtagcttggcttattgtcccggatgaaggttgcacaccaagggcctgccacgtgcaggctggcagaccaagtgcctgctagggtcttgccggccaagtgcatgccagggtctggtccgccaagtacctaccaaggtctggccaaccacgtgctaccagtgtctggccagccaagttgtctctagggtctcgccagtctattgcctaccaaagtatggccggccaagtgcttgccaaggtctgcctggaagtgcctgccaaggtctggcaggtcaagtacttgccaaggtctggcaagtcaagtgcctgctagatttgccaagttttggccagcatttgcatgtgttggccagcctttgcaccatttttccagcaaaggcaaggcttacttgataaatcaggccctttattggtctgacagtgatcctttggtcgacaagcttgtgctcaaaccatgaccggccatacaagcttcaccatgaccagcctatgtactgcctttggccgaccaaacattgttgtgcagcttcttgacaacttgcttaactcctttagcttattgctcgacgattttgccatgccttataaggagacattgtccagctattgacaaagtagtataccatgcgtcctcaatcttggtttaggtgaacatatcatatcaggtgaacaaaatttagaataataaacttatttactaaattatataaaaaataccctgatattaatatattttcttactaaattatataaaataattaaaaatatacgtagacgagtttcagtccccaggcaattaactggctctgaccgtgcttaacaaaagggttatcttaaagttaattatgtaaatgcttttgtagatgtatatttttatttagttgttatgataaatttaaggaaaattactctacatatatagtatgttttaacattttttatcaaatttatggtttggatttcttaggttattttttcggtggttttttttgtgggtttctatacgaattttggttgcgataagttgctccattagttgcaataggagtttttatgtagaattaaaaaatacgaaaaaaaaaatattttaaagtgtaaaaataaaaaaaaaaaaatcataaatttaatgtgtagttgactaattttatttcataaaatatatcatcacagaatattaaataaataataatagtttttatatatataatatttagaagaataaattaatatttaaatttaaaaactaaaatcaattactgtagtaagtaacataccgtgcacatctactagcaataggatgacaactagaaaccacattggagggctgtttaaaacatcaaatatagtcattaatcaatatgatattaactattactgttttactaaattagtatatgtaaatttctatgaaataaaataaaaattaatttaattaagtaccttattccaacgacaattctgaaatcttcctctaacgatcgctcaatgtattgttggaaattaaagctgtcatgcctggctgacaagtgagcctgcaaagtacattattaaataattattgttaaaaataatgaagattaaagtaattaattaatatttagattgggttttgataattacctcaatgaaaccatgtcttaaggtgagatagtcaacttttgcaactgaattagaaaactgcctgaagaaacatttctgttcatattatttgatttaatcagtgcttagttgatcatgtccttagattataatcatgtatcatgtgttgatatatattatatacgtagaatattaaaatagggtcttacaatccacaaaagaattgaggatgtttccgtgcaattattcatgtgtcgtcttccaaaagttgtttgtcttgtaaatctaaatcgataaggatctgataaatacagtcaattgttatattattatattaagatgtatacataaaatcttaaaataaaaaagatgtatacatatataatgtgattatataaataagtgtagttagctcaagatacactattttttgtgggtaatcggcagaattggcgatttatataaatatatattataattaggttatgaattgatcatactgatctatatattattattgtaatacattacacataatgatttgtataattatgaaccatttaaataatacaaaattaagaaatgaggaacaagctaaataataataaatttctattttagttctaggatttttctctctggaggaaacatgttaggcttagtccttttttagaaagggttcagtatactacgatggtggcgacgtgattccgagtgggtggttcacgatagtagcctacgaagcctaccctattttgagtgagtgtgcgaaggccaggttctagtttcaacggtgagattggaaatgtaatagcttctagtgagtggctttgtgtgattggtgtattcattttgctctggtttttgcttgctttgatttctatttgaaactccagtcacggtgagagtggttctattgggatttggatttttatttgttatagagtggtctttcgtggtttatttgatttgttctgtggggtgtttttttgcttagaaaaggtttgatttggtgttggtggtgtgtagattttgttttggatacagtttgatttggtattggttgtgtgtttgattgctctagttctagttcgattgtgttgagtctttgttgttggatatgttttcatttggtgatgctatgtgctaattctgtggtgattgctcttattggattgggattcgtttggactggttctagttcgattgggatttgttgttgagctgtcggtgggttctagttatggtggtgcgggggttttggtgtgtggttgtggtcagggttgtggttgttggtgcttttggtgtgtggagtcgtgtatgtgtttcagaggccctcaagtttggggtttagaacagaacggagggaggtgttcgtgcatttttattgtggtgtttgcgtttacattttggggttgagagtgattggttggttgggtgtgtggtaagtggaattaggcaaatatagatttagaattggtgactaaactgacggaggttctaaaattagacgaaacagatgatcccgttgtcaaattgaataaagatagccttgaagaaagtagaaagagattggagatttttttggtggggaaggtcattggtcctaagccagctaataaagtaggaggttagaatgctatgaagagtttctggaagattaagcaccattttcaggtagaggaattgagtgtgatgaatatcttttgattcttttttggaagtagagaggatcgacaacatgtttatggaggtggaccatggatgattgagaaacaattactgtgctttgtgaaactgatgggattaagagaaatttcaaagatggtttttgacaatgtttcttcttggatttcaattaataatgtgtcacttgtgtgtatgtcagaggtctttgctcgggaatagggaagtatgatagggaaagttgaggatgtgagagtggctaatagaattataaagatccgtgtctgcatcaatattactagcccactcaaatgttgcttaagagtggctattgatgagaagggtaatgaggtatctttgctctttcaatatatacacctcccaaaattctattatgattgtggtattataggccataaagctttggactgccctcttaatgacttttaggatgatgaaataaggccacttcaaagtagacagtatggatcgtggatgtgtgctccaagttctcgaccaaagacacagggtcagcgtgttggtctgcgtgagggtgagccaaatattatcaatatgagagagctggaaacaatagttaatgttgttaagcgatcccgatcaagaagaagtacaatggaagagtttgctgcaacatccatcttaaaaagttaagaatgagaagatgagctacgtaactatacgttggctacattggaaagtgatgatgtaattggg

SEQ ID NO: 27977 - DNA, 2271 bp, Cannabis sativa
  modified_base (2204)..(2204): a, c, t, g, unknown or other
gatcctggtaaaataatatccaaaaatttactgcctagagccttcttactagatggtaatttctccataatccaagtgtcattatcttctaaagtacgaatttcattttgcacaacaatatgcccaacaatatatttgaaaacttctttaaagggtcatggttcaacccctgtaattatagctgcaagaaagtggcgatggtgcatagtaaagtctactccctttcatggacagcctaggaccaaccagtctcagtcttcctccaacagtttcacactccaattaggccagcaatctcaatatcaacatcaatttaggccacaaggttctgggttcaacatggggtactcacaaggtttccaaactcctactcctagtggtagtcaaagagggtacaataaaggtggagggtttggtgcaagtacaagccatcatagtcaaggaaacggaaaagcaaaagcaaagtcattagctcaagcctatgctcttgggtttgatgatgtatagggcagtgtagaccagggagttgtcaatggtatggttcttatctcacactcttggtttcatgtgttatttgatactagtgcatcacattcctttatatctttgatgtttgctagtatgttgggtttgagttgggaaacttttagtcttgcgttgtatttcagtgtacctatgggaggacacggtgaggtatctaccatatgtaggtcagtttgtattgtgtttgagggacacaagttgtttggaaacttattagtgttgctcatgggacaatttgatgtaattcttggtatggactggttgtctaaatacctagctattgtggattgttcacgcaaaagagtgactcttttaaacatagtggtaattttattatttaccgagccaacacaagtgctgtgagacaatattctatcttaagggcatgcttagatcgaaagagaaacttagagtgttatgggaatctatttacgatcgaggataagtctagggatttagactagttcccttgggtatcagtggttagtgggtttctagatgtgtttctagaggatttactaaggttaccaactgatagggagatcgagttttgcattgatttgattcctggagctcaaccagtttctattgcgccttaccacatggcacctgcagagttagctgaattgaaaaaacaattatgggagttaatggataagggttacatcagacatggtacttctctatggggagctcaaatcttgtttgccaagaatgctgattgaactttgcaactttgtgtcgactatagaaacttgaatcagatgacaattaaaaacaaatatcctctaccgaggattgatgaattatttgatcaacttggtggttcaacattctttttaaagattgacttaaggtcaggctaccatcccttgaggattagggaagaagatatccctaagactactttcaggacacgttatggacactttgagtttttagtgatgccatttgggttaacgaatgcacgtgctgcatttatggatctcatgaatagagtctttacaccttttttggataagtttgtggtggtattcattgatgatatcttggtgtattctaagatacgtgaggatcgtgctgaacacttgacaatagtattacagacgttaagaaatcatcaattatatgctaagaaagagaagtgtgacttttcaatgattgaagtcaaattcttgggccatgtaatttcttaagatggtatcactattaatcctacgaaggtagactctattctacagtgggaaagacaaagaatgtcactgaagttcaaagttttcttgggttagcagactattatcgtcactttgtggagaatttctctcgaattggtatgcatttgacaaagttaacaagaaaggaagtaaattttgtgtgggatgatagttgtgaagaagctttcagagaattgaaggaatgattaactttggtgcctattctcactgttcctaatattgaggaaccatatgtggtattcactgatgcttcaggtataggcttaggaggtttcctcatgaaaaatggctaggtggttgcgtatgcttctcgacaattgaaaccacatgagaagaattaccctacacatgacctagaacttgccacagtaatctttttcttgaaaatttagagatataatttgtatggcgtaaagtttgagttanctcagatcataagagcttgaagtatctttttactcaaagggacttgaacttgaggcaaagaagatgg

SEQ ID NO: 27978 - DNA, 1899 bp, Cannabis sativa
atttcatcataaataatcaattaaagagcttgaaatcgaaaaagaaaagttagctttagtgtcaattggaacttgtagaaatattaatgtacctacaaattaatgcaataaatttaaaaaaccatatactattttttaaggctaattagtaattttttctcttgaactttgacatgtactaaatcgtgttcctaaattttttttgtcgttaaaaattctcccgaactattaaaattgttaaatttaaggacttttatctaattttaataaaaaaattctaacattgatgaaagtttaaggggcatgatttagtacatatcaaagtttgaggagtatgatttggttagatatcaaagtctagggagaatgatttagtacaaaaacaatcactgaaacagtaaaattgaatgaaatacaaaaatccttaaatttaacaatctcaatagtttggggaaatttctaacggccaaaaaatttcaagagacacgatttagtacttgtcaaagttcagaaaaaaaaattactaattagccattttttcattttttttttaaattacgatttcagtttataaagtttttttttttttgtagtatttatgtgggttgcaatacaaattttagttgcaatttagttcttctagttgcaatagaaatttttatgtaaaatttttaaagtgtaaaaataaaaaagtctcgaaatttaattattagtgtcaaaagatgcttcaagcatcaattttgattacatttttattatattaatttttaaaaatatattaatcattttgctctaataatatgattaaaaattacaaaaaattagaataatttaccaaaattaagtatatgaaatgaaaattaaatcaataatgcatatttccattttgataataaaatgaaatgagagtttggtagtatttatttaatttaggcaaaataaatgaaataattttttgtatgtttcatttagttttgtgcattgtattttgttttttatttttatattttaaaacaatttttttaaaattatttttacggaaattcatataagcaactaatagaacaacctaaatctacatagcaacttacataaaaactatgagaacaacttaaactataaaagttcaaaaaaaaattaaaaaataatatatggtgtaatttttttattgtgaattttagggtttataattatttataattttgcaaatttaaaatgaaatagtaaaagatatctacagcatataaataggatttttactctatatcacatatagagaagaatattgtctttatctttttgtaaaaacttctctaagaattttggaaataagtttccccttcagttatatttcattcaatttcctaatacattttcagagagctataaatatgatatattattatttttaagtattttactaaaataactctcatgttatgtaaaatatatattaaatttggttcaaactaaaaattatgtcaaatttgacacaaaagataccatagtcaaatttagctaacaataaatactacttttttaaggaaaatttacatcgtatactaacttttgtcatttaattactgtcaagcggtattttttacttttttactgtgtatttttataaatttcatattgcagtatactgtgtttatttttttagtttttttgtgttgttttatggttgttttccataattatttttttaacgtcgatttcactatttttgctccatcttattggaattaataattgtttatgggtgttctcgtagtgctgcgatggttctatccatttgtgtggaagatagaggctataaaatacatttttaagtggttcttttatatttttctaagtggttatatctgcttattgatttacatttgtttttgtgttgtt

SEQ ID NO: 27979 - DNA, 1278 bp, Cannabis sativa
  modified_base (27)..(33): a, c, t, g, unknown or other
aaaatagattacattgaaatggagttnnnnnnngggcataaaacccaacacgatatacagccatattggggggcatactcccactaagagacttctggaaaaatattcggaggatatccaccaacaacatgaaggagttcctcaattgtgacaagttttctctatgataaaattgagttagcttgttttctttatgataaaattataatgattcgggtagttattaaacacccactccagcagccttgcaccattcatataaggcaaattattccaatgcctatttttattctcccaaatggcccataacactttaatcacatcctcaaactgagccttggaaagtttccgtctaaattccatcaatagatcaaacatagattggcctctactatcccgaatatgcttgtagcaaggcattaatttctaaactattctaaccttttcacaagtccaaagagcatgagagagattcagcatacctaccacaaaggttgcacataggatcaatcatcatgcctcggtgcctcaagtttgttttcgccgggagccaattgtgacaaagcttccagccaaagagcttgattcgaggaggtaattgcaattgccacaacatcttccaccaatcatgaattttttctatgtccgagcatcgcgtaggactaagatttatttcacgggccactctataaccgattgtcaccacatattgcccatttgtagtaaatggtcaagccaaagtgtcttccatttgcgtatctataggggtgcccataatccatggtatatcctccttgtgtaagtgaagttgaataagaacttgttccactcaccatcttcattaagtaggttatgaatggtggtattaggttccaaccctgggtgacggtggagaattgttccattggggcgggggagccacttgtcttcccgaatccgaatgtccctcccattacccactttccaacgggccccttctttaatgattttctgcccccaaaagattccttcccacattggcattgaggaaggaggaattgggataataactacttttcaatactcaggccaacaaggagtaagaattatggataagacgtcacccttgtttggccaaaagtgcttggttaaattgtttcaaacttcaaaaccccaagcccgctccttctttcggcttgcacaacttgtcccaagtactccaataaagtttcttattgtcttttgtatcgccccaccaaaagttggtagccaagaagtggaggcttttgataagctttt

SEQ ID NO: 27980 - DNA, 2947 bp, Cannabis sativa
aattagttggattataaattggtataaaatgtagatttttaagtttttgtgcggaatttgattgcttagagcatctttaatagtaacattttaaagaataattgttaaggtggaaagcttaggtggtaaaatatattgatgctatattattggatataaaaaaatgatatttttaaaattcgcattgatgctatattttttttttataataaaaaattaaaggtgcaatgtatataaaatagtttaataaaaaaaattgggtaaatacaattttagactatgtgttttgcaaaagttatcaattggtccctctgttttgttaaatgacaaaatagattctgtattttctaaattgtacaaatagaactctgaactaattttttgtcaaaataaaatttattaataatctaatctagaaatgttatgaaaaaactagttacattttttgtatctattcgtgttagaaattatttgaaagttagttatattgaaaaataaaattgttgaaaattgagctcaatgttctatttttatcattttgaaaaatatagggtccatttgtgatttaacaaaacagatgatccaattagtaacttttgtaaaatacagggtctaaaacggtatttacctaagaaaatataaatttaaaataatttttaaaaattactcttaatattttttttaaattttttccttatattattttatgttaattttaatacttatttgaattttatttttataatttattctaactcatatatattatttttttctaaaaaaattttatataattttttattttgaattttttattataatatttaaggtatatttttttttatttaataagtatatttttttttaagaatatagattagaagaaaaaaattacaatttaatataattaaagatataaattttatataaaataataattattaaaatacggtgattttacaaattttggttggggtaaataaaattttccattaaaaattaggcagagagaatatgagaggagagaagagaagagagacgaaagaagcccagaaaaaagcgcgggtcagtccgataaaccttgggaagctctcgtttctcctgacctttcggatgttgtggcgatgtcatcaatggaaatggcaatgccaatgccaattccaatgtcaatgccatggcttaactgtgcaactgcaaaaccccttttcttccatttttctaaatttagtctcttttctctcttccaattccaaacccaaactcaccaccaacggatttttgcaaaactcttcatgacatgggttatggttgaatctccttcttcttcttcttcttccactccatcgtaacatatccactttcctcttttgggttcttccctcttttctctcatcttctgaagagaagagaaaagaagatggagcatcaccttctttttgggctgtgggttcttctctctggagttttcgtcactcgggttttctccaaaaccaatgccccagatggtaatgcgtcttcaatttctcattttcatattttcaatgtagttcttatgtccatttccatttattcaggatgcatgatttagatattaagaattagagattggctgctgacatgtttggcatgcaaatgttatgcaaacatttcacgttcttagaatttgtcagataggattgaaatcatgttacctttataatataatatatatttattgaatattctaaatgaaaaaaattaaatggagagaggttcaacttgaattcacatctgcaaatagtagagaaacaccgggaatttttctattccagttttggtgtggggtcctgtactcgccacaccagtgttctgttagacaaaagaagagaaaattccttatccaagggccttaaaagctgttattgaactatcttgtgatgatttgatagtattcatgatttttttgttatcagtgtgatgtacattagcacttatgttttgatcatgtttagcgttttgattccatatttgctcaccttttcttacagtctctgctcttaatgtgatgtatacaagcttaaactctccttcacaactaagtggatggaaatcaagtggaggtgatccatgtggtgattcttgggatggaatcaaatgctcaggcgattccgtgactgaaatgtaataatcttggaattgtgtgtttctttgacttcagtttatttagttttttttgggtgaatatagctcaaagtttatatttaaggacatctaaaatattcagttatgtatttcttgttaacaatgttgcagaagcctgtccaacctaggactttcaggatcaatgggttatcagctttcaagcttgacatctgtcacttacttgtgaggcccagttttctgaaacatatacttatttttctaattttgtctattttcttggaaggacatattataaagactgtgcctttgtttgtcatagtacagcgatttgagcaagaacaacatcaatggtgatataccttatcaacttccccccaatgctcagtacatgtaagttcgcttgaaagagtttcttacatggtaacaacttgttaagagaatggaatgtaattttgtaaatgttttcctttccaatctccagtttttgttatttttattatcatcatttcattgttcgtgatacctgtggattttccatggctttgtatttttcttttaaattaatacgaggctgttttgtttatttttgtctttaaaaaaacacgtaaacaacttagcaagttgtcttgtgatttttcaaagaagacatttgaataacttctttcattgtgctcatgtttattgtctaatgattcttatcattatttatgattaataagagggtaaatactattttggaccctgtgttttacaaaagttacagattggaccctgtgtttttttaaatgacaaaatgaaccctgta

SEQ ID NO: 27981 - DNA, 1019 bp, Cannabis sativa
gtggagttcgtggtagcccttctttgggagtaatggatatttgagagccttattggataagagtattcttagtaagtattagtagtatttagtatcatttagaagtggtgttttatgataagttagtgataaaattattactttaaattatatgagatctaatacttaattgtattaatcgcgatatgacactgaaaaaaaatactaagtgctattagtgtctttttcattcaaaaaaaaaaagtgctattagtgttttttagcacttcttattaggtatgttattctatatgagagggcattggccatcaaccatcttagggacagtgtataaactccagttgactactcgtagtctccgagattgctattaaatttaaatccaaggaatgaggttaggatgtgcactgccttgaaaaaaaatcttttgcaaattaatattcctcatacactaaaatttatgtaaataaaaatttttggaatctaagaaagttttgtaaattatataatgtaaatatttagtattatttgttaagtttaaaaaaattctaaacagtttaccctaataaaattaaaataaaaatattttgttgactttttttttacacgtgtagtaagtaaaaatatttagacattactttcaaaaaaaaaaaaattttgaacattatttttactattataaactatttgatttttattgaactatatatattattgtgcctttgaaatttttagcctgttataaatagttcttgaactatttacaatgttataaattggtcattctaatttcgggacaaataaaatgatgacatgactgcttagttgtcacatcagtgtcacatttataatttaacattaaaaaaaattatgcattttctaaaaaattattaaactaaaaatcaattaataattagtagaattcagtaaaattaaattattttttaaattaattatatatatatagcgttgatgtaacactgaataccttcattaaaaaaatatttctaacatgtatt

SEQ ID NO: 27982 - DNA, 5102 bp, Cannabis sativa
agggtccaatctgtaacttttgcaaaatacgtccaaaatgatatttaccctatatattaacataattacaatttaatatattaattctagttattattttaaaaagtaccttaaaatattcgttgcttttgcctacattataggagaaaaaattaatttcacctccattgacttatcctagtttaaaggaaagataatatttttaaatttttaactaaatatgtaattagagatttgaataatataacaagtctaaaaatagaatactaatacatataattaaacaaaaatctattcatttaattatatacataaaaaaataattggaaacaaaagattctaattaaattattaatcgggtaattaaactatagaatcttgttatttatctctttacaaaattattgccttaaattactcaataaattaatgatgatacttaaaataatattaattataatttaggaaaattatatataaaaaaagcaaaacaaaggtcaacaccctttccctttatattcaatattttttattatatatataataataaaaacaaaaatcaattttgttatttatttaattttattgttatttgaacccaaaaaattatcttatgccaatttcagtcctggccaatttcatatccaaaaaccctgattctgaggtctaatctctaccagataaaaagctcaccttttttactcaatcccaaaaaaataaaaaataaataaatataaacaaatttatctaaaaaatctccaacaaacaaggtgttatatatatatttatatacttacaaaaattcattgaaaaaactctctattatatattcatatataggtcccaatcctacatatacatataagaaaattctcagttgattataacatgtaaaactcttcacaaattttttgtatatatatatacacatcttcatattcttcataatcatctcattcatcatcaaaatcaaaaaaaaaaacataaataatgattatgatgaagaaaaaaaatcccataatctcaaaattcattataataatctttctccttcctctcttagcttcatgttcatatcaaattcaaaaccaggtttctctttttcccattttcaacattaattcttgtaatatttatatatatatagttttttatatatatatgttattttatttttcaggtatatgttgtgaacttgggagaacatagtaataacaacattaatggagtagcaaagacattgagtgagattgaagagaatcaccattcatatttgttatctgtgaaagagactgaagaagatgccaaagcttctcttctttacagctacaaacattcctttaatggcttcgcggctctactcactccacaacaagcctctaagctatcaggtaaaaatacccgagtttttattatatgcagtgacggaatcaggattagaatatagacattgatattgattatgtatgtaaaagtgttgtaataggtagtaatgattatgttatgatatgttataatagaacattttcaccatatatatatgcagtgactgaattaggataaaattaaatataaaggccttaaaaagttgggctagtgaatagtgatgaccaaccttgttattgatgatgttatgttatgttatattatgttataataaaacatttttattatttatatatattcagtgacggaatcaggattataatataatataatagaaatattagaacttatacaaaagagaataaaaagttaggctagtgatgaccaactttgtttttctctttctagctcggttattgatagtgttatggtatgttataataggatattttcgttatcatatatgcagtgacggaatcagaattaaaatacaaaagaaaaaaaattaggcgagttattacaaatcttatttttctctttctaactcggttattgatgatgttatgttatgttatgatgtgtagaaatggaagaagtggtgtggatttcgaaaagcgaaccagacaagtacacaatgcatacaacaaggtcatgggagttttcaggattagaagaaaatgaaagaattgttaactctaacaatcatttcggtcatatgcctgccgatttgttatcgaaagctcgttatggcgaacaagtcatcgttggtctcttagacagcggtaacatacattcgttaccataacataacataacacaacataacataacataacataacatgatgatgatataacaatgagaatatgtatatatatatataggtgtgtggccagaatcagagagctttagtgacaaaggaatgggaccaattccaaaatcatggaagggaatctgtcaaactggacctgatttcaattcatctcattgcaataggttggtaacatacctaaattaattaattcatttatataaaaacacacatatatatatatatgaacttatattctatataccttttgctttaattataacactattcattgtttggcataaattaatgtaacactattcatgttgtcattaatgaaacattttgtataataattatcttaatatgattgattattattattattataattttcaaactataatagtgtttgtttaataattgatagtttttgtcttagaaaagatagctcaccataacaataatgattacaacttttgcttaaatattagacaaataagagagttttcctattgataaatgggacctatagtgatatatatctatatatatgtatatgtatgtatatgtttgtatagtttgattccaaatactcataatttatctaagtctaaagaaggtgcagtagtcattgtcaaacaccacttgcttgaccttgtaagaaatacatagtatattcacgtgtgaagtttatgcttttgggatagaaaagaaagaaaatatatatacatatttatatatataaatatgtatatatatatccaaaaaagtaaacaagacatcataaacattaaagttcatcttagacttgaaatgttttttctatatatgcttagcattatataatagcttaccatcaagtatcattatgaattattatttggttgatatcttagtttagttagccatacatataatgtatatatatatatataaataattatatgtatgattaattggacattttccaatgcaaaaactaagactctgcatactgtcctacaacatatcatgtttccaagattatatctctgcctgcaatggtttttgtgttatgttttattacatagtgtaaatattattttagacttgtgttttgtaaaagttacggattgaatttttagttttgttaaatgataatttggactttgtattttacaaaataatcctttaaattgattttttgttaaaataaaacttaacaataacttaatctagaggtattatgacaaaactgattatgttttctatatctgttcggactaggaattatcttcaaactagtaatattaaaaaaagttatcgaatattgagttagcgttctattttgtactattttgcaacatacagagcctcttttattattgtttaataaaataaaagatcttcttgtaaaacacaaactctaaaatagtattgatcctattatatatgagaattgctattacacattagacactgatagtgtccaatattgatactttacaagtggttagcagttttttataataccgatctttgtcttgtacatacacatgaatatataatgatatatatatatatgatataatgagagttgtctatttgtataaggacaaagtaagtgattaatgagagttttggcttgttgcaatattaccccatcttgtgaactttcaacagtgttatatatgtattcctattaccctatgcattgtatatatatacatcactctattattaaataatgaccaaaagcaggctctacatgtttctttctttctaacttttgtacccttttctttctttgtttttatttataattatttctaagtcaatagcttgtgtgtaaggaaagattcctaattattgagtattaattggtcatcacaaatggccaatagctagaattttctttgaatattttcttttgggaaagggttatgaatggggccatctcttttttgttatgtccaaggaatgaaatatccatattttctatcgatatttctaaactattgacaccagattcatttggtttggtttcaaataatttgatctaattgtggtttatatgaaccgcccctttcgaaatatccatgatattttttaaatatcattggatatttcttatttttaaggctcaatattattgagattaagattgtttaattaataattttgaacttgttagaagttgtaacactttattcatttgtgaaatatgttaataaaaagttaaattagtatgatctcatgtaattatttcaactaattttctatgttaaattatgaaaataagcaagttttcatattaatttacacagaaagttaattggagcaagatattacctcaaaggtttcgagcaatattatggccgtcttaacacatcagaagactaccgttcgcctcgtgacaaagatggtcacggtactcacactgcttccaccgtggcaggccgaactgtacacggtgcctctgctctcggtggctttgccaatggcacagcctctgggggtgcaccattagctcggttagccatctacaaggtatgttgggcgatacccgggaaacaaaaggctgtaggcaacacatgttttatggaagacatgcttgcagctatggacgacgccattgcagatggcgtccacttgatgagtatctcaatagggacgacgaaacctgttaactatagcgatgatggcattgctattggagcattgcatgctgccaagaaaaacattactgtggtttgtagcgctgggaatagtggccctggaccgggcactctgtctaaccctgcgccgtggatactcactgttggggcgagcagcgttgatagggagtttcgcgcacctgttgtgcttggaaatggacagagaattatggtgagcataatgaaaaataacaatagcctacata

SEQ ID NO: 27983 - DNA, 1288 bp, Cannabis sativa
  modified_base (317)..(331): a, c, t, g, unknown or other
gaacatagcgggtattttcacaccctttagcttccctttttataaatagggttgaaaaaactacctctaaaggctaatattgtagtagtggtacaagtaatatttatttataaatagctattattagagcagaatctagggtatgtagtttgctaattggaattgtttctctctttgagggggctccattttcaccctatgtatatacattaattgcatatttatagtatacaataattacactaacatcatcttcatcatcgatcctaaccactaataaattttctatagggttacatatatatataaatatatannnnnnnnnnnnnnnatatatatatatatattgacaaaacgatttggatggtccaaacgtttcacaattatagctacccaagctagctagcaacatattcagtattttgatcattacttaaaaattaggattaattgcagggaaagacataaattgtattttatttacagatatatgaccacttattaaatttaggcatataccgaatatcatccatcttaaattcataatccgtatactctatacattcaaataacaatatttttctttttcttaatggttgtctctctcctctcttttaacatatgttgcttttggtattggtgttgatattgttattattattttttttaagatattcactttttttttattagtttattattttattagttttgctatttattatcaatctctcccctttttataatttgaaaaatctttttcagcttacaataattattcaagctttaaaattgtattatagtctttttttttttttttatctttctttattttttttttaaagtttaaaaagtatttttagtcacaccatttattatttagactcaaaatttacactattacaatctatttttcaaggtgatcattttaacatgtgagaagcatatatttttttgcctccacaaaaaaaaaattacttaaattaaaaataacaataaagtatcttaaataataaaatcattatatttagttaacataattaacttaaaaatttaaaaagtaaaattataattttaaagttaaaaattaattttttactgtcttcgaacgaccaatattaaaagtaacttttttgtttctttcttatattttgtaacaaaaattattaaaatcttagagttaataaaatttaacatatcaagtaacatcataaattgctataaatttttttgttatgttgtatttaaaagttacgatatagtaatagtatactgataacaaatttat

SEQ ID NO: 27984 - DNA, 2985 bp, Cannabis sativa
tttttttttttgagagagagaatattgttcatacaatttttgttttaacattattttttgataatatttttcgatttggtggtggaagaatgcaggaacatactcaataaattgtctcatgttttacttgtttttgttaagcgttctgcgaatcgagccgcgtattttattgcccggaattctcgtaccttagctgaatgtatgtttccaattaattgtgtgcttatggaattgatgtctattcttatgcgattgctcttcttaataaagcaattcaaaaaaaaaaaaaaatactgataatatttttcttcaaattcaatctaattcagtcagcaattaaatttaaaaataattcatttaaaactaaaacaaaaatactgtcaaataataaaataaaataaaataaaataaaatattatgaaaataaatacacaaaacaattaagcgttacaaattcaacaaaaaaaaaaatagtaaaaatataattaaaatatacaattttatttttaaatattttttattatatataaattaatataaatatttttttaatatatattaaatgtaatcgattagatccgttttcaattacattttgagattgattatatcaaataaccaatgcaaattaaaattcatctcttaacatccaatcgaatctatgatatctattttttataattagattgtatttgatcgattgaattcaactgatcaattagattagattaggtcttatccacctctacttataataaccctacttttctttggttggctggacaagctttctagtgttagttaggtaattagtgaattttaaattttaattctaaaaaattttattaacatatatatagagaaataagttttagtaaattttggagaagtgttttctatgaagttaaagagatggaaagcagaaaacaatggcaaatggttaatggagttgtcttatcatttaatacgaaaatcaaataagatatattaaagcataatgccattcatattttggtggcacttaataaagagaacctcactcaaagattagaaaccaaccaaaaaagatgtcagccttgctgttcttttttgctccactcaaactaataaatatcctcatgggcatgcattaggtagtgtgccagttatattatcagctttattatttccacagaatgaaaaacagtgacccttcattgttatctatggaatccagtgactaacatatataacaaaagtcagattccctgtgaccctcttcttagccacccaaattaaccacaatattcaaaatagtgctttaatataagctttaattaaaacaatattgcttctttagctcccaacacactttacatattgttagtacactttattagataaatatataatatatgccttaaaatctccatccactttttttttttttttttgtgttcctttcactacaaacaggggcgaatccacgtagaaagaacgtggaacagttgcctcgtttaaaaatatatatatatatatatatgcattttagttagttctaacatatatatatttataatttaaatgtataaaccagttttagtttaatagttaagctagatagtatataggatagaggtgacgggttcaaattccaaaagtttacttttgtccctaccttactaaaacaaaattacgccccctcactttaaatcttaagttcgctactactataaatttattttcttttttatatttacaaaacatcctatcccacaatttgagaatgtgattgacacgtaaagtttacagcttacagcagaaagaaaaagtagaaaaagtgaaagcgaaaatgtaagctagttcaactctatgtgtaaataaatatgttaagcgcttcaaaaagaaagaaaaattaagccctagatttacagttctcaagaaaaaatttcaagtagcgtactgcttagctttacctccagcattgtcaacagtgcataatgtcttccatatatcaatgttgaagaagtatgtgccagatccaactcatgtcttaagtttcgaagctttagagctgtaaccagatttatcttatgaggaatatctaattcaggtccttgataggatggatagagtccttcaaaacaagaccactgctttggtcaaagtactctggaggaaaaataaggtagagaaagccacctgggtgttagagtccgacttgagggctcattatccgaagttgttaaggttagagtttgaggaaaaaattcttttaatgtgggaataattgtaatgaccacatatttagacatgaaaattaacaaacaatttgtaatttattagtaaattaattaatatttgtgattatacgtgtattgtattagtataaaataattttattgtcagaaataggcattagtgatataatttttcaattgcggagatttttttgaattctaagtatgtcatgcatgttatttatgaattatgatattttaacagtagaattcgacgatttggtcattatagtcacttcaatacaatttagaagcttagaattaacaggaaaagatttatggacagttagaatatcagggttatacaagaaaaatgggtatggccatttaacccctagtttgagaggttacttaaaagcaaagttaagtgtattacggtaatttaccacataagtttgattattattcaatttagtggataattgtagtaaatggaggattttatgttgaaatttattagaataaattagaaagaaattatgattttccgcgtttaactcttgtaaatattaattttatttacaagtgttaaacgcgaaaaatcataatgtcacatttttatttattacttgaaaatgttcacaactggccagttttcgtacaaacgacataataaataataactaaaataattgcaatataaatttaatagcgtataaataaataaacagagcgtcctagaccgcccgcagttatatggctctca

SEQ ID NO: 27985 - DNA, 2191 bp, Cannabis sativa
aggcattctttataacacgtaatagcagaacgattatttctggaatatctataaagctttcccattaaaagattcatctgcaagtttcttcctttgctgatttgctccatctgcagagtaataggaatcaaacaaatttaacctattaaggagtaaaagaaaggaaacggctactgacaagttaaatctatcaaattccatttagagtcttgatatttcacaccagattatcaaaactgaaatactccatgcaatacaaaagaaacaagttttcttactttaaaatgtgtgtaccgaaaaacaagtctcacatttctattttctcgtattattcccaacaagaatacatgagtgtgcatacctcggcaagtgcttgtctattctcatttatcgcacaatggcaagatgcaactttgaatttcacctgtcaaataaacaacggaaaagaacacttctttatgagttataatcttttgcactaacataacataacaaataacactattatgctcaaacaaggagaaaatataaaaaatgtatgaaataaacaacctacctcattctcattaatagctgatacgttaaaagaattgggagaagaggacctgttcgacgataacgtacttctagaactggttgaattttgttttgcaatcttgtaatgttgcaatgcttgcttgtacgtgtgctgtcaacaaaggaaaaacattacaatccatccatataactcgaagcataaaccaaattcatgtataagtgacattcaattacagagatccatcttaaagcctactgccttaatcgatgtaaattggactagagtagttattaaagcatactgccttaatcaatgtaaattgaattggagcagttatagcttaacatctataaaacttcatccaaaaactcttcaaaaccttatgacataataatagcatgaatactctctctctatgaaaaaaaaataggtgagagcatgaggtttgctccattcattggggcatttcttgtatttggtatgtagagaaattataaactaatttttttatatgacgatgtaaattatagttataataggcattctatctgttttctaaaaattaagaataatttaaagtgccgaaaataaaagccacttagccttcagttgcacagtgtttgttttattttacgcacataaaacagactattttgaattttatttttgacaccgaaaaagtaatcagaattgggatataacaactatgaaaattagaaatcaccctacagtaggagcaaatcccctatatatataaatataaattgcgctgatattcttacaattgctcggcgatattccctctcacgaaacaatgcatcacctaacagaacctgtgcaaaaaaagtaagaaaataattaaaaacaaaaaacaattgaaaaagggtaaagaatacaatacagaaaaagggggaacgaagttcaagatccttaccaagctttcagctttgaggtgtggattggtatcggcattagcagcaggtgaggaaacaagaaaacaactctattcaaaaagagaagaagaagaagaaggattagcttttataatttgaaaaataaaaagatcgaaaatagtattgaatcaaggttgggaaaaagaaagagaaaataatacgagcatttgagctgagttgtagaggccgaggtccataagggtcgcaatttgatctttgggaacctccataggtgagagatggaggtcaggtatagaaaagccgaggtttgttggggaagaagatgaaagctttgaacctatttttgctgtcactcactaaacacagtgaaaagaaactctttttctcaaactcaaaccccaaccaaccgctctcgtttgaaaaccccttcattcaatatcaattcaacccacttttcttttctaaattatctcttacacccctcaattattacataataataaaattatacacacccattttattaatatttattttatataaaaatagcactgatgcactctttatctgtttcgttttagaaaaaaaaaattaatttaattttttttcatattcaggtacattatagttatttaatatatcatgcaaaattttataatttacaatataaaaagtagtgttcaaataaatagtcacgcgtacaacacaatatttaaactatattttcagtatttttttt

SEQ ID NO: 27986 - DNA, 1937 bp, Cannabis sativa
atatatactacaatatatatcttagaactttaagcaattttactttagaaaaattatcatgaagctaaattgtaagtatatatatttatgaatattaaaatatgcaatttttatttttaattattatgacgtgatgttttatatgaattttttatgcacaaacgacttggccatatgagtgaaaggatttgcaactacgcgcaaagaagaagttcattcatttggagaaaggtactatatcagatccttgtgagcattgcttatttggaaagcaacatagagttttatttaagagttcctctgctaagaaaaaagaggtattgcagcgagttcactctgatgtatgcggtcccatagaagttgaatccttgggagtattttgtaactgtcatagatgatgcatcaagaaaggtgtggtatatgctaaagacgaaagaccaagtgtttagatttttccaacaatttcatgctatggtagaaagagaaattggaaagcagttaaagtgtcttagaacaaacaatggaggtgaatacacttctcatgagtttagaaactattgctctaaacatggattcgacatgaaaagataagactaggaactactcaagataatggtgtagcagaacgaattattcgcaccattatagaaagggttagatgcatgatgagatcatccaagctaccaaagccattttggggagcagcgctacagaatacatgttatatgaccaataaatctccatcagttcctttgaagtttgatattccagaaagagtatggacaaggaagatgtgtcatactcacatctaaaggtgttcgactacaaggcatttgtgcatgtaccaaaggaacaaaggtccaaacttgatgataaagtagttccatgtatctccatcggctatagagatgaagaatttgggtataggctttgggatccagttaacaagaaggtcataagaagcagagatgtggtctttaatgaagatcaaacaattgagcgcaaaagaaaaaaaaatgttaattagaaaaggctgaaattgagttatttcctctaaaacaacaatggtcagatgatgaattgtaagaagttgctgagatgacccatggtgatgatagtgatgctgaagaagacgtaccggcacaagaagatatcaatcaaggggagcagtaccagcaaccaaaaaataagcaacctcgtaaaaggtcagctagaggactaattccatctaaaagatatccacggtcagagtatatccttttatctgaaaagagggagccaaagaactactaggaagcattggctcacaaagacaaagataagtggatagattccatggatgaggagatgaattcccttacgaaaaacaacacctatgagttggtaaaacttctaaaaggcaggaaggccctgaggaataaatgggtctttaaatgatggacatgtaaacctggtaaagtacagagctcgattagttgtcaaggattttggtcaaaagaaagggatcaatttcgatgaaatattttctcttgtggtgaaaatgtcatcaattataatattctttggactagcttcgagtctagatcttgagattaagcatatggatgtaaagactacatttcttcatggagatttagaagaagaaatttatatgcagcaacctgaaagttttgaggtgaaaggaaaagagcatcttttctgtagactgcgtaagagtttgtatggtctaaaataggctccaggacagtggtacaagaagtttgattcattcatggtggatcaaagctataagagattagctgcaaatttatttgtatacatcaagaaatttgctaatgagaaatttgtcatcttattactatatgtcgatgacatgttaatagtcagccaggatggtaagatgataaatcagctgaagaaagaactatcaggagtct

SEQ ID NO: 27987 - DNA, 3121 bp, Cannabis sativa
  modified_base (580)..(583): a, c, t, g, unknown or other
gtctttcgtataacgtacatgatagggaccagctaaaagatcctccacccctctgcaaagcctggtagtggagaccaaatccacatgtattagtataaactaacacccaaccatcactacctccactacccacctgcaatgcttattttgtaggtacaaataagtatatgttttaggttttaggaccacttgtaacctggggccaatagtactaccataaataggacactctttcatgagagaattggccttttgaaaaaatatatcttgtaatctctactctaaaagagtattttattgatcacatttaaaagagcatttgcaggagaatgaaatgaggatttagtaaaccatttttacaaatacttgaaaattaaattgttagtttagatagcttcacatatgatatatactctaatttgacaaatgtatgaattttcttataaaaacattattattattgttatgatgttttttcattgtatattggaaatctaaataataaaaatgcaaggggagaatcgcaataacatttgtaatttctcctttacttcatattgtccatcagtttataaccgtnnnnttaagtagtgtattttgttagttatagtccgactaaaatctttcccaacaggtgtaaactgtcatttaaagtgacttttctcaatggttataaaccgtcatttaaagagatgttttttatcagttactacccgatgaaagttactacctgatgaaagttactacccgatgaaagtctttcccaatagttataaaccgtcatgtaaagtaactttttccaacaattcttaaccgtcatttaaagtaactttttgcaactgttataaaccgtcatttaaagttacatagccaacgattttaagaaccgttggaaaatagtataaatgacagttacttataagttggtggtaaaagtcaattttatagtagtgattaaaaaaatgatacaatacaaagagatcgaaatagactctcaatttcaaaaagtaaattgtgacattgtctctttaactaaggacaaaactttcttttagatgagaagaaaggttgttactcattgcaacctaaaaaaatcgcaaagcaaagtagaaacacaaacaaaaagaagagtgacgcaaaaagtgaatgctcaaaaaataaatagagcaagcaaaaggcgaatggtaaaaaaagtagatcaaagcaaaagcaaacgctcaaaaaaaaaaaaaaaagagcaagcaaaaagcgaatgctaacaaaaaaaacaaatagagcaaagaaaaaaaatctaatgctcgaaaaataataataataagcaaaccaaaaagctaaagcgtagaaaaatagattactgcagaaagctaaagctcaaaaaaaaaaaaatgagcaaagcaaaaagctaatgctcgaacaaagcaggaactaaaggcaaaaagctatgacgcaaagcaagaagctaaaatgcgttcaaaaaaatatctcaaaacataaagcttaagcatggagtaaagaagcacaaatgcacaaagtactttttcgaactacgaaaggctttatcccgtcaaaggtacgtaggcaatctaaaaaaataatagatgcagccaccaaattaaaattttaaattgctctccctaaacttaaagacaaatatgcaaagtatttgtcctttcaaattaagagtggttgaataagaaatctataaagagacgtaaaaaagtttaaagttactcgagcatcacacatctcgataaattaccacacgcatgctgcgagggggcatctgttgaactatttttttattattaattattataacaaaagaaaaataataatgataataaagagaatgactcgttcagcaacataaaaaaaggaaaaaaatattattaatataatattttcccacttttctctccactaacttttaactgcccaccactcacttatccattttctgatcaatatatcgtacaaaagagtgtataaaaaaaatcagacaaaagggagaaggagaaaagaaagaaaagaaaactgccaaaatttacagagaaatattacgacaaattttggagtattgatattctcatcttcaagagatctctacagggtaagtattgaggggttgctcttacttttcttttcacattaaacttcttttcttctccaatgaattcctcacagacatttttatgattcattttgattcactagatttcagaaaataagtcaatatgtagtatataatcaaaaggaaaaatacaaatatctttgctgttattctgcccaatttttccaagatttttatattgttctttgattccctatacttcagaaaataagttaatatgggagtgcataatcaaagaaaaaaaataaaactcttaaataaataaaattgttatgctgccaaatttatctttacacaagaagactaaatgggtaaaattttacagcattgaatggcataagtcggaaggttatttgactctatgggcacatttcatgaaatatatatatatatatatatatatatatgcttttgaaaataaaagaattttgataataaaaatggctagtgatgaacaaattatatgtttcactcagtcaaatccctcatatatatatatataccactttctggataatataatagaaagagactgagtatatacattgagactaaagagaaatgtatatgaatatatgctgataagatgttacttggatttcataccagtgcatcgatttggtaagataagaatatatacatattcataacaaactttatatatacattcatatatatatatatatatgggacaaacgtgatttttttccatttatatactcactgtggtataaattaaaataatgactttggcagtcaaattacttatcttggcccattataagtgataatgaaatattcatgctttgttatatgcatgtatacgatccagtctaaaactttaaaccagaggttgagaaggatatagagatgaaattaagactcgccaaagaaagatatctatatatatctattctatataaaatgtgtctatataactaaattcttagtttatgagaaattcgtgggtgactttttatttatatttaa

SEQ ID NO: 27988 - DNA, 2956 bp, Cannabis sativa
  modified_base (2879)..(2879): a, c, t, g, unknown or other
aattccaaacagttactaaaggttgtaaagttaagggtaaagagccactgaaacagacagtaatcaccaattcgtttaatgctcttgagcaagaagaagaagggtatgagaacatggtagttgatagaggcaagtcagatggtttacaagagcgtaataaaagagaggggggagaaccctctcttgtcaatggatagaatcatttgttggaacgtccgggggattaacaaccagcaaaagcaaatgagtgtgaagcaatttattgcaatccaaaaggctggtttagttggtctcctcgagacgagggttaagcctccaaaacttggagacttataccaaagaatgtttttagggtggtgttttacaacaaattcagcttggcataaaggagggagaataatcattgcatggaatccacttctttgcaatactagtattatcaaatgtactagtcaattgatacatcttcatattgaaacggtaaataaaaggtataagttctttaccacgtttgtttatggtttcaatgagtaaaatgggaggaagattctttggaatgatttgcgtagtatttctattcaggatacatggatagtttttggtgattttaatgatattatctttaaagaagaaagaattggagatagagctaagataggaaactccacggcttttcttgacagtgtgagtgattgtcaactaacagatatcaatagtagtggttgcttcttcacttggaataataaacagcaatcaaaagatagaatctattttaagattgatagggtcatggctaatcaatcttggatggatctatttgagaaggctgaagctgtgtttctcacagaaggagattttgatcatactccagcagtattgaatacttattataatttcccaagtggcaaaaaaaccgtttaaatacttccgtatgtggacttctcatccaagttatcatgtggaagttaagaagatatgggatcaaaaaatggcaggcacaagtatgtttcaggtagtatcaaagcttaaagctttgaaggttttctttagaaatctgaataaagaacactactcggacattcatgtagtagagaaaaaggcaaggcaagaacttgagaaggtgcaaagcctgttacaccagcagcctttgaatgagcagttgcaaattcaagaacaagaagtaagagaacggtttgtcaagattcataaagattactgttcttttgtgcaacagaagtctagattacattggctcaaagagggtgatgaaaattcagcactttttcattcaagcatcagagagagaaggcagcacaataatattctatctatagtagatgcgaatggaacaaggcatgaagatccggagaacatcactaaagctttcttagatttctacaaagaattattgggatctaagatggtgaatagattgcctgtgaacatcagcttagtcagaaaaggaatatgtgtaactgaacaccatagtcggattctaaatgctgcctacacaatggaagaattaaaagaagctatttttggcataccagtagtaaaggccctggggccagatgggtgcaacaactcgttttatcaagacaattgggacttagtcaaacaggatgtctttgaagtagtaacctcatttcttcactcgggccacttacttaaggagctgaattcgacgataatcaatcttgtgccaaaaagtaaatgcccgaatgttgtaagtgattatagaccaatagcctgttgtaatttactctacaaggttgcaactaaaatgatttgtagcaggttgaagcttatcttgccagatattatagctcaaaatcaaggagggttcgttaaagggcgattcattgctcataatatcatggttcgccaagatttaataaggcactatgggaggaaaaatgctaaggcaaactgtatgattaaacttgatctacagaaggcctatgatacaatggagtggagctttttagaagaaatgctacaagcctttcaattccctaattcattcataaagctagtaatgacttgcatcactactcctaggttttctcttctctttaatggatctttacatgggttttttgaagcgaagagaggacttaggcagggagaccctcctatgtcacctttactacttctttttgtggtgctgggaatggagtatcttagcatgataatgaagaaaataggtgacacagaaggctttcagtttcattaaagatgtggggatttaaaaataaaccacttgagctttgcggatgatgtattgttattttgcaggggtgactttaaaagtgtctatttaatgctaaggggcctcaaaatattttttatgacctcgggattacaacctaacaagaagaaaactgcaatttattgtagtggcatgcatgagagtgagacaagaaggctggtagatgcttcaggtttttagaaaagtaagctacctttcaagtatcttggagtgcctatatgtgccaagagaatttcattagttgaatgctctattctagttgagaaaatgactgcaagaatcaaagtgtggagctcaaagaacctctcttttgctggtagaactgtgttaattaactcagtccttctttccattcatatgtactggagccaagttcttatcattcccaagaaggtaattaaagagattgagagtatttgtagaagctttctttggtcagggagaagtgctatgaatggtccaggcaatatagcttgggagcacttgtgcaagtccaaaaaagctggtgggatcagcttccaagacattgctaaatggaatcaagcttcaattgcaacacatgtgtaatatcccagaaaataaataatatttaaatggacatattttnttaaatatgtaattatttggaaaacgaagtaggattatgatcttacttagatgaatttttgagaaattaattaatga

SEQ ID NO: 27989 - DNA, 3473 bp, Cannabis sativa
ctttctaaccttatacttaaacctcaatagaaagaaaaaattcagagtactcaaaacttaaatccatactttatctgcagaatcaaaccataaatatgtgtgagtttgatagaacattccaaatacaaactcccaccaaaccagcacaatcttaaataataccacatccatatatgagcaacaagctcctaaaaagccttaagtggtatatccttaatgatttgaatcacacaaaatatagagtttgtccttattatgttctatagacaccttattactctgaactttgttttaataacaattagctctaagtcaatgtgcctttgaccttatagagttcatgttgttactaaaatgcaacttgatggatttattgtcacagcatatatctttattagctttcaataccattcctaattttgcagccatatgtgacaaaaaatctcataactaaaaacttataagatcagaatcagaaatcttaacaatctccaaaatttttggttttctaatttctgataagtgaacatatagtattttattctccttaaatttcttatagcccatttggctgcatactgaaagttccttatatggttacttaaatatctatccaacattcttaatatgcatattaagtataaatacatacatgattgagcatatattatattctaatataaattaagaatcttctatattttttgaattctaaggtttcttttaggacaataacttagacaatttattttctttagctacaagcctttcacctagtacaatatctttcatgccaaaagtttttaatactttattgatatacctcttttgttataattcatgaatatctcaagaacaatctcaacatatcttgaattcctaatacaaaattagtatatcattagtggcaagtaattttttaccaatatataataccaagatcatattcttattcccactgaacttgtgacgtatacacaatcatcaaaagcttctatctcaaaacaaaatgagaatacttaataaaaaattgtactattgttgacgagaagcttacttgagtctgtacatggatttttctaatttgtaaaccatattctttagatataaagttttctagttgcaccatataacttttgtcatcaatattaccattgataaatgacactttaataatctatttgatataactcaagatcataatgagcagtcagtgtcttgcttgtcctgaaatagtctttcaattaaaccaaaagaaagtctatttaaaataaatatatgctttatgagtaattctttacatacaagacataatgtgcatctctccacattgcaatttacattcctcttgattataattattaatttataactaattggttttacaccttataggaatagaaaaaatacaaatctttattgtctcacattaagttatacttcttatttatgatatcaatccagtttcgagagttggaactttcatggcatgataaaagttgattagatcatcgtcattcattcaattatttccttatatcctttctctcatggattcccttaatgacactgatctttgaggttgttgagtttgattatctgaaacatttaccatatcttgaatgggaagttatttgatattgtcttttcacggtcctggactcacttattgatcaatgaaagtcatggaaacctaaaaactatcaaaagtgataattagagttaagtttaacgtcaattcttcctcaagaacaacatctataataatcttatttttccctcaaactcaacatactcaaaataataataaacttttctcgtttcaaacttgaaccttatagtgtgggatcaaaaaatttgtagctctttaattactagagtatacagtaaagtatagttccttactgtttttgagtccatattccttttatgaggcttataagaccttatcttagttgaacatccacaaatagaatatatccttatgttagactataagtctaaccacaaccttagtttataaagagttttaaattatactttacttgatgcacagttcaggatttatgttgcaattttaagtgtttctccctaaaatgagtttcatgaagaagaaacacactcctagctatttccttatataaatgttaattgcatctctcaaatacccttcatgttaggtttgtctaacattttgtattggaaaactaaattacatttctttagtagttgtgcaaaataatcttacatgttacttgatttgtcatacctcctatggcaatttaaccccaatatagttagttttgacgactttaattttcttacctagttaatttgtcaactatggtcttgaaaattaaaaagaaacaacacctaaagattaatgtccttatcaacaaaataagtttcattagtctaaagacaagatactatttgttatcccaatttttgcactctgacgtggcatcatatgatggtgacacgtgaaatcaactccatgtatctgctcgcaagaaatatgccgaacaggggaccacctatattcgctcgtacgaagccctcctaacctggcagtgagcaatccacgcagcatgccaatacttagcaaattcagctctcgcatcgtgagtcaccgaagaaatccctacaactttgggattagatcacagggatatggcatgctgtttgaatcccttgatcagtgtattttgtatttaatacgcaatctttttgcttataaattagactcactgttgttggctaaaagcgaggttaacattttggtgctttcattgacagttgaactcaaggtcattctcaaatctaatcacaagtacaatggtggtacagactcgcagaggcgtggttgatctagcaaatccacgggcagtggatcctacactgcagaacatagggaatacgagggttccgccaaccataaatcccgaacagccatcaactgcgggtcacgctgtgacgactcctgtgagtgagatcgtgcctggtgtgcaagatactgggaataccagttcagcagccaaccacgacattcctagcactgtcgttctgcccgtagccaatgttcaaacaaccattggagattacactaaaatccaaaacctccgtgctgctcttgaaatcatgcaaggtcataccaacagcctgcatcatgatcaggaggaactccgcgctgcagtaaatctcgcatttgaagagcagaggcatatgttcgctgagtggagggacaaggagatggaaacgttaagggcttagcaagcagccattggcgatcgaacccggtaggccactgtgttgatacgaaaagcctatcaggctaccgaacaaacaacagcctataaccatcatccccttgggcaaaactaacaaagatcccacggtgaacacttctcagactataaatggccagccgtccaatccccggtcacaggtcccacctgtgggccaagcggtag

SEQ ID NO: 27990 - DNA, 2768 bp, Cannabis sativa
gagagagagagagagagttttttggtgtggtttttttgtgattgaaggctgtttttttttttttttttttcagttttgacttattttttattaaacaagggtaaaaggggaagttcatgtaatcaaatgaactattttgtaaaaattagttaggggtctaaattttaatatggaatgttttattatatattgatattgaaatttttcttatagaatactgtaaaactgtaaaaaaaaatgaacataaaatgtaaaaattttactaaaaatatcaatttatataattttctcctttatttaaagaaaaattgctaaagggacaagtgctcattttaatttaataattaataaagaaaattattgatcattcggtggtgaatgatgtatactattgtctaatagtaatactcacattaaaaagaggtagtatctagtaaatggttagcgatttttcataataattattgaattattatatataaaattaaatatctagttacatgattttataatattttgtggttattcttttattttgttgacattgcttttaactaacggtagtgagtcaaatttaagcaattatgaataattaaataataaatatgaataatataaagtaaaaaaaataccaaaattatagaggtttggttccttgatgatattaatagcctactcccttttagttgtattgacttgtgagtagatgaacaagaaaaccttaatctctcaaaagctcttacaatgatctctgagtttttcgcttgagtgttttctctgaatgaaattcttgtttctgaatagtaagatgagtctactatttatagagattaattacatcaaattagttttccaaaatcaataaggaataaaataaaaaaattagtttactttctataattaaaataagtaaaataagaaactaaacaggttttctctcatcttcaataatacgagtttatcccatgaatccagggatagtgtcgtgtcttgcaagcatgaagatatataagatatatctctaaaattgtctaacttgcattccctggctggtgcatacgagccacctgcttgatggaagctagtcaggtgttttggcatactctgctcggatgtcctaacttccgtttatgaattcaagtaccaaatctccttgcacggctctttataagtgggattgcccgcccaagttatagaatctatttcacgtgtcacccagatggttcccacgttatcttgtgtagaaaattaaataacatctttaacatttcttttttagtatatcatgtttttttttttaataaatttagcttttactaaacaacaacattattatttaataaaatagataaagtttaaattagcttgtgagaaagatgctctagtgcaaaatgagatttttttaaaaaaaatcatttaacaaactttaaataaacattgagcaatttataaattaagaacataagcataagcatagattcttcagctcactagccatggctttaaccaccacaagacagttagtttcaacatttactgaagtccatgaagggtctttgatccatttaatagtttattgaacaccaaaaatgtagcgccctaacaataggaacgccacaaactgcgactaaacatatgataatcccgctaaactgggatttactagagctaagaacggtaattaaactttaaaacgaatgctgaataaaaataatagcttgtaattattaaacttacaaacattcaaaagattacatttttgttttaggatcctgtaaaaactttttcaaaatattacaagttatcaatacacgccgatctaagcggcgaaagtgaagattacaacattttcccttggtagacccaaccctcgtggtctagcttggcctgaacatgtacaatacaccacaaaagctctcgacctcatggctgatcaacaacagatttaccctttcctgcataatagagcacccatgagccaagaccgtgcaagacagtataaacaacaatatgaatatcaattttaaaatcactttgacatagatctacgtgttacataacacataaatcacattttctcatttatcatataaatgccataaataaatcccaaaaatgtattttgggacccgaacctagttcggcctaaaatacccggttgtaactataccgcgctgacttttcagaaaacacctacagtaagacagaataaacttactatataataatatagtctataagcacattatgccataaaattacgatttacccttcttgggtcaaaattatgaaaatgcccttaacacaccaacggggtcttaaaatataataaatcataatagtttcacattttaaatcatataataacataatttctcattaatacataattaacctagttagggttgctaatccgattattaaaccttagggtattacaattatcccctccttacagaaatttcgtcccgaaatttacctaaacaactccggatatttctgttgcatatccgtctctagttcccaggttgcctcttcaaccttactgtttctccataatactttaattagtgcaattgtcttttttctcaagactttctcttttctgtctagtttgcactagttgctcctcgtatgaaagatctggttgaagttctaatgcttcataactcagaacgtgagacgggtctgacaaatattttcgaagcatcaaaacacaaaacacatcatgtacagctgccagtgttgggggcatagccaatctgtac

SEQ ID NO: 27991 - DNA, 2618 bp, Cannabis sativa
gaaggagagtggatctgacattgtgattgtggccaggagtgactctcgtcaagctgattctatgcaagaatcactatggcgagcaaaagcttttgctgatgctggtgctgatattatattccttactgctctcacttcaaaacaagagatgattgacttgtgtaaagttgctcctcatgttcctaaactggtatacatacatacataaatgacctgacaccaaattaatgatttttttttttagtgattaagagtatgtcattattttgttattaggcgagtatgcttgaaggagggggaaagacgcccatactaagcccaactgaactcgagagtattggatataaacttgtgctttatccactttccttgcttggggtatccatccgagcaatgcaggtacctatctaaattctatataagttggttggtttcatttttcaggaccaaattgacaaaaaaaaagtatgtcatgatgttaaaagtgaaaaataatggtttttaaccagaaaaataattataatgtacgtatagaatttggctcatgctggttcaaagttagtgacttaatttcttttcactagtacgtataaatgaaagtgacttcaattttaactgcagaatgcacttatctctatccaaaatggtcacgttcctcatgaaagcatgcccacttttgaagagttgaaggaaactgtgggtttcaataattatggtctagaggaaaagcgatatatgctccatccttgcaataaatagtctactgctttcaagtttcaacatatagaactcaagaagtttcaagtgtcatcacacttcacacccagtttttgtattgttattgaataatttggcagcagaaaacagacttaggggggaatgctctgttttttttaccatttttttaatataagctggattcagcatctctttcaattatataaactatataatctaatcatatatttacttttctttttccattaatattttaattatgggagagtggccaccataaatttagactatgatataccctcgttcacctatcaattgtatataatcttaaatttagaactaattcatcacctggacaaattgatacatatatatatagaactgtatataaccatgctgaaaaaagaaaacaaaaaaaaaaaaatacacaacaacacgaacagagcgaaacgttgcagtacagtataaaaacatgtattgagaaacaagtcgaatgtgggattgtattattggtcttgggccaagcctcccgtgtaatggagtaaacacaagttcagctactttatccttttggtcacccacgtttccaattcaccttctatacaaaataactctcacaagtcacaactaaatatctactctttctctttactttattctctctcttcctctcccccctcttttcctgtcgaagatgagatacactgtcaccaccgaggtcacatccattttttattaatattttttttctctcttttctttttgtttatttcccctcaagcttatcctctaatatttaagtgataagttaaaagaaatatttttttatccattaattaaaaatatatttatatttaaatctagcacataatttatattaatttaaaaaatataataaggatatcatctacaaaaataagtatattttaaagaatataaaaattaaagtaaaaattacatgttctataaaatagatatacaatttaattttctccgtttctcctaagacaaattatgatagtaaaactcaaatttggtattaaatctaaaaaataataaaaataaaataaaatactattcaacattaaatattttttcaattccaactactatactaaaaattactctaaaatatatattgtttattattatattattttattaatataataagattatattattttattaatataataagaatatttactttaataataaatatttattaaatccaataaattatattaataataaatattacattaattaatttgcaataaacattacattatttttttactcttaaaaattatatttaatcaactctaaaaaataaaacagacaaaaatattaattaaatcaaacaaattaaattcccaactcttttctgtccagatgttttgataaaataagaggttgtgcgagcttcttttttaatttttgaaaagcttcttcatattcctcggtccattcaaacttcttgttttcacggaagatgttgaaaaaatgaacacatttgtctgttaattttgacacgaatctgctcagggcggctattcgaccagtgaggctttgaactttcttgatctttgttgacgacttcatattcagaagggctttaatcttccccgaatcagcttcaattcctcgggcactaacaataaatcttagaattttactcaaaatgactctaaaagaacacttgaggggattgagcttcatgttatattttctgaggattttgaagcactcacccagttcctctatttgccccccaacctttctagatttgacgagcatgtcgtccacgtataccttcatgttatgcccgatctgatctttgagcatcttgttgactaaccgttgataggtagctc

SEQ ID NO: 27992 - DNA, 4855 bp, Cannabis sativa
aaggagcatgatttagtacatggagaatcaccgaattagtaaaattgaatgaaaatagacaaaaatctttaaatctagtaatcttaatagttcaagcaaaatttttaacgcataaaaattcaaaggcataatttattacatgtaaaaatttaagagaaaaatccccgaatttatatattgaaactttcaattataatttctttttaattataacgtacctatcaagctatcctctcacatcatatattgtatatgaaaaatatctcattttgtgtggtcgtttattttttctttaatgcttgttctctcatcaagtaagtcaaaaaataaataaataaaaaagaagaaaaaaccaaaaatattaccaattattcaaaagtcatcaaaggaaagaagaaaaatcaaataatatgactgattccattatctcatcactataatttataacactttttccatcactaattttcactttctttctgttatcaaaagaaaagcatacactttcttctttctttctctctctctctctcaaagattttaaaccatggctgaattaattgtgggaggtgctcttctttcgggtttcattaatgtcctctttgataggcttgcttctgaagatgtcctaaacttctttcgaggaaacaaactcaattctcgattgctcaataagctgaagactatgttgcgttcggctaatgtgttgttgaacgatgctgaggagaaacaactcgaagattcgaacgtgaaggagtggcttgacgagcttaagcaagtcttgtaccaagccgaccatgtggtagacaagatcaatactgaagctttgcgacttaacatgacaaagaaaagtaagtctttgaactttgtcaaaaaatattttagttcatttgaaagtaatgtgaaatatgaaatagaagggattcttgataatttaaaaggtcttttggctcaaacagagtacttaggtttgaaaaaaattgaccttaaaacaacaatgttgttacataaaccacctgcccctttgttagatgtttccaaggtttatggaagggagagtgataaaaatacaatcattaagttattgttatctgatgatgatgatgattatcgtagcgatcataggttctttgttattcctatagtaggtatgggcggtattggtaaaactactctaacttatagtgtgtatgacgatagtgttgtcctacaacactttgatttgaaggcttgggtaactgtctctgatgattttgatgtttacaaaataacaaaaattattttggagactattacttcgcatagatatgaaacaaatgagctacgccaacttcaagttgaattgaaaaaaatgttgatggggaagaaatttctttttgttttcgatgatgtatggaatgaaaattacggattgtgggactctttgaaatgttcttttgaatcttctgcacatggaagtatggtcattgtgactacgcgtaatagagaagttgcgttaatgatgaagacgagaaatgttcaaccttacgaacttcaacccatgtctgactgtgaatgttggaagttgtttgcagaacacgtttttgatgatacaagctataataatgagatggtgccatctgagttgaaggaaattggagaacaaattgttaaaaagtgtaagggtcttcctttagctgtaaaatcgatggcaggtcttttgcgatctatgtcaacttgtaaggagtggagacatgtacttcaaagtgatgtatgggagttgccaaaacactatgacattggagttgttccagctttgtggttgagctactactttttgccttcttatttgaagccgtgtttttcttatctctcaatatttcctaaaaattacgaattttgggaagatgatagagagaaaataattttaatatggatggcagaaggtcttttgcaacctcaaaaagaaaaaagaatggaagatgttggtgaagagtatttaaacgctttaatatcaagatcatttttccaaagaagcctaaatcaacacgattttttcttcttatctatgcacgatcttgttcatgatttagctatttatgcatccgggcaatgttgtttcatttatgatggttgtgaagactcacccaaacttacaagtaagacacgccatttatcatacatgaaaaaagaagtgatagaactgagtagctttccgaaggtgaagtttttgcgcaccttgttagctttaccattgcgagatacatactcatcacacatgacaagattaccacttgaaatggtgttaggggatggaggatacttaagaacactttctttgtcaaaatcttgtatcaaagagttgccttattcaataggcaatttgaagcatcttaggtatctagatgtatcttactcaggagttaaagaattacctacttcaatttgcgtgttgtacaatttagaaacattgttattgtcaggttgcaaagaactccaacgattgcccaccaatatttctaagttaaccaatctacgccatcttatgatcaaacacacacccttaaaagagatgccaccaaagatttgtaatatggtgaatcttcaaacattaagtgattttgttttgtgtgaaaataatgggtcaaggatcaaagagttgggtaagttggagaatttgcacggaagattatgtatttcagggcttcagtatgttaaagaagtgagtgatgtttcggaagccaacttaaagaaaaaagagtaccttactaagcttgttttctcatggaaaggtaaagttaatgacaattcaacaaaggagatagaggtacttaacgcactccaaccacatacaaatttgaagaaactcacaatctttggctacaatggtacaaatttgccagattgggttgcaaatccatcgtactctaatttgggaaacgttaggttggattgtaaaaattgttgcttgtcgttgttatcattccaacagctaagttcattgagttgtcttcgtatttcttgtcttgatatgaatgaggaaattcaatgtatttctttgaataagccatttctattcttaataagattagagttattttggacaaatattttggattggtcgtttgccaacaccaatgaccaaaatagggggattttttcttgtttaaagcaaattgatctaagaaaatgtggaaagctaaatgtggcattacctaatggtagctttccatatctagaagttattaatgttgtatcttgcgatgaattggtgactatatttccaaaaagtacacatattgacatttcatatccttctcttgaagtcttgaacataattagttgttcaagattggagtcattttcagaaatgggagtaccttctactttaaaatctctatacatcacatcttgtaatatgcttatggaaaatcgcatgaaatggaatttacaaaggctctcatccttgaataccttagaattgcatcgatgtggaagtgtggtggactcatttcctgaggaatggctacttcctcctactttaagttatctaaagatcttcgacttttataaccttaaggctttaaacggcgaaggatttcaacacaacacttatcttcgtcatttggagttgctttaccttgagaaactagagagcttaacagaagggctacctcggcgtcttaatactttgtgcatagagggatgtaatattgtaattcctcgatgcaaggaaggaacaggtgaagattggcccaagattcaacacatacctaacatacttacgaaaggaagtaatgagcctttcttagacaaaaggtaactttttacattcgctcgagtcgagtcactttttttttcaaatcctgcattagtaaaatcattattcttctctacaaaattctaagtatatcaattttttgagagtagtaatataaacacattaaataccaataaatttaacacacacttatgtaacaagtcattaactaattgcattcatttaagataattcctacctataaaagaaatacttctcacataagtgtgtatgaatagtatatgtaattcatgtgtacaagtatcattactcttttcttaatactataacaataaattgtgattgcatatgttccatatgcattattatcaatttaagattctaatatgttattaatgggatatgattctttcaaattaagaatatgttttttcttcagttgagtttatttttcagttttagcttatgtgtacacatgtcattagtataattaaactttcaattgtagataatatactaagtttatttttttacgataataatactaagttatatttttgaaactttcgtagatacctggtcgttgaatgttaaatcataagtacttacggaagtttcaaaaatatagcttaggtaccgtcaaaaactaaacttaaatatttatctgcaatcaaaaattaaacttaagtatttatgtcacacattactctattaatttatatagacatagcacttttattgaagcctatttttactaattttagaaagaaaagaaaactattcattttcactttctttctgattttttttaagcacagagattaatatatttgcaggaccacacactttattatcaatgggaggataagtactcaaagatttaagcaaatgagacaaagcttctcttaacattgtggttaatatattagtttggtatgtaatctcctttgctgttatgtattgttattttacaaattattaacaacttgttaatccttatttctttttcacaatatataatttaattttcaaaataatatacactgcctaattatttgatacattggctacattgtgagcaacaccatgttttat

SEQ ID NO: 27993 - DNA, 1347 bp, Cannabis sativa
ttaggggcttgtccctcacatcaagcttgggaaatacgcctagcacaaaaactaacctactttttgtccaaagtccactgctctaaccagtattatacatgatcgacggcgcatggccacttgtcaacataaaaaaatactatattatacggagaacaattacatctcaattgggcctcacttaccaagcccgaaagtcaatattatattgtattttactctatcagtggccttatttctatgtatcaaatcctatcgggtctgggtttttacctaagaacttgggtttgtcttataaatagggttttatctcttcatgtaaggtgttacccgtgtttccaaaaagagaacacatgtaattctaagattatttagttcagccactacaggcccaaacgtaggcccaaccaagataatgaaccgaatacattaacgaagttaagccagttggatgatagacaaatgactcatccagacgagataaacatccagtacaataagtctttggatagcatcaagcaacgctttcggaagagtaattaatgagattataaatgacgagcatagtatctctctcatttattattaaacttcacgatatcagggctttatttccaagatcatgttcgagaataagattttccaaataagaaaatgaagtaattattaatcaagcgttgatgttccacaatagtaggacatgctttaacaactatcaacatgacgtgaaatccacatcaaagaagatcaacctcatggttcgagcttcaccagatgtaggaatggaaaattagggctttttagcagatcgggtcggggccagtcccgccccaggacaatcgggtctcttatcgggtcttcgccccgccccggttaaattttttttgggttggggctgacccgatttgataatacattaacttaaaaaaaatcaaatttcaattcctaaatctctaaatccctaaattggaaattcaaagaagccccgactccctcgtctccttctaatcccctcggtaagagcccagttgacgacgaagctttcattgacgtccttcccttgtggtagctccttccatcaaagcataggtcgttgggttatcgaacttgggttcatcaccatatgcactgataaacaatcattacttcactcacatgtatgaattttgggcactacttgtgagggttggttgcagaaaaatatgtatctgactcgtcgtattttttcttcgttcctgtgtatataatataaattggattttcttacgggtgtggttttgtaaagatcgcttagctttaatttagaaattagcagttaattagggctttattatgaaaattatttat

SEQ ID NO: 27994 - DNA, 4457 bp, Cannabis sativa
  modified_base (51)..(52): a, c, t, g, unknown or other
gctatactagaaaaattacaattagtcataaaagtagagaggagcttgcanngacgcacataattctcaatcccccaaataaaatcatcgccttttaggtacactctccaccaaaacaaaagagtgatgcaatgagaccgccgtctccatagctaaaagacaggccgcagcttctccagtgagtgggtcagagaagtgtagcctttttaccgccacccacaaaactgattcgttatggtctctcgcaatcgccacagcatgggaccatagactcataacctatctctaccccaaaagatatgaaatctaggtgaaagcaaaataagtatctttcaaatcagtttttggacaatgtatactgaaacactaagattaaatagaatgggatgggaagacattgagaaaaagacattatagaggattagaggggcttatagatgtgcacatttttgcattaattcattgctttataatcatttttcatagagaatatgaattgtataatcagactaccctaatcccaatcaaggcataaatccaaaatctcaactgaataactctcatttcattctcatcccaaaatttaatgttatgtaaggaaattattaatgtaggctacaaactcctagtcatgtctaatcaataggttcacttattactaaattataaaatctcattacaaaagaccacacattacaagacataaagttaaaacaacaaacaacaatgttttttctcatttatgttttttttcgaatagctatatatacttgttatatttgtatacatatatatattcttactctcttagaattattataatgtactaatacacaatcattaattatgtgcctaatattgctaataattataataggatggttaataacttaattatgtgttagaggcacatgagagcacccttaatactatagttggcccattaaattatagtatatcataaccccaaaagcccaattagttaataaccccttagggttataagagcaatagcatgtatatttatatgggttatgtgtggtaaaggggtaagatgagtttgtatggtaaaaggcaaagggttagctccacaagtgctctctcttggtggtgattctcattgaagacaaagaaggataatggcttacataaatggtatgagaggtatgtgctttattgtctttgatgctctaaataaaatatagattttggttgatgattatgagtaatgaagattaacatttaatgtattttggttagctcataatcatagaaatttaacaaatggtatcaagagcttatatatttaattttagagctccataatatttgaacttaatcttttttttttttttcaaatcttaattttttttttttcggattaatgtgttgggaggagataatatgagattaaatgttgtagaatgggttttttcttaatatttgggactgttgctctatgattttatagtaaaatatcaagtttttataaagttcattaatggaggaaaacccatttcaggttcaaaatattttatctattattttgtgtttttttgaattaaatggatattcgaaaataatagagggttgaaaatgaaacaaaacccctcaaacgacgtcggatttggtggccggaggtggtatatccggccaggtcacgtcgatccgagttatatccggccggaggtgctggtcagattttttatctctccttaggtaccctaccccatgacacatagatcactatgaactgatccatcaatgtccttattatgggactttctccaactattagaggtagttggatgtatcccaagggtgtaaggccttggccaaagaagtcgtacattagttgtgtacagggtgctagatctgtaaattatagccccatattttcataagttgagttgaaaagaatgttggaagaagcttcattgtcaagcatgaacttggaaattgtcatgttccttatttgtctagttgtgaccagaaggtcattatgaggggacctgacctgggcagcatctctctctgtgaaggagatggtaggctctctaagcttaagctgcttggaatctctttcctctatagccagaatgttactttttttttctcaagatggaaggactgagcaaagcgctctacggccttgcttgtctggcacactatatggggtccaccaattatgacttctaggtgacccgccattggcgatggtattgggtctccattataggtatctcgtgcctgagtttggtcattcagcacataacaacacagatgaggattgtttttcctaatcaagatttcaatctccatcttcaaatacttgcacttgtttgtgtcaaggccaaaatcattatgaaattgacggaatttagaggtgtccctctaattgatgaccttcttgataggaggaggcttcttgtgcgggacaacaacttgagtggccatgtatattgtttcaagagtttctaacaggaaagtgaagcatgtatacttctcctccttctcccttgagctatgtggtgtgggggaatgattgaatttcccccttttgccattatttcagccaatatcgttgttgttgtgtttgcctccattattcttgttgttggaaggttggacagtatttcccatgctagctggcatgttggggtgaacttggggttgtacgccactttgattctatccaatactaacctgccttcgtgtctgggcttgtcgaacaacttcttccaactttatgaaaccatcagcttgttcaaggtactctttcctgttgtttgttaagatccttttgatgtctttctagaattcactcagcggtaagacaccgccaagtatggtcatataacggccttcttctgttagtcctttgaccttagtggcctcagccttgaacctttgaatgtagtcttttgagggtttgccttgtctttgttttattttgacaaggtcttctagctatgaaggtatttgtctcgaagatgagaactgagtatagaattctcgagagaattcttagtcattcgagggttcgccttgtctttgttttatttcgataaggtcttctagctatgaaggtatttgtctcgaagatgagaactgagtatagattctttagaaaatttctcctaagagttaaaacttcttaaggcctgattgaaatatcactttgggttgtttcaaacaaggttgccaaaaagatccggcaccacacatctctagttacttttgggagatctatttggatctcaaagtattttatgtgtgccaagggattttcttttccagagtacatcttccaagcttgcattttgaacttaggtaggggcaatgcattggtatattctgagaaaggtgatccccttgatctgtccagttctaggtctgacaattttgggctggacagacctttaatcatgtctttgagctgatccaactgtgtttgcatagatggatctgttatggcagcctcttttccaaacagcccttctttgctggccaacgctccttggtcggccaaaattccttgaccgaagaggccttattgactggctaggccaaccaaacctctacggccggccaggctggctggtggataggtcgggggaagatcataccaatcactcggattaggtggatctaccagcataaggtcattatttaggggcagaatatattcatttcggttctcccttcttaaattatttccttgtgtgttttcattcagcctaggacttatcctgttgaaaatagaatccctaggcctcgattccacctgttattggacatttggacattccaggggagggaattgtcgtactgcccgaccaaaccctaggcgatcatcacaatcctttgtctgggattttccttcctcttaccatcattccttggtgttaggaattggtcattcttactgtatggtctgtaaggcaagacttgtctgtcctcaagcaagacagagtttggccccttattcaagggacttggacgggttatttgtccattgtctacttgttggtagaccttgttcgtcccgtttgtggatctctttagtaagggatctcttatcaaggcctcacctctgaagcatgttctctcattgaactatctcatcagttcaatggcctcttgattgcggtggttcagttcctcttgatgggcccgcagggtggcttccttggtcagccaggcctccttggctggacaaacctccttggccagccagctagggtccaaagacttgtcttgtttctgacttggaagctactcaaagtgtacctatctagtttttgacacactgtattccacatgtatttcgttttgactatgtggacatgctacatcaggtgggaaaaaattaggataacagtgtcaaagaagcttaaaattgctttttataagtgattggagggtaattgagtaattcaaaatttgaattttgg

SEQ ID NO: 27995 - DNA, 2229 bp, Cannabis sativa
ttatactagattctttgagcctccttatccatgggaaactttccttctttgatgtacccaatgtacgatttcatccaaaagggttcttcctcttccacttgtaacactagatcacactcaatagttgattaggctaagaactccactggtacagactctaggacatcaacctcccaagttgacacaagcctagctagggcgtcgattctgacgttgctctcccttaggttttgttcaattgtgaagtgttgcaactgctccaagtaactcctaaccttggccaagtatgccaccatccttggtcccttttcttggtattctcccctcacttcaaaaaccaccaactgtgagtcgttgaaaatctgcagccacgtgacctttaattccttagtgagtctcaatccagctaacattgcttcatactcagcctcattgttggaggccttgaagccgaaccttattgcacaatgcattttggttcctctaggggttgtaatgtcattacaacctcagtccctgctccattgtcatttgaggctccgtccacatgcaacttccaaatgaactctccttctccattctcttataactcttcgtcgacttctcactcttggtctcccccgtctagacaataggtgagcttttccatgaaatctgccatcatctacttgttgatcaacactcttggggtataaaatatgtcaaattgacttagctttgtcgaccatttgagtaggcatcatgaggttttgggtttgtgcaacacttgcctcaaagggtggttggtcaacaccacaattgggtgtacatgaaagtatggctctaacttttgtgacaccacaatgagagtgtaagtcaacttctcaatctcttagtaacatctcatcatccacaaaactcatactgatgtagtacacatactgttgttgctttccatcccctcttacaagggcagcacttagggcatgttcagagactgccagatatatttacaacttctcacccttttctagtttagctaacaaaggcgagtttcctagatgctccttcaagcttgtgaaggtcctcccgcaattctaatcttaaataaatttcttatttcctttgagggtgtcgaagaatgggagacatttgtcagtagaccttggataaacctatttagagtggttactctcccggtcagtggattcaaattcatctgatatttgcgaaaggtagtgaacattttgtctaaatccttgactatatccctttgttgtgtagaggagagaatgtttgtctcttcctctgtatttatgtgttttgtattgtcttgagtctgtaatcaagttaacaaaaaagaagaacaaagtgcaaaccttcgggagaaggcttttcaagctttcaggagaaaatatttcaagtcttgtctcgggagaaagcaagcactcctcaagcagattgaagggagtttaagcacttgaagtttcagcaagattcatttgagaaggtagaatacaccaagcttgcgacatataataaaagggagtaaatttatgcacaagttaattactttgtattcttgagatctatctaatgaatcttatctttgggcttgtctccatggactagtaacaatctgcaaggattgttgataccatttataaaaactttgtgtattttttattttctgtacttttattcttttctggtttttttattctacaattagagtcgtgttcagtagctatagaaaaactagttcggtaccatatttattattcacatttaattaattgattagttaaataataaattagtaatattaaaatacataatttcagctttacttatttttcttcttcgttcgttgcagtgaaactttgatctttgttgcagtgtgtagtaaaacagagtacaaagaaactaagaatagaaaagaaaaaagggagaattgaactgctcactttattgaatgaattaagatcaatatttatacaatggccataagaaccaggcaaacaaaaaataacagaaatctgacaatcataacagaactgttagttgccaactataataacaaacttaaccactaattgaaaactgattatctgttacattcccctcaaactaaatggggttgagaccatttttagtttggatttgagataagaaatccgatctgtagttaaggacttagtgagcaaatttgtagcttggtctaagatttgatctcttagatttgtttgg

SEQ ID NO: 27996 - DNA, 2629 bp, Cannabis sativa
aattggattggatcggatggtaaaatctaatatccaatatataattggatttgatctggataggcctaaaaatattgaatgtgatccaatgaacacccctagtacgtataatgtgttctaaatttagcacatgctaaaaataattctaaatttagaacaaaatatagcatgtattagttaaacttttgacatatgcttaaatattaaattattaatattttatacataaatattgaataattttttattcatatattaggttgtgacttatattgtacggagaactaagatcattggtcatggatcaagctctagttacattagaccttctaggaatgtaccttggcttcgtgaccagatgggctttcgccagtgacaacccatatccaaaaatagctattgtattgtgatgctagaaggtcagacagagcattcctgaaacatcaatccagtttccttttttatccaagcgcacaaaataagggaataaatgctccttagatctcgacagaagatcgtatcaagctaaaagggaaaactacctaaaatagaaatcaagcaattaattcatgattaattgcccataattataggatacggttttgaccaattcaattgtatcgaatctgcctagtgaacagattgactcctttgtgggctggacttcacgagaacatcctaaattatgtaattttatgtaaactccccagtagaggataaaaaggaaactaagtataattctcttaacactataaatactcaatgaatcctttggattaaaagttgagttctcttgcaatatttgctcacgttaacatagagaacttatactcattgtattcccacaaggcttttctaacttaatatacataataatattgactcgtggactaaggctcgttaatgcccaaccatgtaagaactattcgtgttcttatttctttttatgaattatctatttcttcaattctaattatttaaaattcattttctgaaaatctcgctaaacattttgccactttctttgagagttgaaggaagaagtgataccatttaaagattatgttcgacaattattgtactcacgtgtaacaaatctggtcttcacttgattgatcctaatgccaaggccggggatgcaaaagactagaatatgcgactagctattacaaggatcaagttggcaaagataccgatgtagacgctcctatattcagagatggtgattcagaagaaaacaattctgatgacacaccaaaggacgatcatcaaaatatacttgctgaaggtggtgctagggaaaaggacactcccgatatgtcaaatcacgtggtcgccatggccaaaatgttccaattaactgaaagcaggctatcttctcaagaataattcaatgagatacttctcaagaagatgacaagaatggaggccgtgataatagccctgaccaaaaggatccctaataatgtgcaaccatctcaaacaactaacactcccgaaagagttgatcctaaagatcctaggacttcaaatccttgcaaggataaagggaaaaggatagtaggtgaaacttcgaagaagaatccttcgacttaacaacaaaagaagtctaaaaatattgaccaacctcaggagaaaaagaaagaaaaccatgcttcagggcaatgtaactagactaattctagaggtagagtcgcacagaaagataaggctgacggcaaagttaagaagtctggttctcgaaaggacaaccatcgtcacaataattctaatagtcaaagtgatgatgttgatgaggcatatttggtctcagacaacaatagtggaagtctctccacaaatgatgttcgaagaagattaatagaaaagaatgagaaagcaagaacaaaaaaaagtcagactctgtgagaacgatctgagaaatcatatcaatgattgcattcgtggaagggagtcttcaagtgataaaactcaatgcttggaacataaaatcaaagagttgatgaagctcatggagaagatatctagaaagcgaaatggaactatgtccgattcaaaagaagaagacacagagccttgtgtaaaaagaatcatagatgcaccactgttagagcactttagaatgcaacaaatggaactgtatgaaggtaaaacagaccctaagggcgacctgtccaagtaaaaccacatgatgcaagtcgccaatgtcagtaatgacgcaaatgtctttacttttcactaactttgagcaagtccgtggaagactggtggaaaggttatctctgggatcgattcacaactaaagggacctacaagcagatcgactccttcgtgcgctggacttcatgagaatagcccaaattatgtaattttatgtgagtataattatcttaacactataaatacccaatgaatcctttgaattaagggttgaattctcatggatacttgctcaggcaaacatagacaacttatactcattgtattccaacaagacttttccagcttaatatacataataatatcgactcatggagtaaggctcgttaacgccccaaccatgtaaaaattgctcttgttgttcttatttttttttttttgtactatttattgttggaaatattttacc

SEQ ID NO: 27997 - DNA, 5084 bp, Cannabis sativa
tttagaaagttcatatttagggtgctaaacaacatacctgtgagtagatctaagatcctgggaaaataaattccaacaagttaaggcccaatttgtgatctggtttgttgtccacgtatgaaagatgcgcaccgaaatcctgtcaggccaaaggctggccggccatgcacctgcagggtgcatgctggccggccatgcacctgcagaatgcatgctggccggccataggatgttcagaagctggccggcctatgctagccatagtgccggccaggggtggccggctagcccccttgaggtggatggttcatcacttcgtcatcctacttgagtactcagacccctcgttggttgaagtgctgagtagatgacttgaccttcttattggcgagttgtactgccatgtggcactgatgttggccccgcagacatgccacgttaggtcaacaaaaattaggataacatatttatttttggaaaaatcttggtttattgttgtttcattttctattttttgcttgtgtgtttttatatatatatataaataataataaaataaaaaagggggaaggggtagttttcctttgtaaaagggtaaggtagtttttgattctttttttttttttaaaaatcgatttcctttttgttttccttcatatacttatttataccaatttgtatttcatttaatctcacaaattctttctatctacccgatttctctcctctctattattttctctctttgttttcattcttactttcaaaaatccatggctaaaaaaaatttagggcacccaaggaagatggttgaattagaggctgctccatcaaattcctcgttagcgccagcataataacctcccaatgttgcaacttccttgatttcagttgatttatcgcctccttggtgtgaatcgaagaaagcttcagttaagaaagcttcatctttaactctttcttccagcaagagcactcaaaacccttgctcaaatatctatgaggcacacccaatttcccaagattactaggtctagtttgaagtcttcttctccctctattgagggttctctttgttgtggttctcattcaccacctattgctactcatgtggcttctacaacatcaaccctacaaggtctttcatctctaacccgtgcccagcaagcctctcttgaaaaggaagcacgaatcaaaagatgtcatgacagacctatttgtgcttctaaaaagctcaagctcaataattccttaccctcctcgagtgatgatgaagatcccatggatgtgtcttatgaggaatctgattccaaagctgagacattttcatctgaaaaagcaacttttgtagaggatgatgtggtctcttctgaaagtgagcaagtcccaactaaagttgaggaagaacttgttgatctggatcctacaacatcattaccaaaatctggagcagtaacccctcaatttgcttctgcagcaacaaaggaaaaataacctacgaagggctctttctctggtaacctctcttcctctcaatatgtcaattcaatatttttttataatgacaatcagcgtgattgaaaattctacgctacccgtaagtttgaaaataagaggaattttgatttaagtgctcatcgagtttatggcattgtgaagtgtgttcaatatagaaatttggagggcatattgactagttttgaaggttatgttgatggcatagttaaggaattttatgctaatttgactaatgaattgcttgataaaaaatctaagttctttgctagagtctatgtccatgggcattggttctcttccattgaagatgatattgccgaagtcttgaaattgcctaaaggtgtaaagagtgatgatgtgtctatggatcgtgattgcattctcactaaaatcactggtgaacaagttgaatggcttgctggtcaaagtgtccgtattacttatcttacttatggcactgcctcactaaagtggtttgctcttagcaattggttcctgaactccaacaaaacgatagtgtctcaagatttggcttttcttctttttcgaatcactataggggcaaccattaacttttcttctctcatcatggagaaaattgtttcctttcgttgaggtaaaaaacgaaaccataagctcatttttcctaacctaatctatgaggttctttcctctcaaaagaatatgatctttttgaatgagacacttgagcctccccttacttgaacaatttttcaaccctcagagtattttgatggagcctttcccaagcgccccaaggcatccgttggtgcaactccatttgttgttgatgcaggttccaattctacttctgcagatgtacaagaagtcaagcaggatgtgaccttgatgaaaaatcgcttggttgccatggagaggttcagtaagaaatgtccaaacaattgtccaccttgatcaagctttatgggcttaagttttgtgttctctttcctttactttttcttttggtgttttttgaaggacttgttttaatttctttttttgtctttgtcacttatagataaacaaaaaggaggagtaatggttttaatttcttactttgtatacttaactctggaccctttttcctaggagagttaaggtttgtgtttgagttaaactttggttaaagttagctcttgctctttattatggtttaatgttgtacttcttagggggagatttcttgctttgtatactcaactcttgaccattttttcagggggagttgaggtttgtatttgtgttaaagtttggttaaagttagctcttgctctttattatcgtttaatgttgtacttctcagggggagttgttatgtttgttttgctaacttggtattgcgagttcttgttaattaataatattttgattatctaaagtaccaaagagagagattgtaaagtcttttttggcaaattagttgtcaaaatattttctaattaatttgtgtttttattaagcaattaaattatttttattgtgataattttatgacctaattgctccatttcttttatggccggaaagatctattgctagctgattgtaattgtttaggaagcttttcttccaatagaaaaagttctctatatggaaaagttgtctatgtttgggaactttgacttttcttttatccttaatgatttagatttttttttgttaagattagatcaaacaaactgtatttagcaagtttgaagtctaaattcgtgttcgtggtccaatttggatagttttctttctggttgatttgttgctgcagagttcaattttgatgctacaaattacgaatttttctgagaaaatttgtacagctgggaaattatttttgtggctgtctctatggttgttatgttttataaatagaacctagagagcagccaaaggactcacctcttctagttttcatttttacatatttgcttattgtaaggggagagttctttttgtgagaaccttgttgctcagctaagttttaatgtttatgttattgttcttatactgctcttaggatcggctaagcaacttgattgaacaagagaaaggtcttcagtagaagactagttcaagccttacttcaggaggaagtaagcactcactcatcaaagacaagaggagttcattattggtggtgtttcaaaatcagattcgtgacgtgaaatacaaaagattgcagcaaagatttagagggagtttaaacttgtttaagtcaattgtatttgtaattatttgagactttactaattgattttattctctgggcgtggccccgtggactaggagtgtttgaaagaacacagataccacatataactcttttgtgtaaagtaattttaaattctccaatttatttctagttttggtttgcttttgcaaatttgtgttctgcaatgacagaagagttacaatatgttgctatagactattacagatgtatttttactataattcagtaaaactattcgcatttataaaaacacaattttttaaaatatataattatatatatatgctcaatttttcaaatcatataattaaacataacacatcaattttgtaaacatgtctttccctcttacatgtacgagtttttctttagagctacaagaacaacattcaacaatattaaacactgcataagtaccaaaaaccataactgtaacaacactcttttaatatatatatatatagaaagaaatatagtttattgaccctaatttgattactaatattagtgaggaaaaagttgaaccaaatatataatttgaatttgtgtagtagctatccattgaaattacactattgagtaaaaaattactaatggactcagatcaagcacaccaaattgagatttttagaactgaaaaaagaaatatgatacatgtttgcgatccctttcactttgccttacattttcaacctcaaccaaaagattctcgacagccttggaacgatgcttcaaaaaatcgattgttttattgaagcaataatcgattttcttaaatcctccaatagcatttgattatttgattcaagattgtaacaaagtgaagaagatcgattttccttaaaatcttacaataattattttgatgattttatttgggatcgtaaagtgtgagaatcgttgattacggtgaatcagtagaataaagtcttctagaaggatcatccactcaggcttttcactgaaatttcctcttgcgcttttttatttattttttagaagttagccggagttaacaatctcgttaacgagagttaactttcacgttaccttttgtctagagaaaaacaaaatatttaaacaaaatgttaaactaaaaattatgttaaataaacatattttttatataaacatatgtgagtgattattcaatagttacatttttattataaccatatgactacattttctttaatctgtaataacaggttaataatagttagactttccttttttagatttaatgaattataattaactattttcttaaaataattaattaaatagacattccttttttagaattatttaatta

SEQ ID NO: 27998 - DNA, 1927 bp, Cannabis sativa
tattaaaattgagagtcattaataacaacagagtatattagggagggaatttcccttaactaagaaatattttcatccaatgaaagagcaaattttgctaaagtatgaggtgctttattggcatctctttcaacatgagatatctttgctccaaaaaaagagaataaaagataaataatatcatctaccaaatcatgaaagagtgttacaaagtttaatttttggttggatataaaaatttaagttttatttttaacagtattaatatgttagatattttcgaattttttttacgtatatgtttattagaattcaattttttattggtttaaattattgaatttttatttttatttaaaaattaattttaatatgttaataaaaaaataacacgtgaataatgattttatatttaactgtttgatatttactgatatttcataaatgtaattattataaccgtaaaaaattacatttaagtatttatttacgatagaaatttaaacttaaatatttacataacaaattactttagattaaaaattatagtaatttagtatcaatagtgcttaatactaataaatgattaatgatattatatactagttactaaattaaattatgtgaaaattgatgattaattataccaacagcgatataacatagttaagtagtgttaataaaagtactttaaaatataaagattacaagaagtaatacattagtattagtgtaatttaatattaagtgttaaatattttaattaaataattaatatgagaaaatactagtgatttacaaggtgccacgttgatatgaaggtgcttcttattgcttaataccaattatcataggttgatgaatggtagttggtactaaagaaaagtatgaatacgacaccgttttactatttagaaaattgggatagttgaataatgaataaataaggtagttcagaagtggggagcatatggaactttagttgagtaaaaggtgaaccaatgaatttagtctcacatgttatttgtctctatagaagtgattttttaatgtgttattctattccaagaacaacctctttgtggtcttcatggtaaagtaacatttttcttgccttaaagtcctaagttcgagaaccgtttttggatatggatatagaaagcaaacacattaatttccaatgtttctcttcaataaactatttccttataatcttgtttgtgtatttccactttttggtttctccacattcactattttgtgttgagaaatattaaaggccatctttaatgccactttaaaaatttaaatatgatgcaatttttttagtaaaaatctttaattgaactgtaaaaatattattactttagtggaaatctacagtgtaagaattatatttttgaaaaattttaacgagtgaatcaaagaattaaatgaccacaaataggagttcatgtattcattcttagaattcagattaatttactaatgattattgttgtgatatgaataattctttcatggtaaacgacaagttaatgaaagatatttattacatatcggtgcagtcatgcataatcgaattatacacaacaacttcactatatgtccatgtacatatgcgatctgaatcaaatataatgtatagtaactcgcacttattaacagtttcatattaaagattcccattactttaattatactactgacttgttttattcatatcatataattttatttctcttgtacgttcttacaagattatacatttttcatatgaataagtaatttttagatatttaataattataccattataattaagggatattggcggctaaaccccccaaacttttgggtttgtgacagttaaccaccaaaactcaaattttggcggctaaactacctgaactccacttccgttttg

SEQ ID NO: 27999 - DNA, 3626 bp, Cannabis sativa
caatctcaatagttcaaggaaaatttttaacagcaaaaaaaattcagagagcataatttggtacatgttaaaatttaaaggtaaaatcctaattagcctaatttttaatcacctaaatgtcctagcgtcaaaataaagacgctttcactctctaaatgtccaatacatataaacattgttatttggcaccatttaaaagtgacgttttataattggttaataatattttataaaaattattatattaatatgtaatatttaattacactaattacgatataatacctgaaaaacatttttcaataaatatattgtattacttttacttttatattgtcttataaatgataaatgcctaattcattatagacagcaatataatatatattaacatgtctttgattttcttttgacatcattaattatcgtattcacataagtttcattcaatgagagattgatgtaacctcatattaaaatattgaagaacaataatgaatcattcatcaatctagtttcaaattttttctttattaattgactgaaatttatatatattaaataaaattattcatgttcaccgtacacaaatcataatttgggaagtttataaagaacatagtaccataacaaagtttgaagattattattattacaaaatttatgatacaacaaaatgccaaaaataggaattgtactaattgagtaacctaaccataatgtttggattgaattggcgtgtagataagagaaacatagtaaaatcataatttttcttttcattaaaaaatttgatcaatgatattgtcacgtgtatgtaattgagtaatttgagaatcacattttgggaaatataaaattccaattaaataacagcaagctcttaaaaacattattatttactattcctatacaataaatttaagggtgtgcataaatcaatacaatcaaataataattgattcataattcaattacaacttatcgttaaacattaaatatacaattataattaaattggatttgatgttatttttgaatatctaattgaatcagatcgaatgttagatgaggtatttaaaaattcaatacatttaacatctaatcgcactaattagtattttggatgagtaattaaattttatgttgttatacgtaagatatatatgtatttaatggatccaacccaatacatactagacgtaaaatatttaatgtaactgaaattaattagatcgactcgataaaatttaacatttaatatataattgaattggatctaaataaacttaaaaacattaaatgtggtcagataaacatcagtaacaatgatctcatttaacctttcgaaaaaaagaaaataataaaaaataaacacaatgatctcatttaaataataaaaacttaatttataatatggtccacaatattattgttttgagtacaagggatcactgtccccactcgtatacatagtttaacccaaatcatgatgtcttgcatacctatattatgtatatatacatataattaatacaactgtatacgagtctatgactacaaaaaatggatccaacttggtcggttcatgattcatcatatcttttgtagctttgtttggctatgataaaacattatattatattccgatatatatgaaaaagaaaaacataatactatacataatctttttatttaaataaaatatgcaccgatttttttattatcttttatttggtgggtagttcagaattaaattgctcactatgcacaacactgttctactagacaaaaatgatacttttttttaattaaaaagaaaaataaaataatataaatctaatgttacttttttttttcttttacaaagaaaagaattcattaggagattggtattggttaactgccactaatattataagaggagtatttttcagtctcatatctctctataaataatgacaataataaaaaaaaatatttgtcattgacttattatgtcacattagagtattagtattttttatttttttttttaccaaaatgtaaaaaaggagatcattgctaattgacatttacgatatctaaataagactacataatatactgtattttatatatttttttcaaatatacttgataaaataatgtgtaaatatatgtataaattcgggtacatttatttatataaactttctacaaaaattgatacaatattcattcatggcatgtctcaacgcatgctgttataattataattatgatcattattatgtttgtatattaatatttttgtatactttaaatactacacatgaattcatgcctggcagcctggcatagacaatacatgtcaataaattaaaatgccttaattttcatagacattctctcccaaattatttttgtgtcctcaaacaaaattaaaataagtcactaagattttaagagtcataatgtttttcttaatgcttattccaattaaatccaaatataaacaccaactatacatcttttcaaaaagaaaaaaaaaaaccaactgtagctaacgaaatgcaccttctaattttttgaaaacaatatttttagggaaatttaaaaaatgtataaaattttgaaaaaaaataatacatattcaaaatatagaatctaacacaaaattacaaaaatacggaacagaataatcataaatgtaaagtttatttccaaataaaatcatacatttataattataatttttttagggtttttttttagtatttttatactttaaaatattttttttttttttaatttttacggaattctacacaaaatctcttctaaacagtaaatttgaaaaagacaaattaaaaaaataatagatgagataattctctttcttttacctaaaaatttacatatttttataaccaataattatagattaaatagaaatttattacaatttgtaatttattgcttgtactatatttgtttgttttttttttttttaatattgggaggtgaaaattaatgtatgtctatgaccacataatttaatgcttgttcatttagtttttatgaatttatactatataagctaatttttatttatttaatttctacatgtaatatttataaatacgtaatatataattatttttggctaatatatattttatttttattttgtgcgtctaccccatcataactgcgatgctaataggtggtaggtacaaaaataaaataatgttaaatgaaacataatatgaaatttatgatggatcattatttttctttcgaataattgaattaatgaataaatttatgcaaattattataaaaaataaatgcaaagacaatgaatgaaatcatagggcggcgactgattagatttgctataatctcattatatatgttatatgtataattaattttaaatttaatttaattaatatatgtattcaaatgatccttaccaaaaaaaaaattctatgaaaaaaataaatccctgtttgacttgaattttaatttaagtaaaaactatgtagatagttttatacttttctacttacactgaacatttttaagaaaagaaaaaagtcaaaaggtataacaagtattagatattagttcagttggtt

SEQ ID NO: 28000 - DNA, 3619 bp, Cannabis sativa
cttcaagtttttattctcacaagatggattacagaaaaatgctctgaccttatggctacttttttgaaagtgaaaaatgagctagaggacctctctccttttataagtgaataaggtcctattaaacgcgaataaaataatccaaaaaatatgaaaaaatacagtttgtgtatttttaactgtaaatgatgatctcgtggtgtaaatcaacttctaaggtttatagtcaatttttggagtctggctcgcgacagaaggacccacttcgggtaagttatagcttaaatttgtaactcccttgggggtaaaatttagagttgacagattcataatttttattaaagtgtgagacatgacttaataaaatcattgaatagtttcaaaatacaatttgaattgcaccaatcaaatcaatattgagtgagttatgaccattttactgaaggctattctaggcccagcgcccaagttgacattctagagcccatgttgacatgtgatatcaacttggatgctgggtgagttggaaaacatactggggatgtattttttgatgcctaagtaatattttgacatcacttagtacatttctatgctctggtgaagctggtaaccagttctcagagatgttgttgtattagtagaaacaggagactcgaaactacctaatttttgagtaaatcaccttgtcaaaaatgtgaaaatataaagttatgaatttgacttttttgactttattgctctatgttattatgaaaaactagatggatggtcaagacggaattagaattggatgagcaaaatccaacgcaccaggccatttatcaacttgggtgttgcgtacttatttcagggcttccaaaatgtcgttttgatacttccaaggaactagaacttgaggaagagatctactaccccctttttgaccattctagagagaatgctcacattagaattggcatttgattgatcgaaactagcacaccaagtttattttcaactgtggtgctggacccacaccaggtcaacctgggtgctaggctcaatttctaggcctttaggttcgtggttttctctcgagttttcttgtatcttcgttcattttgatcacaaaaaaaatgcccaaaacacttttttaagaaaatgattaaaaaggaccgaggttgacaatatgtcaacgtgggcactaggtccattttgatggcatctagaagtttcgtgtggtctccaaaaatagttaagtacgtcttaatctttgctgaaaatagagaatatgcccaaaaaacttctaagaaaaaaatccttggaaatggcataggttgacaaaatatcaacttgggcgatgggcccttgttttggtacctacgttggactgtttcttcctcgaaagtacttatttccctatttttgattaagtcaaagaatatttatgagtcaaatttttgatatgatgcttggaagtttcctagattgacagattgtcaatttggttgctaaaaaatgaacattctctgaatctaattctgatgcctcaaatatgtttgtggttctagttcatgtccgaatacaaaaattgacccattttcattaagacagtcctcgaaaactaaatccctagttgggtttgtccacttaggcgctaggtgaaaccctaggtacccaggttgactttcgaggtattggtttgtgtgttttcagctcacagagcttggacatggttgctccatgtcatcatggtacaaaatactaaaagatagtgagttggaaatgatttatcaaagtttgaacttccattttagagttaccagagttgacttgggcacagggctcgggacccctccaaggttgagtgctatgacttgggactactcaactccaagatatcatctttcttgccacatgtcaaacattgatgtccacgtcaccaagaaagtttccgagttaacagagagatagcagaagaagtggtgaaaggaatataagtctcgttgaaatgtacatcatgagtgataaaaataccattaaaggaaggatgaagacataaaaaaaacctttttgtttacttgtaaccaagaaaattgcaaagggaagattgaaactctagtttgtgactatttatagggtgattaaaaggaaaacattgacagccaaacacccaatggagagaatagttgggatacttgtgatagagaagttgatatgggcgggaatagtatagaatgtgattagaaagtcgatcaataatgaaaatggtagtatagaaagcataaggccaaaagtgaagagacatttgagcatgggccaaaagagtgagatcagttttaactacatgataatttttgcactcatgcatgaccatttttttgtggagtgtgatggcatgagaggtcatggagaatgtcatgtagggtgaaaatgtggaaagggtgcaggactcaccgccctaatcaaagtgaacaatttgaattgtgctttgaaattgagtagagactaaatttttaaacataacaaaagcttggactggttcatctttagttgtaagaaaatagaaccaagaaaaaaaagtaaaattatcaacaaacaatagaaaatattcaacaccagcgatcaccgtgattgggcctagaccccaaatatcaaaatgtatcaatttaaaaggcttggaaggcgcaaatataaattaggaaaaataactctatgagatttgcctaattgacaagcagtaaaaaagatgtggccaactcttttaggaaaaaaattacaaacagaggaaaaacgagtaacatcttgagaagaatatggatggtgggggttttaagaggattaatgatttgagcgagttgcattagaataatttgggttggaaagggttttgttgggatatcttagagaaaattgagattgcggggatggagcttttaggcactattttggaaagggtaagttgacaaagtttgcttgaaagaagtcgatggaggaagttgtcgtttgtctttcaagaaagcttcatagctcaaaaggagagcttcaacttcctcaagcactggtttgacaggacgggctaaaattagggttacaaacacataatactctggtcctaaataattaatcaaatacactaaatgatcttgatgtaaaattagttcacccacagaagcaagagtgttataaagggacttcaatttctacaaaggttgtgagtccttcctttttaatgttttgcaacattgttcaaaaatttgagcttcgagcaaaagagacagttgtgttggtgctttccagagagaccaaaatctttattacagtagagaagctcacgatctttcccaacatggaatcagagagagagacataaatcaaactcatgagaagcctgttgtatcgatgccatgccatgaaattgggattaatttgggtggagttcgaatcgacaaactgaggaggatagagaattgtgtccttgatttatccttcaacccattagcaacaataatattatgcatttgcattctccaaacaagatactttgattcaacatgcactacaagaaaacctagttttaccggcgcaattggtcaattgcaccggcaaaagttgtcagaataaatgaaatgctgaa

SEQ ID NO: 28001 - DNA, 3279 bp, Cannabis sativa
tagtttataaaatcacacacgcgacatctctagtgaatagggcattacagtttcaatcaggtccagcgctgggcataggcgggctaggcctgtgcctagggcccacctagtccagggccccaaaaaaaattttccccttttaaaattacacaattctttttgctgattttgaaaaacaccatttttttttctaaataagggcccaaaaataattttttttcctatagcccactaaatttcagggccgaccctggtttcagtttccaagactattttagtgtaaatgggtcaaaatttgtattgggacatgaactatacataccacgaacttctttaaagcattagaattagatttggagaacattcactttttagcacctagacacctggtgctcgggcaccctaatccctaggttgacaatgtgttaatctaggccacttgaaagcatcaaatcaaatatatgacttgtgcatcttctttctcttcatcaaaaacatgaaaataagtgcttaaagggaagaaacaacacatcatgggagccaaaacaagggtacaatgcccaagttgatagctggggctggcccaacacccatgttgacattttttcaacctaagccaattttgaggagttttttcaaaaattcctcttggcatattctctgttttcactaaatattatgatttaactatttctggggaccaaacggaacttctaggtggcctgaaactagacccaatgcccaggttgagaccttatgctaggtcaaatgccctatttctaatcaattttccaaaaaaagtgtttcgagaattttttccatcatccaaaataacaaatatacaagtaaattttgggagaaaaccacaatctcgagggtttggaaattgagttcggcacccaggttgacattcaacctggtgcactggtttcgatcattcaaatgtcaattctgctccaagcattctctctgaaatggcaaaaatggggtaggagaccttgtcctcaagttctagaatcttgaaagtatcaaaacaacatcctagaagctccaaaataagcgcccatgacccaggttgacatatgccctagtgcactgggtttggcttatccaattctagtccatttcgaccgtttgtctagtttttcataataactaagagccatgaagtcataagagtcaaagtcacaacttcatattttcacttttccgacaaggtgatttactcagaaaccaggtagttttgagtttcccatttttgcagaacaacaatatctccgagaactggtgacaagcttcaccagaacacagaaatggactaagtgatgtcaaaatatcacttatgcaacaaaataaatccctagcgtgttttcccactcacccactgtccaggttgacatcagatgtcaaccagggcgctaggcctagacagtctttagtaaaatggccataggtcactcaatattgatccaatttacatgtgtcaacttgcgtttcaaagctatttcaatgctctatcaattcatgtcttgtacttcaatgcaattatgaagctattgactccaaattttactccagagagagttacaaatttaagctacaacttacccaaaacgggtcccaccgatgcaactcaaactccaaaaattgacaattaactttagaagtttatttttaccgttatatcatcatctagagttaaaaacaacctaaatttatttttcttaatattttttgaattattttattcctagttaataggacctccttcccctaaaaggagagatccactatctcattttttaagtgcataaaagtgctcataaggtcagagcatctctctctagtttatctctttaaaaattaaagcatcctgacttagccatttttctataattcagctcgtgagaataaaaacttgaagtagatgtagcttagcaattactatcgtcataaagggagtgaactactataaatccttgtgtgtctctcatatttatatttagctaatatctcattctcgccaatctagcgagcatgtgtagcttaaaaatctgtgtctagatttttgagtcaacaaaatcttacattaatgacagcgaaaatatgtgactccttccgttcattactctaaccctcaaatcctttctgtagcataatatcaccaagtactaaacctggatagcttccttgaattgataaacaccttcttcttcacaatcttacacatagatctgagtatttccttgaactataagggcaaacactcaataactaatagggccaaatttaagaatatgaaaagggaagagggatttcaaaaatcttaaaggaataagagagctttttttgattcaattttagggtttttgtcgataaaatatttgttctgaatcaaagctataatttccctattatagggtctctctaggttagtgtttagaatagaatggactttaagaaaagataatatcacttaaattaaacccttgggcgaattgcactataaggccctttgggtttgatttttgccatttaatttcatgcaatgaaacttttctcttttgcaattctaacattattctaatctaattatttaaataataatttaatctatttaataattattaaacaaaattacaatttaaatatagttaataattagaccctcaaagtgtcttaattaacaaataagccatttcaactcttttcttctcaaatttgtcattccttagtaaaaattcataaataagacatagtcttctttagaattctaattgacttattaaatcaattagttgagtctacaaggcagtattatctcaaataatatggggactatgggcttatgaatcaagctcccaataagttagatcttcaaatttacaagtaaatttcttatcttattaattcctcttgactccactatagattcagaattgcactctggattacaaaaaatgctctatataccaaatgaagatatgctataattatctattatttcaatctaaataatcaattatcctctattacaattactaaaatgagtattctaccatttaacttgtttagccaagctctaaggaaaccatcacttcacttctaaatatttatagaagttatagattctatatctatgattaacgcttccactcaattgtactaccgtgttcccaagatgtatgtatggcactcatatgggtaagcaggtaacaaacaagtcaaagaacacgtgtactacaattaggctataacctaaccatctcaagattgaga

SEQ ID NO: 28002 - DNA, 4074 bp, Cannabis sativa
ttaagttatcttcattctttttctttttattatttgtttgaagtatctgtctgttatatacgagctatataaaaaacatctcacactaacaattacataatacactagacaatacatagtgtaacacatcacatatatcatttatgtgaccatcttaagcgtctgatttcaactgaactcctcacatatgaccaatcacatgagaaagctgagatgatgtatcttcaaatattgttaattttatggaagttagaactattgaagtaatgaatataaataattgtcagcattttggtgacgatggacttgaaaatggggtcgagttaggtagctgctgatgtcgactctgaaccttttctaggggtcctttgtcatgaattaaggggtgatcaactcacatcgtttatgtatttattaaaaaagtatttgaaaatgagatcgatgagactctttccattcatttattataatctattatcaacaaaacagagccaagtgatggggttgaagtatgtataatactgatttgtatatttagagaaacgaagcaagcacgctatttagtagttaattgacatattctactctgtactgacttatatatataacataacacaacatatataatgcttaaattgagcatatatgggtggcaactagctacttggaatcatttgaagcgtcacaactttcaatcatacgcatatataaatatatttcatagtattagtgtaaggtcaaaatgtggtatatgttttcagcaattatatgtctcattctctctcgttttctgatatttttttattcagttgcctttcaactcgagtcttttcattaagtttgccatattatatttaatataggatgataaccatgattaattcttctccatacgaacaaataaagtaataaacaggaaaacagcatattacaattataattatttaatatataaataagaagaagttctaagttctaaccttttcgtaataacattccttacgatatcattggtgtggcttgttaattaaacattaaaacacatgtttttgaattaaaaaaacttcaagcggttttaatccatcgcatccaaccaagattagcttgtgctttaaaattatgtaccaaaaaatgcatacaacacataaatgagaatatatgattgaacctttgcttgtttaagcaaaatttgcacatggtttagaccattttttccttctttgattaagtgtttcctaaataaaagaattgagaaagaccctcttttccattttcacttaataacaattatgaattgtaatcaatcatcataatattaatgaatataattaaaacaagtgatgagttctagcttgcaattaagtaacaatgattggtactataatacacacatgataacatttcggtatataataatgaacattatgagtatatatttaaaggcatatggttatgcttacgcagtacaagtctctgatcacttaattaaaatttcaataataacaataacaatgataataatagagaaagaaattaagaaggcggtggagtggagttgactcaaatcagaagtcacatacacatacagcggaatcaattgaaaagccagcataaataaggctgcttttgtctctttttaattaataaaataaattaaattgtgtggcttttctcttgttttttttaactatcattttccgtttacttgtatattattatttaactcaatttttcaaagggctctttgtggctgtgggctagctgtggctgtgttagctttgtctcttccatacatggcacccttcatctttctttctcttctacctttgactttaaagctcttctgtctctctctctctctcactagtgaccccccgctcccatacccattcataaattatattaaacacaattattattattattttaatatttaagctttaatattcattataatatagtatatatcactttgacggtgtgctttttgcatatataccaaaaacagctgcctaagcctagtagcctcacctggtatagtactataaatgtatattctagtctccaacttgtgtaatttttggtgttaatatagatagggaaattattatggtacgtatagaattagatcatcaaatttaattaatataatgggccaaagggtccaacttcccaccaaatgtgtatttaatcatcttagtaattaattaatttattcactagaaatatgccaaaaagttgagagatttttcatcattaaactatgtacaaagagatttcacctttccgttattattaaatgaaccttataataataataattattattatttatctttaatcactctgctgcatgcacgtcttgatcttgaaatttgataattaatttattattaaatgatttcacaccatggatccatggccaactcatcccctgtttatatttttttcttcttcttcttcttctattatttgcaccaaaccaaacataactccactccacatgccttgtttcatcaccatacaacttctttcatgaccccacacacaccttcattaccaactcttcactcctttataaataaccaatatttccaccttaaatatactcttatctatatatacttacatattctgatactcataaaaaacataagagaaacagagcaaaggcaatagaagagttaatatggctatagtattgaagaagagtagtaatggatactcaaagatggaaaaagaagacccagaagagaaaaaccatcgaagggctcagtttttgatctacaaagtaatggagcaagccgagtcaagaaaaagaacctcgtatttgagattaagaataaagaagttgaaggtgaagatcggaaaaagactgaccaagttgagaaaaagtctaaacacagctagaattaatgtgtacagacaagtttctactcaattgaaaacttgtaaacgtttgtttggtggtacttctgctcagaccactcttgttcctattttcgcatgattatgtttttcttatgttttttttcaacgaaattaaacatatcacgatttgagtcaatcctatggtactatataatcaatacatacatagttttaattattatcttcttcccctgagtttcttcttattattgttattaatatcattattattacagttttataaaatgctgtttggtaaattctgaatgagaagattaaaggcacatgaaaagttatgaagatatatacttgattactgctcccttgaattgattagacagctatctagtagaatcctttcataagatttgtgtctttaattttgacaaataccattttgccaattatacataaatatatttagatttattaattgttctttttagctcctatccttattataattaaccaaaagatttttttcactaattttaattatccactaaagtatatgagttttggtatatatttttcaaaaacttgggtagattatcacgattaagtgttgttataattatgtctctaacaacagaggaatttgatctggtagtttatgaagtagtaaagatcagtagtactacccgacccgttcaatcaacttgaacatataaaatatattaatgaagatgtcaaaaattgaataaaaaaatcttaaggaatcgacctagagagattccatcctcaatggcggagtataaattaattaatacattattatcaggtcattagattaagttaataacatgattaaattattttaaaattaatcattcaaagttgaggaaaaagattaatgtagagcagtgagagaaggcggattattactatatgtattgatcagatcttcaggcatattaaattcatgatcaaatttgatcttcttgatctatccaaaattaattcccttgttcccattttctaaacttgatgactaactaactctttggccaaaagtaattaatgatttggaatttactcaaaataaaaagtattgagactcagtacactgtattagttaaagagataaacttaaatttcaatgcaagtatataatattgttgtgtactttgctgtaatctaaag

SEQ ID NO: 28003 - DNA, 3457 bp, Cannabis sativa
aagtgtaaaaataaaaaaaaacccgttattttatttactattaaataataattttttttttttacatcgccaaaattacttaaatataaaatattgcttttaaattctccaacaatactaaataaacaaaattaaccaaagaaaataaaaataatttgtatataaaaaggaaagattggttatagttttagattatattttttatatatatatatatatatatatttcatatattaagttttaaaaaatatatgtactatgtattagttttgtttaattactttaaaatattaataatatatgtataatttttaaaataaatataaataaacgtagattagattagattatccattagtttagcatgtgaagcaatattcaatttgtacacatgaattttaaatttattaatccaatttatatgaatgcggataccgcactttgtagaacgaattgaatatatgaaaataaaaaatagtatgtttagaaattaatatgtcaattactaagtaatagaagtgttttattttattttattttattttaaaaaataattatattctattttaaaatagtaattatatttgaatttttattctctaagagacttaattattaaataaaatataatattataataattaattttttaaaataataatattttataattacacagaagaattagaaagaatattctcaacgcctcaattgtctctaattagtaattatatcattttttgtgtaataatatagtaaaacaaataaaataagtataatttgtaaaaattacttacaccataaatcgataaatttatgtagcattattcttcttaatttcgaaaccagttaggctatatgtgaaagccagtgttacaaatttgtataatagtattagtaatttgagtgaattgggattggtgtgtgaaactgatactgcttcctttagctaatttcttgcatgggaccctcacttgcagtcttctcctgcaacaaatttaaggcccctgtctattgcacgtgctcaaaagtaggatgtttcccctaatcaatggcttttccactatgctgtttgaaaatgaatcatctagagaaaaacaataacaatgccttttttcgaaatgaagggagaacccaaagttactcttctttattgactagcctttctttttaaaaaatgagaggaaatgaaaggtttcattttcaatttttgaaaataaaccaacaaaagaaagtcttttttatttttttttatttttaaatgagtgtatatgaaaaagagaattagatcacataaaatgttcttggacattgttgatagctcagctataccagttaagttctcagtaaatacttaattggttatattatgagtcacaaaatataaaaatctaaaaataaattaaagaaaaattacaatctaaaaataaattagaatctatcacattaatacgtatagtttccgatacttcaaacacttcactatttcgataactgtctcaaaatcactctctatcaacacaaaatgatgcttcacggaagctgccgtctccaaggctacaagacaagtcgcatcttcgccaataaggaaataagagaagctgagcctcttggtagcaacccatcaaaccgttcccaagtgttctttagccaacgccgcgacacatattgccccacttcccactttaacgtcacatttaatcttgatccaatcatccagagggaccaaagcagagagccgacaactagagaacatggaaacaaacatgagccataatttgcataacaatgagtgatagaataaatataatgtttgatgctactcatattattattgtgcaactaatcattatgggcctgtaaaatagtatccactataatcgaagcacagaggaataactcatctacattgacacccttcgacttttggccccataaaaatttgatccaatccaaccccaaaaacgagcacccaaatcaataacttgcataatgccatagggggaagatctccgtaaatggaatgctaaattgcgatagaggaagaggtactccatagtctcctcacccaccttacacaaaggataggaggtatcttcaatatgcattctcttagccgaaaaagctcgaatgggaatgacattggagagaatgctccaccaaataaccttatggtgctctaacaccttgctactccataatttgttccatagggaaggagcaacatcacaaggtggagcacggtctaaagcttggactaggtaagctaaattgctagagatggtaccagtaagttccttggtctaaatccactgatcttttctctggccactaggcttaaccaccttcaaaatattacaaactatttcagagtcaaagagggagtaaagctttatgaaatcccaatttccatagtgtaacaacatgtcagcaacccattgaagaccattgggtcgactggccactgggtttggacaaaactctttgtcgtggattacccacaagtcttcttaaattcccatcagtgataattttataggcacctttcttcaaaataactctggctttaacaacatttttccaaaattaggtttcaaaactcttgtgagagaatttcatgaaatgtctatcttttaaatacttagcccttagaaccttgcagcagagagattggttctcattaatcagaagccatccccatttttcaagaaagcctgcttcatctttattatttttgagaagcctaagacaccataggatttagggaggcacaactcatcccatgctttcaagtagaggcctcgattccccttctcacaactccactaaaagtctttagccatgccatcaactttcgaagccaatctcttagagagttttgtttcttgcatagtgtatactagaagagcaagcccaactgatttgatcacagtagcccgacttgctttaaagagtgttttaattttccaaccttggagctgggacacaaggtttttcaaaacaaagttatagtcaacatccttttgctgaaatttgaagagcgggtgaccaaagtaaataatatttccaataataccatcaatccccaaaacctcttaaatacctctcttcattcattcactcatgttgttgcgaaagaagatggaagttttaagtttattgatacgttggcctgaccaagctcaaaatttcttaaaacactcccaatatcctttagcttcaacaatattctctctacccacaagtatgagatcatcgtaaaaaagagatgggaaagatgccccattcctactcaacttaattcccttgatccctcctttgtctatggcatcctccaaaatacaagagaaaatttatgccgcctagatgaagagataaggagtgagagggtccattgtctaatgccacactcaagagaatttttacccaccatatacctccattgagataaatgtta

SEQ ID NO: 28004 - DNA, 3349 bp, Cannabis sativa
ttatttacataaaatacgatttttcagcgtatttttatgttgtattcttgttattttgtgttggtttttgttatttgaaacttttttattgttttgatattatttttttttattaatttcatgtattttttttgttattttcttattttttttttataaaatactgtaaaaaagataaaaaagaaagttaacgtagaaatataattttttttttatataaaaattaatattttatgtaattataaaaaaatatataaataatgtacaataaaactcaaactattgttttttttctctggacacaaaactcataatatttgaaaatacatataaatatgcaatattgaattgtaatggtggcaatcactaagcaccatagtggtcatgttaattgcagttcccattaagagtagcaaattgtaaagtttgttgaagcagttgactctacaccttttgtttgccacttattttatatatggacaaccagacaacatgattagtatatcaatttaagtctctagctatatatagctcctttaatttcattttttgatcatatcttcatcaattatgatccatttagaatattattttcttaagattatttgtagtacttatattggtatgtatatatagcttacatttgttaatttacaataagtttatatcttccccggtttgccttttaattatagatttttttttttttggctggaagtcaattttaatctatatatatgtagaatttattccaatatcttttagatttatatagagaaaaatactcatcaatatcttttagaatttattctctcattttttttaaaacatcaccaccttcaaaattatatgtactctctttctcaccactacactaaatccctatgcatgttttctctctttctctctatcttattctttctcacactatattaataataaattattatatttatattttattagcaaaatataaataactacaaatccatacattataaactgtagttgaatataaccattagccaaatccatatggataatattttataattttctatcaaaaaatagatatttcataattattgtaatttataaagtcataaaattttgaaatattttataaatttatcaactaatatatattttaaaaaatttaagtaaatttatatttatattttttaaaattaactctatcataatatatttgttgatgttaatttatttttcagaaaaataaaaataattatataattactcatattaaatttgaaaatttaatataattttatgacttaaatatcactaaataaaatacaaccgcacgcgaagcgcaatttgtttcctagttgcctaaaaaggccaaatgcctttctcctgagtgataaaaacttaattcaaaagatcttaaaaattaattagtattattcgaaatgggcacataaataaattatggctgagacttatatttatatcctaaatcaatcttgctatctcgatttttgctcacctaacatgacggttttacgtggacaaaattagcgccatgtggtagtacaactcaccaataagaaggtcaagtcagcgccttagccagtggggattctaacactcaaataggacgacaagtgacagtccagccacctaaataggccaggtcgaccatccctgtctagctctatggccggccagcctctgcacaacacaaggcttgccaacctactccctacaggttcctagccggccaggaatgggcctcgctggattctatgcacaactctacacgtggactgcgagttagactgcgaattgagccttaatatcctaataaagttactaaaagatatctatgtttaagggtattttagtcttttgtatttaataaatttaatatacaaatatttacttattttattgttaaataagggtttaggctctcctatataaaaggtcttaactcaaccctagaaaatctaagtcattaagtgctaagccttattctaagcctatgtatctaagtctgatatctctcttactctctctcatctacacacccatatagcatgctcaacacttgagatttgccatctttgattcctatttagtatccttaagggatctatatcaaatcccacctataatgatctaaatactattatcccttggtatcaataaaactaaaaggggagtaggtcattacctgctaattaagggggtcaaatatcagtttcatgcaactcctatttattattctttacattcgagttttaattgtgtaacacgtggcaaatatcagattcattcaactccgctatcggttgagcacttttagaggtcaatagtttggtgctttcattaagagcaagtcgatatcgtatctgatcaaacgccatggttaacataagaagaaccctgattgcaccatctgcatcttcatgtctccctcaagacccacagactgcgtatcctgatgtccatgttctacccacaattgaaattcccatgaacactgtagatgtgatcaatcatactgccacggcagatacgccatggtaggtacttcgaatttggtcactacgactggccaaagtaatacaaacctcccggtggatctgaatagtaggtccttgcctcaaagggaggacttttcattggcgcctcccattgatggaaggaccattaaggactagcccccaggaataacaaccggatctcgtgtccagtactacactggagagataggactagaaattggtgaggcacatgtggacttgggagaatatctcgagttagccaaacttagagaagacgtcagcaaagatgacttaactgaaggaccacactctgctagttgtgatgtattcgctcagtagagcacgaactcttgagatggatggatgcccaagagtacatcttttaatctcaccaagcagagctggatcgtcgcaacagagaagccaccaatctaataaggaggttaaatcagagaattgatggaagaggcaaggatctcatcaaagatccactccaaggaagacttcccttacatgaaggaggacaggccttcccacaaaggtctaatggtgagaacaaccatatcccgacaaccaacagtctagggggcagctagggatctcaagctcaacaacagcctccatcaatcagccttcgaccgaccagacactagtaggagtacccctggtcggccagaggagtacactccctccccgagtggagcgagcaactcaaaggccaatcttcaactaacaaggacttggagtgggtggaaatacccaaagcgacaatttgaaaagtgaaactgatcacttcagacatctagatccactaa

SEQ ID NO: 28005 - DNA, 4406 bp, Cannabis sativa
taacaaatattgtacgaaatatagcattttatctcggcgttaatttatttggggataagatgaatgaggttacatctcaaaactaattgacaatattcatcttatatatggtaatttatttctatatattaacaatgtgtgactaactccaatactaatccctctaaactcaagctaacatcgataaatatgattaatactttcatcatcttttattacacactgatttaatgattttacttgcataatttgacaagtaaatctcactgctcaagagttgcaaaatagtaaatcatactatagtaatgctacaaatcgtccaatgattgattaataccttttttgtaaatttcagataactaactaaagcctctccaaataaagcacaaaaacaagataaatggactaaaaactgagcaagacatctctcactatttcgagatagtgaagatattgtagtttcgaggtttcaacggccaattacagaacggtggtcttcctttcagaagttctgaagttgaattgtattcttgtgccctttcctgtacaaaataacacatactagttggtacataagtgtcaaatattaaaaccaaaaggttattaagaactggttctacgtcttatatattgtcataaatttaaataaataaaatatcaattctgaatgaagagaagcgtctgttcttactttgagaaccaactttctcaaggaaagaagacagttttatttataaatacagtacaagaagaagataatttatcctatttaaaccaaataaaataaaaggtgagagaatccggccaattgttggaactggctgtattaaattaccttcctaccaaaacatcacccttcacaaactcatttggaacccacacaatactagcatagatcacatttcatggaaatttaaatgtacaagtcagttgaagtatatagacatcagatttcttcaaattgcatcctagctcccaagtcccaaggaaaaggggcagggagaatttatttattactcaggatagtaaaaagatgttcacatattgatactattgtcgtataccttgagttcttgataagaaatatcatcttctcggtttccgatagaaaattcaaatcttagtgacaagaaaaactccaacaatcgctttctgttgaataaaatcaaaataacatgattataattgcattatgacaaaattcttcttaaacgattttaacagctcttacttgcatagagaagactcggttgatggtgataatgcccccttagaagatgtgccttgctttcttcccgtggttccgagaatgacttcatgcaacccagacttattccaacatattgaatatctgttggccaatatttataaatctataggtagcaaaagccagttgagaaataacagcagcagcagctagaacagatcaagttcaaaaatcaaatacccgcatgttaaagtaactgaagcagtttccgcatgttgaaactcctttggtggtattggagctgcccagaatagtggctgcaagtgacattacaaaattatgaccctatcatactgataatagatgtaccagacattacaaattcacaaacctggttcactcgaaagggactcattagctcattcaacaataatggacgaactcgatcatataaagccttcttcaagcaatcctccacaagaacctctctggaatagttagaagattgaccaacagtaatggaagagaggtaaacaggttgcagtaagtgagaaagcaaagctcctgaaacaagatgaatagccttatcttttagccattctaaaaaatttaatattagcataatatgttgaagatatacttaaatggtaccacaccttgccgcatgcactagcaaaaatgcttaaccctactagaaaattagcatgtgttgcacgagctatgtcatgatgaaaaatttaaactactacagttttctttcaagtttttgtggtttcatttagctattttttaacctgggaggcacttcttgtataaaacaacataccttgaactccaacaacattccaacgacatatcttgtcagagcagctgactgatgatgtcgtattgcctcgaccaggtttcctttggactgagttaccaagttctgaagcatcacctgaaaaataataatcctgtagtcaattaacaccttagataatcaaaagcacagatacaattaagctaatatttaaggatccactacagaaactctttatggaagcctctccattcatggaatccttgagctcagcacaagatggctggaaaccgcattctgttggtaaaacattcttctcaggtgcaaattgtgaactcgacgaagcatccccacctacatgaaacatatcagagatccattataaagaagtttttcagaaatgtgcattatctaaaccaatgcgatagccataggaaaaggtaactgtttattatacttaaagcattacacatagttacatggaagctgtgatatatacatgtgtaattgccaacccttcttcattctatattttcttctccccatattatctttgtccagttccaaaaccaaggttgcatcatcatcatcatcaccttcagactgtttgtttccatcaccaagtttttgtttactgtaaatttcagaatttagctgaatctgcgtgtaaaagtacctattaccatagaatgggaagccagaaaactgtattattttccacataacaagtcacagaatttgaaatattcactgtcagccaaaacgtcattaagtagcaaaccaacaactacataggtcaataccgattctgaacctcaaaatagaaaattaacaagcaggaaagcaaatttccagtcatgaattcactcatattgttagaattttggataaagtaaatggttccatctcaaaactaattatatatggattttattttcccgcattagcaataatgtgggataactctaataaatatacaaataaaatcaataaaattaacaaactttcaatgaaatccgtacacgcttatatgtatgtctatctataggcacatacataaaaagcatctatagcaaaatcactccagaaagaaacatagtagaaaagacctcaacaaggatctccgtgcaacgatttcagcgtgagaatcgttgactacatcaccatgggagctcaagcgtgatcgccctatacatttcgtcccggttccaagtgctacaacttccaattctgttggcaccataagaactatacataaactcatgtatacatatacactcgtatagtaaaggaatagctgaattgatttccttgaaaatgtagagagagagagagagagagagagagaaattgtgaataataggggatttaacagaggaccttgagaaggggaggagatgagaaatgcagctaagacggtaacttcgcgaccttgaggctttcctttcttcgggagagacttgtaaagcgagaaaaccttgcctgaaacttgatttccccattgtagtttcgttggagaagaaggagaggacgacgccgttttagggaagcactccatgtccagttgtccacggttcagacttcagaagcagaaatctctgtacagagctcggagcctctagacatggttttgggccattttgcaatgaggttggacttgaaatgcaccttcggcatttggaccacgtaagaataaacacaatgaaataaggccatttactgctatttctcatgaaataatagggattatttcagatatactgatttttttttacatttttacggacattttttttttttcgcttatgaaaaacaatgttgttttccttctaaaaaataacaaatctgtgaaaatatgaagaaaaataaaaattctataaaacatacataaaaaatgtggcattttgtatatatttttcaaaataataatagcatataaccttttgttttatgtttaagccacgtaaataggctggcccaagggtaggtccagttaagcccaagcactcttctttttgggtaaggcccaactctttttcaatatttatatatttaacattttcttcttgataattatttaaatatatttttttgagtatgtaaatatatatagttaatttggttgtaatattatacttaaattttagttttggattctgattctaaaacatcaaatataattgaaaaaaatttaaatttagttaattgtcattttaaattcgtagtacataatttggactaatataatttaattaaaatatcaatttatgatactttgtattaaaatgaaaaatgagaaattattatttttatgatatttgtggcaaagtttacaaaaatgaagatttttgaaaaaacaaatatatgagtgttataaatattaataattatgtggat

SEQ ID NO: 28006 - DNA, 1700 bp, Cannabis sativa
tattttcctaatatgataatatttaaaaatattatttacaaattataatttttttgttaggggcctactttttaaaattagaacagggcctcaaaaatatttgagacgcccctgattggtagtctaacatcttggatccatctcaatcttatcctgctacctagaagactgtccaaaaatatgtaacacaaaattactcattagaaaacaatcatcaatcttggatacttttaataatgttcatgatatagtaatttttaggaattttaatttctttgctgaaaattattatgaaaaaaataaattatctttgatgtttttagaactgatggtgttactgctaccttacactatttttagactgaactcaaaaaatgacttcaacaaaccaccatatatgataccaaataagtcacaccagaatataaacaaattaccatacatgatacaaaataagccacaatgaatacaaagataaacactatatccacgatacaaaacaaaatgacaaattgcacatttataaaataaaatcatttttaaaatacaccaaatgaagatacctaatacatgaagatacctaatacaaataaatgaaatacctgctctaaagaaacaaaaatctctttacttgtttagtgataaactaaaatggaagcgatcaaactattatttctactttgaaaataatgtcattgttcttaatttcttgtcaagatataatataatttagctactacaggaaaactccacttcagttccatttctttcatgatagacttttgaaattaattaaatatataaaaaaaaaaattagaatccataatggagttaaaggtgataaacttttgaaattaattaaatatagaaaaaattagaatccatgatggagttaaaggtgataaacttttcatgtatttcactttctatttttgatccaaaagcttttattgtttctcattttgacaacgtgatcaagctctttattaagctacgattgattttgtaaaatgtgctttggagtttagggccggtgtttggttgttgtgttatcttgttagtttgatttcttttttggataaaaaagagaattttcaaaaataccattcttttatgttttatttataattttatagcttaaaatttttaattataaaaatacacttgtaaagttataaaactacaaaaatatattttgctcagtaaaaagtaaaaaaaaaaaaaataacaactaaaaaataacgaaaaattaacttcatgacaactataattcaactattaaataactaaagataatcagaaaaacaaactcatgacaaatataatacaactataaataaattataaaacaactcaaaaaaaaagtttattatttttattgaaaatgtatttatataaataaaatagttcaaagagtaaaactgaaagctttttcgtgttgatgtatttttgtaattttctttatatttttggtctattatgtaaattttttattaaaaaaaaaggtttatattattttttgaactctgtgttttaataaattaccagtttggactttatattttaagaaattatattttggacttttttttttaattattacaattaggaccctaggttaaaatatttctaaatatgactgaaatacccttagttataaaaagatttatgcaattttttggatcttatattttaatata

SEQ ID NO: 28007 - DNA, 4274 bp, Cannabis sativa
aaattctcaatagttagaacaaaacaactctcaaacaaaatgttgacgctaaaaagtagctgacatcaactcactagattgacgagatgattgaacttaatttagagagacacattatttatagtagttcactccctatatcgtgatagtgatgggactacgtctacttcgagtttttatttctcacgagatagtaattacagcaatagactatgtatcagaaactccaaaatctagagagaagctctggtcttgtgggtggtttttagaatgtgaaaaaagagttgagggagctctctttttataggtgatggaggcccacacaaatagaaaaaaaaaatacaaataaagtgttttccaccattgatgatgatctaacggtaaaaattagtttctggtggtgatggcttatttttggtgcctagcgggtctcgctacgagttgcccggagcttattttttgtaactcacttggggtgaattttgactacgatagcttcacaattttgattgggccgtaacacatgacttcatagagggcataaatagtttcaaaatgcaagttgaatcgtgtcagttggataaaaagagtgagttatgaccgttttactgaaagcagttcaagtcccaacgcccaagttgacatcatacatcaacttggatgttgtataagtgtaaaaacgtctaaaggaagttctttgagatgtctaagtgatggtttgacactgcttagtccttttatatgttttggtgaagttggacacatgttcttggagatattgctgttttgtgaaaataggagactcgaaacttttgattttcaagtgactaaatttgtcaaaaattaagttattaaagttttgattttaaaatataattattaaaattttataagaaaataaaagattaaattatactattagattgtaagttatttattgtttattttatttaacttttaaattaattataattatttaattgtgatctaatcgctaaaataaatgtaatttgaatgtatctattaaagaaaatttttattttcaatatggattatatgtgacaagtgatggattcactcatcactttcttcccccaataatgtgcatacatccatatggttatgaattatgattttatacataaaatttgagaatatagtttacagcccatgacccccaaaaaagaaattaccattgactgtctttttaaaattttacgatttattcgtttaaattattgttgttttaattgttgagttatgtccaaaaaaaaaaaaaaaaagcaattgttgagttggagttagagcttattgtttcaatttcccaacattacactttttttcttagcaaaaggaaaaatatattgatgtcttacaaaaataaaaaaaagaaaaaattgtgtctgggtgagtgaggatttaaattttctaatttagtgtaattttcctttttatgtcaaagtatttttatattgtgagataaaatggaattattgtgttaaattaaaacaaagtattttatcgccataaaaatgtgcagatgtcataaagaaaaagaaaaaaaaaaaaactatagcgaacagttccatttttattacattgggacaaaatttgaagaatacaatgtacttgtatgggaaaaaggattcctcatcttcttcatcatcatcttcttcttaggcacatttaaagtgtttttgcccaatattccaaatgggaagcttgattttatttaggtgttggtagtgtttgtgggacaagtaccaagttcacaatggggtgccgtgtgacttaggcaaagggagaagaaaagggaattgttttgttaatccaatattccaacttgtgtgtactctgcctttagcttggcttgtggtccaataataccaaagttgcctttttggtgaaatgttttcattaagcttggaattttggaggtcgaggaggttcatttttacattgagcaaagctagcttaattaattggagcactgaattcaattcaagtgatcatctcatttcccaagccattcataagttagttgtgtacaattaattgttacccacttcattaagttaagtttgaagagtttcgatgcatatgtaaattgatctatctttgaaggtactattggtactaaatatttttttaatttttaaataatattactaactaattatagagtgtcacttatagataatagtgctcaatagccataggctgacctacataaagttcaaaaagagctcaatcacaccctcaaattttacaacagatcatataaaattaaaaatagaaacaatatataattgttagataggataatttgtgtaaatatttattcattacttggtagacctgattttttcaactctatcttctatttttatttttatatatataaatctatttttgaaaataaaaaaaaaatacaaaagtataatcatagagcatttaaattataaataatttttctgttgttaaaaaagttatcatgttaaaaaattgttttaaattatatttaatttataattaatacaagatcttacataaaaaaaaaattaaaaaaaacaagaattataaaatctcatattattatttaaatactaaaatttattttaactttatttaagtaaaaaatgtaatatatttttgtaagtttcagtaaagatttaattaatccaccctaaataattgtcctcatctgaaaatgtatatctatccacaagttttacttttttgttgtagggaattgatattttattaacagatcaattattattatttgagttaccactttgtagatttttatcgattgaaaaagaatattctaaattatcgcgattattgtaaatttattatttcatttagaaagatttttagttgcaatctctttatttcatttttcccaaaagcttggtgggcgtatcactaaataacactaatttggcgcaagtcgccaataagcacattcatttttaatactaatgtttcaatatttaatattaataaattgaatcagcttcattaaatatttattgtggctcctgactaagtaaattattttttaaaaaaaaatagacacaatgaagtgaagggagaaattcgcaatagttcttcataatttgggacttttattttttcacaaaaaaaataaaataggagtactaagactaaatgatcgtaaacatatttcttatattgttattaagaagaagaaagtaaaaaagttgttatgatatcattgatatgtatctatagatacatctctttaattttgtcaataatattaatgtgtacacaaaatattcactggttttaatttaacatggcctacaagctagacgagactagattctcataaaagccacaattatatatgtgtataaatggacaactttaatttggttaagaaggacgacaagacccacaaactttatatatagttgcatatcacttccttatccactaagttatcgattcagaattttcagaactgattatggtgtcaattatttaaaaaatatatataaaaattatatcacaatttcgttttatttgccaactctgagtatactggcatttcgacaatacgctgaatctcacgattcaaaaactatataagcacaaaaattaaaaattgtacgattatatatacagttattaaataaatgcaagttgataaagattaatgtgtgttcattagtatgtatatatgattacaaacaatgtctctacacaagccataatttaattttagtaagatgatgaagttgattgatcaagcttcactgtacggacagatatgtgcaatattaaaacacaccatgcttgtacttgtaccctactagttaccacactacttatttatatatatatatatatcatgtctttctaatgaataatgatacgaaacataccatgttatgatgttaagtcagtataattaatttcatatataacaatatcatgaattatgatatatatatatttgtttattaaactctattgccgatgctttcaataattattaatcctcacacagtcacacccaaaatgttttaaatatatattttttattttttaaactggagactcataaaaattttcacaacgcactaagtcgagtgtactgttattgatagcctctaagtcaaagttaatttatctacatatctactttttactattcgaatttttttgagtcaattgttacagaaacttttttgtttcctctctctttttttctatcgacatataaatttgacaaaaat

SEQ ID NO: 28008 - DNA, 2682 bp, Cannabis sativa
gtttgggtctaggtccgagtccaagtcttgggtacgggcccaggtttgggtctgggtctcggtccggatccaggtcccacgtgtttatcccggtctgggtaagggtccgagtctcggttcgagtccaggtttgtatctagattcttgtctaggtccgagtctgggtttgggatcgggtccctagttcaggtttgacccgataccggacccagaccaagagccgcaatcggaccaggactgggactgtaacaggacccaaacctaaacctaaactcagaccagaacccataccaagacttgaaccagactagcacttgtgacttgggatctaaaccaagaccgggacctgagcccagactgggactaggacctagaaccaaacctcaaaaccgggccgaacccaggacccaagaacaagactcggacctaggacacgaaacccagagctagactaggaatgggacgcgaacttgtacccgaagccaaaccgggacctggactcaaaatggacctgaaccagaacccggacaaggacctaggacccgaatatagatgggggaccctgacctatgaattgggccccaaaactaggcctaaaacttgggccttagaacttggatcgagatcggggacctgaccctagacccagaacttggaaataggacccacatcgggacatgggatccgggactcgatggttggactcgattcgttgtcgatgtctagatctaggacttagaccagaacgcgaacccaaactcaaactcaaattaggacccggacacataccaagacccagacccacacttgggaacaaaaactgaaacttgaactggaaccggaccgagacctagacccaggcccgaaccctgaaccagagccagcctcgaaccctactcgagaccaaaacccggacctgaacctcgcctcgaacccgtacctcgtgacttgaaactggacccgaaactagaagcgaataaggacccaggaacaggaccaggattaggacatggacccaaacgcaaaatgtaaccggaccaggatccagactcggacacaaacccaccctgggattgggtccaaaacccggacaagaacctggtccaagacctagaccttaactaggaccttgatcgggaccccaacccagacctgaaaaaagacctggactcagaccaggacccgaacctagactcaaaccttaacccgtactccgacctaaactcggacacaaacttgggatccaaacccgaacctgaacttggacctagaccgggacctaggatccagacctagatgggagacctgggccccaaacccaaacttggagtaagaatctgaacctagatgggggacttggacccaaaactagaccccaaactcgagacacgggacccgacctttgacccgcaacccaagacctaactaccgagacacaaccctgaacctgaacctaaacccaaacttaggacccgacccaagatccaagacctacactaaaacaagacttagatctgaatctggaccaaaggctttgacctgacccgtagttagtgtttgaatccaagacccagacctggatccgtacctagactcggaatcagaatcagaccaggtgtgggattagaacctagacctgggacagtaacaagaccaaaacctaaacccaaactcagaccagaacacataccgcgacttggacccagacccagacacaggacccagaccgggttggagactaagatctggacctaagacccaaacctagactggagacccaaactcaaaattagaaccagaatcgggaaacatgactaggactgggacccaagacccgaccccagtctctatcttagacccagacccgaacacggacatggatcgagtcttaggatctaaatcaaaacgagacatggacccaagatttggctctggatcatgacctacgacttggggcatggacctacgacttggaactttttccaaaccaggaaccaaacactaactcagacccaatacccaaaattaaaacaagaaccgaaatcaggacactagaataggaattggacctcaaccaaaaattggatctagatgcagaatcgaacacggacccggacccaggcctggatcgatacctggaccccgacccgaacccagacctagacttgcgccaggacctgcaacctataacccgaacccaggacccgtgactcaggaactagaccagtacgcagacccagacccagaacaagaccaagacctctacccagacacagagtgaaacccggaccgagacccagaactagacccagactcagacacagacacagacacataccagaactcaaactcaagcccgggactcgaacccagaccaagatcaggactaagaccaagacctggactaggatcgagacctgaacctggactgggactagaacctagattgggaccaggatcgagactaggacccgagacccgatactcggacctaggacttaagaactgaatcgtgagcaagacccagaccaggccaagacccaagacaaggaaaagtaccaaacacaaaccgggacctgcactcagactaggaccctaaccaagaccgggacctaggaccctgacctgaatcgaggagccagacccatgactaaggaaccaagtgttggaattattttacca

SEQ ID NO: 28009 - DNA, 1618 bp, Cannabis sativa
tagagaattattttaagtttgaatgtttttttaaatgtcataacaacttaaatttgaataattttatgataaaattaccaaaacatatagctttcgttgctctgctttcttctcccatggcgaggaagtaaaaggtgggacgtaagctagtcattcgatcccctattgacgattgacaagcaggatgtgaggaatctgaggatgtcgacgagaatggttcgacaaagggattaaacctaattggagacttggttaaaaaccaagatattctgtcttctgaagatgttgttcagggcgagattcagagatccacaagccggccgatggaggttgaggaggaacagagcaggcattcgaaccttgaactatctccaatgtctgcgaagaagacctgggaaacattctcaaatggaaaagcaatgaatcgggatcaaaagcttcttttcatagaaccaatgataagggatggaatcaagatagcacaagttgatttggaggaggttagagaagaggggaattgttggaaatcagctttaatctgcaaagttcttggagcaaatcctcctgttcccattttcgaaggcttcatcaaacgagtctggggacatttggggatccagcaagtatctaagatgtcaatggggctaataatggtgagattttgagatgaagcaaccagtgatcaagtgttggaagcaggagtaatccaattcgacaaaaaaccggtaataattcgaccttggacaatggatttaaatgctttgaatcttgtacattcggttcccttgtggataaaactgcacgatttaggccttcaatattggggcaccaaaattttaagtgcacttgtgagcgcaattggaaaacctataatggtggaccaacacactaaagatagaacgagattacaatttgctagagtcctagtcgaaattgaaatcacggatgcaccaccacggttcattccttactttaatgagtttggacagctacaagaacagaatattgaatatgaatggctcccatcaaagtgctctagctgttctaaatttggacataccaaagcaacttgttggcatgctgaaattcagaaaaaaagggaagaaaaacagctaaagcaggttcaaaagaagcaaaaggaggcaaaagaaaccatggaaaaggcaagtaatagcagccagcagaagaatgagtggattatcccaaagaagacagccacacagagaccaaaagctcaagctgcaataggggaaaaagttgagcaaatcagcaaccattatagtgtgctccaggagcagcaagaaatgaatatgggagaccaagaaggcactgtgcaaatcgattcaggtactctcaatattggccatggataataccaatattgcttgttggaatgtgagggtaataaataaagtagagaaacagaatgatgtttatgaattttgttgtgtgaataaaattggtgtttgtggtttgttggaaactaaacttagggggactaaaatcagtgacatgatgggtagaaaattcatgaattgggattattatactagtcctatgattgaataccgtattcttatcttgtggagaaggaactttgctcgggtgattgttgttc

SEQ ID NO: 28010 - DNA, 2991 bp, Cannabis sativa
  modified_base (32)..(37): a, c, t, g, unknown or other
  modified_base (2891)..(2894): a, c, t, g, unknown or other
gggtcactcatcagtccatgaagcagccagannnnnntactcgtgtataagagtcatgagtccgtgggtataaggatccaatgaagatttgaagcgaggacgttacaaaaataatttttttctctacaaaagactatggagagatgttctaaaaaaaaaattagacaataaaatattcaggttagattgcctatatcctatctaaaattctcataagagattttttttttaagataataataataataataataataataatataatatatctcaacaaaaataaataattaaaaataacaaaaaactcaatctctcaataaatcaattataaataaactataaaacaacaagaaaactaacctcataataactataaataaataaaataactaaaaaagaatatcgaacaatttataaaaatttgtattttgtcaataaaaaagtttaaaccgtaaaaataaatttttttcgatcatactaacctacttttgtaaattttttgatctattatctaaaaatttcttataaatgtatgcctcattaataaatacgactttaatgaagttacatatagatggatttttcttccaattaattaggtagctaaagccaaaagaaaaaaaaaagattgattattagttgtattgtagtacgtatatatatattattagtaaatgaggaattgtggcatatgatgaaaagaagagtagcatgtatagtacaatatataattatttgtgtatttattacatctttatattttgatacagtaatagggtgcaccattattgtttgtacctgtctctttccaaaactcatcatttatttagatgtatatataactatatatgaatataagagaagtcatcatcatatataccctacacactagatatatactttatatataatgtatatagtttttaagcttttaggattccaaattggttaagtgagaaattaaactaactttaagctagtattagaattgagtaggttggtaagttcttatgtaactaactttcttttaagctttgttggttagttaattaagtgtgggttgatcttggtgagttaatcttaactaattttatattctctttgttgatttgatatacaaaatgcaatcttttaattttgtgttaaaacttcatgtagtatcagaactttctctttcttgaaattatagaaactttgctaattaatggctggccatagagattcctctcactcaaccaatcccaattcaaccactatttttcttccaaaatcttctcatgttaccttctctcattttttgtatgttagattagatgaacacaactacttttaatggcgtcatcatctgtttgctacgatcaaagactgtcgactttagcggcatctcgatccagctctcacacctctaaaatttctcactaatgaagatcgattactaaatcgtctcaatcgcaagtgtgaagattgggatcaacaggtctcttggctactttcatcaatgtccaagaaaatttccactcgatcggttggatctgatacaatagctcaaatctggtctattctttcgtgagtatactacactaccttatattgagctaacattgagaaataccaaactcagctcaaaagctctcgagtgaagggttcttaagtgatttttaaagatcgaaagtcttgtcaattttcttattttcatcggtcattcaatgtcagctcaagatcacaccgaaacaaacttcaatggtttatctagtgaatacaatgtagttatgacatctataaatacaaacttaatgcctactctaatattgttgagattgaaaccctctttatggctcaaaggttcgattggacaaagacaatactgagcttgacattgccgaggcagaagtctgtttggctcacacaaaacccatgtcttcctctaatattttttctacttttgcgatgtctagtgtgatagttagtagtcctgcgatccgtacaaagagaaatatctggtaagttgtgcaatcccacattgtctggaaaatgtcaagtttgatgattctaagactgtgtaggtatgagactacgcaattgaagataacctaaatgcatgaattgattggtactacctatataaacaaggtgcatcttttttttctagtattccatcagaaagaaactccacaattaagcgtacttgacctgaggtaattttataatgggtcctgggaagtttttccagcaagcgtgcgagtgaggacaaagcaccctgaaaatactcgtgttggtctgtaggaccagacgtcagccagagtaacgtactcgtgatacatcttctatctgttttgcattcctgagaactttcattctaatttttttcgtgatcatgtacgttataattatttaggaccacttgataagttttagaaaattctgcatatttataataccaaaaataatgttaaaatattttgttacacccataactatttgttctcatacatgttgtcagggtcaacgaccatgagtattaatgggcccaataatttttttatgtttgtgtcatatctaaactgaagtttaagtattgttgggcttattaattttataaaattttacaaaaaatatcatttttttcactatataaaagtatatagtataaaaaaaattggccctgaatttgactggaacctaagcacgaacttagcctaattagtccagagtcgagcttgcatgttgatatgtttgaattttattttttacattgtaatactatttgaagttttatgaaaatttgcaagtactgatcataattaagtagaacatacacaattatgaaaaataaaatgactaaaagattctaccgaaacagtttggggtcaagcacgcttaactgtggannnntttcgtgatgggctaccgaaaaaaaagatgcaccttgttgatataggtagtaccaatcaatccatttaagccctcgtcaactatgtagtcccatacc

SEQ ID NO: 28011 - DNA, 5143 bp, Cannabis sativa
gattttatctagtaacattttcttgctgagtcattatgactcactggtgcttcgtgatgcaggtaaggaagtttgaagctgtgttcggccatgagtcagaggtcatccagtgatgtacatatcaatcgtagtgtcttgacttctgagaagcaggttcgacttcttttctgtgtttggaaatgtaactttagttttgtaatagtaatttgtaaccaattgtaaaagaaatttatatacaggggatccccatattatggtatatttattatgaaatttttatttcaacttttaaaaaaaagtgttaattaaatcacacttttccaaactaatagattagtaagaagtaagtttgtaaaagcacacacgtggcgtccctgagagtcagggcgttacaacatggtatcagagcaaccaaggtttaaagatcctgaagactggctcgatatgtacattggctgcaaaagactcgttcgactcatgacttagtaagtgctaaatattagttgattactagactatttgtcaattttttgaattgcttgcttatctcaaatgtgtgagttactatagaagcatgatgtattttgatataaaattgttaaatatgtttatgcatgtgcagtaatacttattagcattaattctagtgggaaagattttaaccacaaaaaggaacggtcgcgagtgtactaaaaggtgtacctgaggcgatatagtaaggataattgagcttaccaggctcagagttggcagtgtgagtatgaatcttccactaccacaagactgggagtaaattcacactatgaagtaagagaatatctaagtgggaaggttgaagaacttgtatagttgatcccggcagtgcagtgatggagaatgacattaagctggactgatgggcaaagttttgcctttgatgaaatggctggtaagattgctaggaaagctaaatttaatttaaggtggaaagagtatatcacttggaatgtggatgtaatgactaaacaactaggagttgtctgtctttatgcgcaggtggtcgagctaacccttattgtgagggtgcaaggactagattacaaatgaaacaatataaagagagatccatgaaagtaaatgttcaatgttggatcgggtaaagggtgttaaccctaataaactcaatggaaaagattacaaacccaccagttatgagttttagtaggaaaatttaaggtaatgttggggattggattgacttgtaaagtgtagtgtaaatattgagtgtgaaagaaaggtggcaattcttgaatcaaaaggtgaggatctatttgtgttcttgggaggttcaagggtcccaaaataatcacggcatttaaggcagaagatttattatgggatggatgtaccaacctttcagttagtgtggcaaatattacaaggaaacatcggtggaactgagacacaatcttgtggtccaagagtttctagatgcctttttcagaagggccaccagggttattgataaaatgggaaattgactctgaattgaattggtactggaggtaaagcctgtacctaaagttttgaattggatggatattgtagaattgaaaggggtaaatattttgttgtaggaaatgttaggcttgaaattgctagatttacttgtgaagaagaaggacaaaactttatgagtgtataatgaccgctgggagtgtgtaatgaccgttaggagattaaattaactaacggtgaagaagaagtatcctttgttaaggataaatgttatgttgagcaattttttttaggaaagggttatcttctctaggatcggtctttgctctacttattaccagtgtaagacttgaaaggaggatattcctaaaacaacttttcgtactgatgacttcgtagttgtcttcattaatggtattgtgatttctttcaattcaaaggaaacatatgagagacatatttggatggtgctgtaacatctctggaagcataagttttatgctaaatataagaaacgtgagttttgatgaccccaaatttgctgtgaaggttagagattttttttggaactaacatgatgctatagaatatttgttgagggttttctgtgcccttagtggaattaaattgaaaggattgaaacagaggtcaaccattgctccagtgttaacattgcctgtcagtgaggagaaattgtgatttgatgtgacactttcaaacaaagattagattgtattttgctacattctacgaaagttattgtttgtgcttctaaatgattgaaaagtgtgagtaataatattccagttatgatattgaattgatagcagtggcttctgccttgggagtttggtgcttttacctatttggcaaaagtacgaagtttatacaaatcataagagcctcaaataccttatcatttggaaagatttaattaggaggcagcaatgattgttagagctgattgaagatgagaacagtgtaattccctactttttgtgaggaaaattagtagtggatactttaaaccaaagaggtctaggacaagtttgtataacgaaaagatctcaccaaaggttgctagaaatgtaaccagaacagggattgagttcatgatgggaaaacttgttaatattacattatagtttaatctgttgaaaagaaataaagtggcctagcagagtgacttcgaactttagaagtgtacgaaagggcttggaaccggattgacaaaggacttttgattttgtttgaaggaattttatgatataaaaataaggttggtgtatcagtcagataaggatattgaatagaaggttctaaatgagttttgtattacactatactctttatacttgggagtaactaagatatgtaagatcagtacagtttcttaatcagagtggaatatgtttgtggtggattggtgtactaatctatttgtcaagagaatagttcaaacctatgatgctccgaaagtaattatctttgattgagattgaaagtttacatctaaatgctgagagagtctgtaacaagcatttgaaatagattttgaggattcctggaataagcatcttccgttgattgagttttcatgtaataacagttattagagtactattgatgtggcaccgtatgatagctttatggaaagaatgatcatttgcccatttgttggagtaaagtcagtgaacgaaggaacctcagatctgaagcgatctaagaatgagtgaggccataggaaagattcaagctcgtatgtgtactttatagtttgaatgaaagagctatgctgatctagagtatagggatattaaatttcaagttgggaagaaaggaaagttaagtctcagatttattggtatgtttggggttctggaaacaggaagattaggtagcttatcagctagccataccctctggcttacctggagtttacaattggtatttcaaagttcagaagtatgaggcagatatgattcgtatactgagttacaaaagtatggaactttaattagacttgtcatctaaggaatagtagattcaagtttttggactagaaaagaggaagtactgcgaaataaagactataatgttagtaaaagcgttgtgaaggaacaacaagattaaaggcgacttaagaattaaagtcgaagttgcaggaacaatatcatgagttgtttagacaaatttcaagcacaaaatttctataaggagggaatagttgtaatatctcggaaaattattatgataattaagtgggcatgcatattttattaaatatgtgattaagtgggtatcaaagtaggattataatcctacttaacctaattacaaattaattagtgaaatgtgattaaaggaacaattaaagcgtaatttattagttacggagatgttatcggactatggggtatcatggatacaatttccaaaataaaatatatttgggttcggcagatgagttaaatggccctagaaatttattttaggccaaagtgttatttacgggtaatatactctttttgggtgatagacatagttttgttttacttgttttattggttggataagttatattaattaaagtttatttgatttttttatgattaaagttagtaaagatagatagatagaaggagataggatagtagtcatcacctccatttctcttttcattcttacccgacccataagaggagctacaaccatggatttttctagtttgattctccatgtttgagctgaattggcaaaggatagaagttggttaaatattaaggtaagttcttgatacttttccccttgaatttcttgaattttagggtaggttttggctagggttgtaaggatttcggggctgggatataagttgagtttaaaacctatttttaggcttggtttaaagcttgtctagatttgaactggttggatgtaagggctgcttagcttgggatgagctaaatgatgttttatgagttttatttcacttggatatacaatttttaataaatggatgaattgtggtgttttgatgcattgattatgttgtgttttaagatattatattgatctggagtagttggaaaggtttggttaggtttggagcaagttttgggactttgaagatctgaaattttcgagtttctggtgtgccaaattggaattccagatggtacagggccgcaccaaccggaattccggatggtcaacttttaagaatcgccgattttcgtattttagccacaacttttcactcgggtgtccgttttacacattctatgtaccgtttcgaagattatgaagagctctatggtatgagacatagattagagccaaaatatatattttattttagggtatttctaccataatatttggtagaaaaccctaggttattttatgcaggttttagacagtgttttggaatagacccttattgatttacctatgtcgtgagatgggaccaaaacttatcaagcatcgttccacataggtcggccaacatacttgactttgtacttgaggtaagaaagtattgagcactgtatatagttaacgttgtgattgttacagtctcgattatgatcgagatggtatgaaacgattatcatcgttgtgactcaattatgattgagggaaa

SEQ ID NO: 28012 - DNA, 5898 bp, Cannabis sativa
aaatagtaaaatatcattttttttttagaaaacactattatgattattgaatagaatccataacaataacagagtggattagagatggtatttcctcaaaccaagaacaattattatccaatcgaagagcaaatctcgctaattcgtgagccgctttattagcatcacgctttacatgagaaactagaactctaggaaaagaggacaataaaagagatatgtcagcaacaagatcatagaaaatagaaacataacccctctgcgagtgtttattgattgcatttgcaacaaggagagaatctgtttcaatataatctatttgcagcccgtgttgaagcgcccactacagactgtgaagaatagcagttgcctccatttcgcgaaccgaacaacgaccaaacagaggctttgataaagctcccacaacatcaccaaaatagtcacgcacaacagccccaataccaatggcagagccttcagcattaaacgcaacatcgatattaatattatatgatccagcagggggtggagcccatatactaggagcttgaggatgactgccctgaggggctctaacagatccattgttaatagaattgcagctagaatccatagaaacctgcttagcttgagccaagaagaattgttgaacatacatgtcagcaaaagagcagattaccccggtcggtttaggcttagtaccatggatttccttattttgttctgtccaaatgcaccacattagacaaaggatttttgccaaaacatcattctgatgcactacagctatagatgaaaaaatctcaaagccattcattcgtgagataagtggatccggactaaacacatgggagagagaccaaacttgctgtgctcaggtgcagaaaaaaagcgcatgaccagaggactcacgcagacaattgcaaagagaacaggtggcaacagcaaaaattttttgatgcattaggttgacctgtgtaggaagagcatcattaataaacctccaagcgaagattttaacattcttaggcaatttaagagcccacattcaattccaccagccatgatttagatcagaagttgaagactcattaattttatccaattgaacaaccaagtggtagccagacttcacagtttaaaatccaaaatcagaatgatgccaaatcaaccgatcctctctagagttggggctgatcgaaagagaaagaattcgatcaataccaatttggccaaaatgttgtctcagcaagttaagatcccattgcctatcatgagtgatataatgttccacaaaaagtataaggacggaaagtagtatttccaggcaaccaaagatctgaagcacatttgacagaaattccattccctattttccaccttaaccctttaatcaagagatcgcgaccatcacagatgcttttccaagtgagagaaggcaatgaacccttagaggcattgagaaaattcccattcttaaaataacgagctttcaacactcgagctaaaagagagtggggatcatccaaaattctccaagcctgtttggctaagagagcttgattgaaatggataaagaacgaaaacccatacctccttcagctttagattggcataataagtttcattttttccagtgaatctttgatttattagtactagaaccccaccaaaaattagccatcatggattcaagttggcaacagaacttcttaggaaggctgaaacaactcatagcatatgttggaatcgattgaactacaacttttagtaacacctcacgacctccaatggaaaaacgtttggcatgccaggagttcattagtttccagatacgatctttaatgtaactaaacagctcagatttatctcttccagcataggatggcatgccaggagttcattagtttccaaatacgatatttaatgtaactaaatagctcaaatttatctcttccagcataggatggcagtcccagatatttttcatgaagatcacaaataggcattcctaacacagtatggaatctattttttagcgcatcatcagcattaagagaaaaagacataaccgtcttatccgtattgagaagctgacccgaagcacggtgatatacatccaacactcgactgatggcttgacaagaagattcattagcatggcagaaaagcaaactatcatcagcaaataataagtgagaaatcgaaggtgtgccccgagaaatagacagccccttaagattaccattatgctcttctaatcgcaataaagcagagagtccttcagagcaaatgagaaagagataaggggagaggggatccccttgcctcaagcctcgttgtggagtaaccaaacctttaatagcaccatttatgttaaaggagagagttgaagaagaaacacatctcatgacaagctcagcccaattctcatgaaaacccattttaagcataacagccttcaagaagtgtcattcaactcagtcaaaagccttgctcatatctaattttaaagcagcgtaactttgtcttcctctctttttatttttgaggcagtgaacaagatcaaaagcaaggagaacattgtcagtaataagccttcccggaagaaaagcactctggttctgagaaatagccaccggcagaacttttttaaaacgacccacaatggctttggataccagtttatataacacagagcataagctaatcggtcgaaagtcacttaattgttgaggttggtctaccttgggaatgagagtgatgagagcagagttaatgtccttcatatccgccccttcattcaaaatctttaagacactagcagttaccatagggccgacaacatcccaatgttgttgaaagaacatagcagacataccatccatactaggcaatttatcaggagccatagattttaaagcctcatccacatccaaactggtaaagtcctttagtaaaagctcattcatatcctcagtaatagaagtgttaattgctgccagaataatgttcaaagcatcaaaatcagtgtcattcgaagcaaacaattgggaaaaaaaaagagagaagcctcatcagcaaaatgttgatccgtatagagaattcttccatcactagcacataaagatctaatcttgttgttattatatctagccttagctcttgaatgaaaattttttgtgtttgcatcaccacttttcaaccaatcaactctcgccctttgttgccaataaagttcttccttctccaacaaatcatctaaaactttctcagcttccaacatttgatcgtactgagtagaagagtttacccgactgttgtgcaatgcagcaacttttttctaggctgtgttgatatcttgtttcatctgtccaaacttgttgtggtgccatgtctgaagagcagtagaacacaaagaaatattctcaagaagattagacatagggtcctctgacaaaccatttttccagttgttaagacggaactgttcaaaacggaacctgctacgatttctaacagctgcccgatctctgttgggaagtgaaacattaaattcaattgctctatgatccgagctatagtaatcaagatggttaatatgattctcaagaaaaatgtccttccactttccatttgtaaaacctctatcaagtctctctttaaccaataaaccattgtagttcttattggtccatgtgaatttatcccccaaatagtccagttgtgtcacattacagtcatcaattgttttcctgaactcttccatcaattgttctcttctcaaaggaccaccttctttatcatcattagataaaagttcattaaaatcacccattatcaaccaaggatcctcaagagaggagggagccaaagaacgcaacaaattccaagtatgaattctttggttagtttctggggaaccatagaaagcagtaacgtgaaactgaggccagcaatcgtacgaaacaaaaacatcgaaatgattcattgagaaggaattaagagatacatcaacatgatctttccacaacaataatatacccccacctaaaccttgcctaggaacttccaaaccattgctaaaattaagaacattgcgaacccgattaatagaattacaaactaattttgattccataataaaaagaacatgcgaacactgttgtttaacgagcaacttgaggtgtctgaacgctgaagggttgcccaaacccctcgcattccatctaatgatcttcatggctccttgcagggctgctgatccgtaacctccgctgaaaaaaatgaataattttcattagaatccgacttggcatcagaaacttactgagaacagaattcattaaaagtgttgttgcaagtgttgttgttgcggcaacgtttcaaaacacttctgaaattttcaggatctacttgtttcttgaaagtcttatttgaggaacttccatcttgattaaactcatcagtcataatggcttttcctttgtcttaaaagaagtaattgtagaatcactgaatagagttttcataccaggaccattgataacatccgaggggggataagtggcaaaaacattagtttgggatgcggagttaaggtgattttgggtgtgcttgttgctggaattgggtgtatctgtaggagttatgggaaaagctaaggataaactgtggaaaaaagaaggaaagggctaaggaagctcaggtattggatcaattgtttggtgtgaagagttaggtgtatggttattttcagcctcagttagaggggaaggatgagggtcagtggtaatggcacgaatttggtgagtattattaggaggaattgttgaagcaatagacttccttgcaacacgggtaagaaaagggtaaactttagcagttgaaaaatcggtgcggtaacggtcatagccagaaacagggagtttgtcacccatcatagaggggccatatgggagatcaggatcaatgccagcatccaccaattccataaaaccagtacatttctcaaacgggtgcccaattcgaccacagtggaaacaaaaaatagggaggttctcataacaaaactcaatccaatgttcatcccgaaccttagggagattcaccaatttgcctctcataaggggatgagaaatatcaagcttcaccctgatgcgaatgaaagacccccatccttcatagagcgaatcctcaaacacatcaatatattccccaatccattcacccaccttcatagccaaagctctggatttactgagaaaaggcaatctatgaatttgcacccagaattgcaccttggacatatcttctgggacaacgttctgaagttgcttcggagagtgaatcaaaataagatgattgaagtagtgccagggttcaccattgagaatccttagtttgtctcatgcacaactaatagttagtaaaaataaattggaatgcatttcagaaacaactaccggaaaacgacatatgttgctcaagaattcccccatcttcttagtgaaagtttttgggttgaaggctgtggataaacatctagccacgaggaaaaatctaggctctgcaagttccacagaaggatccgcatcagagaaggagtgaactgctctttctttttcagacagcaccaggctcgactccatattgtgcagaatagaatccacaaacatagcgaaaacagagaatgagtacaaaaaacgtaggaataaagaaaagatgttgcgctgttgttcatttatagccccattggtaaagaagtagaggtgagaattcgtgtaatcatggcacacgacaccgccaaagacgggctgaatggatgaactggagaacatggagaaaacttccgatgaaattaaataatatataaatattaaagaaattaacaaattt

SEQ ID NO: 28013 - DNA, 2638 bp, Cannabis sativa
cgaactgagtcataagcccaatagcccataacattaagtttagtagcatcgaaaaaattgttgagattgttatctttgtagaacttggctttccatcgaattttcaaattgtcaagctctttcgattgtggcacaaaagtcttaattcccaaaactccttccattgaactaaaaatatttgaagaatattctaatgatgagcccaaaagattagtgaaatcttgtgttattatccaaacatagcctcgttccaacattccaatctttttagctatggaaaacaactttaacccaaggtcgtacgacatgtgaacaacaaaaaccctagtttgcattgcgttgagtttgtaaagctcaaacttaatttgatcgtcagtagctaatagcggtatgacacttcgataagggactctgacatcaatttctcccaaggcatcaactaaataaggaatgatgccttctccatattcattggcagtgtaaatgggcaccacttttcgccatccaaaaagtttgactattgaattaatggctttgacttgagatgagtcacttattgctgtttggaaaaagtatgagttttggcttggaataagagaaggacttgttgctgaaaatgatattattggcacttgagctttttgacctaaatcgatgatgaatttagcttgagatgaactatgaggtcctaagattgctttcacttgtacattttttatgagatccaaagctgttattcatgtgttacaatgaaaatatgtcaattaatttcatatatatataagaaatcaaattgactaattaaattttttctcaaaaaaaaaattgaataattaaattagatagggttaattttaatctgttttacggggttatctttagggtgagacagtagttgcccaaagcctctcaactcaagaggcctcctagcctctctttttcttttattaattattatttttatatttaactcttcttaaaaaattatcttaaaacttattttaattttttttatttatttattttttttttaacaaaaaagcttatttctaaaattttaccataaaagctagagaccatatgttgtttagtaaaactaaaattattattggtggagtttttaggatttctatatttagctgaaatatatgtaatcaaagtaatattaaaaaatgatatgaaatttatacgtatatattaactaatagttcttgcttaattataggtaagaaaatatctttgatctaaacattcaattagtacaaaatacaggagttctatttgctgataataatattagggttgttcatcaaaattaaaaaattatggttaaattcggaccgtagtgaaaaatataaatatgcaagtataaaaatatatgatacaaaaagtttctgggaatgaatatgaaaatatatggatataaaatgataaaagaaatataaattttgtaaggacaaaaataaaaaaaaatgcgatgataaaaataattaagtaattgccttaaaaaataataattaagtaatctaattttgtaggacaaaagtaaaatatttaaaattttagatacgaaattttaatcttttaaaaatatttaagccagagtcatgtgactctcctcacataacttatattgggaataacaaaaaaatatttattttaacttttaattgtagataaatatttaaatttaatatttaacagtaataataattaaattatatatatggaacttttataaatatctaattattaagtgtcaagttattatctatctatcatttatttcttattagtatatttatattaattttcaaataaaaataaaaatttaatgacataactactacatggtcattcacttgatacttaatggtcatgtatctacgaaagttacagaaatataacttaagtattattactataaataattaaatataaatataaatatctgcaaccgaaagttaaactaatgtatttataccacaaattaagtacttgtagtctatgacctatccacactcatatttttatatataaatataagtactactaagaaacaaggatttcttattgagaattgctaaattgtattactagtggctagcaccctccttagtgttataccgctattagtgtaattaaatagcgggtcctatacaacttaagaagataaattttaaagaatatcactgaccaatagggtgacaccaataaaaggtgctgggcaccactggtactcaataacaatgctctttattattctacatctatagaacatgtactacatgagttataaattagtatagtattataattatatatatatagtaccttgagaagctgcggtgaccacatcttctttagagtctctaatattgagaatcaatcttgtcttaaagtgtggatgagagttgtaaaaatctgagagacccaattcaatacaacttaaccaaatcttacccatctgagtttccatgtccaaaacgacaccaactttcacagaagcagtgtcgttttgagccatgcatgggatcatcatcatcaaaatccatgttacaattactaataacaagaatctcatcatttttgaatcttttcattactagctattaattttcatttactctctttctat

SEQ ID NO: 28014 - DNA, 2755 bp, Cannabis sativa
  modified_base (283)..(301): a, c, t, g, unknown or other
tgtacttttatttaaaaaaaaaattagaatttttcaaaattaataaaaaaatatatatttttaaaaggagataatttttttttttttttttaaattaggtaagccctaaacacaagcctaacccacttatatctagagtcatgcttaaatgtggactagactttttgatagaagacaagttttggagttataattgcttagttatcatcacatatatatttgtttcatataagaagagacttattctaaacgattttgttttattttttaataataataatannnnnnnnnnnnnnnnnnntaataataataatttattaaaagagaaatgctataaatataagaggcgaaaatgaggagagaaatatcacagccatatcatatatactagcttcttctatattacatataagattctatacattatacttttgatatatcagtctgaaaataaagatgaatattgaagttgaagcaatctcagttgagattatcaagccatcttctccaactcctaagaatattggccattacaaactgtcattaatagaccaatcagctcccttattctatgaccctttggtgttttattacacaaagaaaagtactactaccaatattaatccaaccaacattcttaaaaggtccttatcagccatcttaacccattactaccctttagctggacgactcaataagcatggagaattcatccattgcaacgatgagggcgttcccttcgtgaaagctcaagtgaatgctcgactttcccaagttctgtccaatccagtagctcaagaactcggtatcttttgccctcttttgactcgtcatcatgaaagtgacgatgctcatcaaattctattaggggttcaacttaacatgttcgagtgtggaggaatcgcggttggtatcagcatttctgataagattgcggacgctttgtcatggatgaggtttatcaaaacttgggcgatgatggctcgagatggaacaacggccaccatgttaccaaaatcgcttcatcctgagtttgtgtctgcggatttgtttcctcctagaccccaatctgtaattgaaataaaaaatgaagacctaaaggagggtatcatgacaaagatttttgttttcaatagttttgcaattgaggccttaagagccatgtattgggacaaagaaaataagattcgaccttctcgcgttgagactttatctacttttatgttaagtaggtttgaggctgcattatcagaagcgaaagcaaaagcaaaagcaaaacccgagaaagaaagggtttatactattttgcacactgtaaatcttcatccaaggatgaatccacccttggccgaaaactcatttggaaatttcttagtgtacgcaggcacacaaattccagcctcgagtattaagggggaagcttccattactagtgggcttgcgatgaaaataagagaagcagttaagagattgaacaaagagtatgttagtaaactccaaatgggagaagagggtgaattgagtatgatccaacaaaactcagaaagtatagagaagagaggaggtgaagtcattgaatttttggttacaagtttgagccgattccatttttatgaaattgattttggttggggtaagcctgattggtttagcacaggtgcttggagttttgataaaatcattgctttcattgacacaagtgatggtaaaggaattgaagcttatgtgaatttgaaggaggaagacatggccatatttgaagctgatgaaatgcttcgcaaatttacaactcctaattattattctcgccacaatatcaactcaaatctttaataatattaaatctcataatataatataataagtcccaactggttggtaattttatttgtattttcttgcctattatatataggtaggaattaatatatgtatgatgatgagttggtagacaatcaaatatattatatgtgcttttattttatttttatgcctaagattgattaagtttgttttggctaataagcttgctcatcattttggtgcctcaaaggttgaagctcccttcgtgtaatttgtttttgttgtttggataaattcattcctttcaaataataataacaaagtaataatagtgaagttaaattacatatttatgtatatatatgatatgagaaattctataatatttaagctaatatctatgtgacaatttcttttttaaaatgctattgtgatattattttatataatataatatttagattaaataatatagtaataaataatttagtgtgacaacatacaaatatatgaagttgtatatgtgtgagttcaaagctcttaccctttatattgatataattataaaatttgtaactcatatctataattatcactcttaatttatattagaaatataattgttgggaacttatttctatcatttataaggtgcaaaaatgatataaaggcaatgaagaaattttaaactgtttggagttattttgcaaaatgtttaataaattaataattggttactggttaccatgtgttttgaggttttacactattggtgacttgtttcttggagacggacaacatgttgcatgaccaattttcaacatacatttttaacgttttatggacgttgtgcactacaaaaaataactacttttaatgataattttttagtcacaatataaatttttgtgactaaatatgtgactacatatgatatttagtcacaacaaaa

SEQ ID NO: 28015 - DNA, 7402 bp, Cannabis sativa
  modified_base (6604)..(6606): a, c, t, g, unknown or other
ttcttgacaatgaggtgaatttcaccagccaatatcatttgaatgtcagcttctatctgagagaactggctcgtcaagactataattctcattaagagatgtctcaaactgattggtgaaagtacaaggagtgtgccatcctatggcgagatgggcgcctcgctattagttgcttgggtttactcgactgttatacttagtttttatactgtatattatgagataagtgtcttcacagtcattatacctcgcttacatctactcatacgtaacgaggttgatgtctcaccttgtgcatctaatgtcatatggtttcttaatgcatgaggcaccagtttgtatatatttatcttgcataagaccttatagtcagcgagttataaatataccctgtcacgtccgcatttaatataattaccgttacacacattgatccatattcttcctaccttgacacgtgtctttcattgaaatggtagccaaatttcgggtataacatattcattaaaataattttcaatattgttttattatgctatttgtttgttagaaaaatattaaaatgctatttattttgtttttttgtttaatttgtgacataaatacttaagtttaactctaagttgtagataaataattaagtttaattttttacggtaatagtacctaagttatatttttgatactttcgtaggtagttagtcgtaatgtgtaaatcaatggccacatgaaaatctctggctagcctaggtcaataaatttttaattttttatttaaaaattactttaaatatactaattcgaaagtgacatgtggataatgacttaacacttagcggtcatgtatttatctacaactgagagttaaacttaagtatttacgccacaaattatatttttttttatttttgtttttgctattttgtttacccagaaactggccctggtgacatggacatcaatgtttgacatgtggtaagaacaaaaatatcccagagttgagtagtcctgaatcatagcagtagacttgggataggtccttaaccatgcacccaggttgactttcgaagctccgaaatgggtgtttggatccccgcaaagttgtttccaacaaactatctttcagaattatataccatgaacacatgaataatccaagtccaaggcccagaagcttagaatacacgaaataacaccgtgaaagtcaacccaggcgcctagaatttcacccagcgcccaagtttacattccaactaaagttttcatttttgggaccatcttagtgcaaatgagtcaaactttatactggaacatgaattagacatgtcacgaacatatttgaggcattaaaatcagatttggaagccgaggcaccgctgttgacatgtacattgctagaagacctctgactcatggttggtctactttatccttccctttacttacaccacgaagtatctgtgagtcaaaagacctagcaagaaagcatgtatcacaaaactaaataatacgagctaataaaacattgtatagcgtacaattttatcatacacacatatacgcatgtccagcacattatcaagcattacacaacaattatttctctaataagacaagctgttcttgatgcctcataaagcatccctaccacccgtcatccacaagctatatatgtcactatcgatgcctgatacaacaattgataagtaagaaatatattcacggttttaagcgagtaattactcattgatactaacggtaatgactgtatcttttacctcgattataatcgtgtcacaaataataataattgtttcttacttaacatgcttagtagtgcatttagctttcttaccttagtccagtaatcagctgtgcgcatcgacttgagtggaaacaaagctcgacaatcccgggtcctatgtcacgacaacaaaatttgataaacaagttatccaaactctgcaaacaaaccctaatttcgtaaccagtcgtatctaactccccagtagtttgaaataacccaaacatcactaaaatgccctaaactagattctgggaaacaccccgtgccaaaaagaaaattcaaggaaaaactctagaattcccccaactggccaaccagtttgccagttacctttaaaactggttgaccggttttggtagatttgtggtaattctggttttacaccccgaaaccaatcccgacctccaccaaacctgatcaaatgctccaaaacagtcccataacataaaaacaatgcattcaaatcatcaattcacaacaattcatcaaattaccaaagttgagtagaaatttagctcataaaaccttaatccctctaacacaaaactatcagccctattcctaactaaattaagcttaaacaatctttaaatcaaacctaaaaacttgttctaacttcaatttaacacctcagccccaaaatcttaaaaccctaacccaaaactaacttaaaacttgaaaaatccttaaacaacatagaaaagaacttacttcaaagcttctaggttgaacttgggagtgaaatctgctagaatctaaagaaattgatgaagaactcctctgatttcagtgggtctctaggtttttcgaagggaagagagagaaggagcaaactttgggtatttcctaatttttctatgttataaatccttactaatataatacttaacatatacacttaatctaatcaaagaaatctcagcctaaaaacactaaaagacaaaagaatctaaccttgcaaaataattattctaccactccctttaaaacttaagctataatataatataggggtatttttgtcagttcttatttttctctgtttatctacttctcaacattttaacctagtccggtataattccaatacaacataatttcaaccggcgtgacatttctgaccactccatcgagttttccacgatcgccgaactcgaaaataaaatattttattttaaaatggtatttacaatacccacataacctgatgaaatctccataattaataaattacacttcatttattcatttaccagattgatactgattaactcacaattagtataagattataatcttaccccattattcaaataatcacatatttagtaaaatatacctaattaatttactattatatttttcgagatattataattatctcctccttaaagaaattttgtcctcaaaatttaccagaataactcaggacactgctcccgcatctaggactctagctcctaggtcacttcttcaatcttgttgtttctccacatcactttaactgacaaaatagtcttgttccgcaacacttttttcttcatgtccaggatctgaaccggttgttcttcgtatgacaaatatgtctgaagctcaatatcttcatagcttagaacatgagtggtatcagacacatacttccgaagcatcgagatgtggaacacgttgtgaactctagataaagtagcgggtaaggctagtcgataggctacctgatcaacccttttcggaatctcaaataaatctgggactcaacttttccttctttccaaacctctgaattcccttcattggggacacccgaaggaagacaaaatcccaacctagaattcaataactctatgatgtggataagcgtagctactctgtctactttatgaggcaagcatatgagctcgaatcttctcaatggtctcactcgttctttggattgcatcaggtcctaggtacctccgttcaccagcttcatcccaatgaatgggtgaacgacactttctcccataaagcattttgtatggtgtcgtgccaatagtactttgataattgttgttatacaaaaactcgatcagagggagatacttattccaggaaccttcaaagtctaatacacacgtccgtagaatttcttcaagtaactatatagttctctcaaaattaccatcagtttcaggatgaaggttgtcctaaactttaatttattacccattgctcgttgttgactttcccagcatttggatgtaaactttggatctcgatccgagataatcaactttagagcaccatgaagttgaactatctccttgacatacagatcagcgtactgatccaccgaatacgcagtccgcaccggtaagaagtgagctgactttgtatatcgatccataattactcaaatagaatcatagaaccctactattcctggtaatccaaccacgaagtccatggttatttcctcccatttccactcagaaatcataactttgctcttataccgtaataatccgtctgataaaattgtaaagtcattttctgacatggcttcaagcctttctttgtacccttgtagttcgggatcattttgctgagctgtcttgattctttctaacaaatcatactgtaacatgatattgggaagttttccaaccacaaagtcaatcctcactctggtcatatccttagccaactttggtgaaatcttcttcaatttgtagactttcctaggacctttttgacttagagcacctgctaccacatttgcttttccatggtggtagagaatctcacagtcatagtctttaaccagttctaaccgttgccgctgcctcatattcaaatccttctcagtgaaaaagtatttgaggcttttgtgatctgtatagatatcacacttttcaccatacaggtaatggcaccaaacttttaatacaaaaacagctgctaccaattcaatgtcgtgagtaggataccgctgctcatactccttcagttacctagttgcataggcaataactttcccagactgcattagaacacaacgtaacccctgttttgaagccttacaataaatcacaaatttctcattactaactggcaaggttaacacttgtgcggtaaattaacctctgcttcaattccttgaagctagtcttacacttgttagaccaaacaaacttatagttcttttgagtcaattctgttaagggagtagaaatcttagaaaaccctttaatgaatcttctatagtatcctcctaatcccatgaaactcttaacctcggttgcagatttgggtcgaggctaatcccaaacctgttcaatcttcagcggatccaccaagataccatccttgttcaccacatgccctaagaagcttactttggggagccaaaactcacatttcttatatttagcataaagcttatgctatcaaagatgttgcaacaccatccgaagatgtctttcatgtacctcctctgagtcagagaaatcagaatgtaatcgatgaagacaattacaaagtcatctaaaaagtccttttacactcggttcattaaatccatgaatgtcgccggagcattttttaatccaaaggacatcaccagaaattcataatgtccataccaggtacgaaaatctgtcttaggaatattctcctcccaaatcctaaactggtgataaccagatcgaagatcgatcttggaaaagacaatctttccctgtaattgatcaaacagatcacctatcattggcaaatgatacttgttatttactgccgatttattcagttcccagtaatcaatacacatccatcaggtttcgtccttatttttcatgaaaaaaacttatgcaccccaaggtgaggtactcggttcagtaaattttaaatccaactgtaatgaccgctttagtaatttagattagtaaaggcaattagcactaatttctaatatttttataattattttatgaatttgattatctgtgggcctcattgttagaaatggacattagagttataatttctcaattttagagattttattaaactttaggggtattatttgacttatatgtgaattatgtaatttttgctcggcgacaacggaaaatgcgatggatggatagttggatcacattggtaagtctagaaccttatattttagtgggatgtgtattgaagaaaataaaatactggggttaagcggggttatggaatttgaccattttaccccttattttgagaaatgcctaggttataatttaaagggtattttagtaattttaatggtggtttggtggctccttcttgagtgacacatggccacttaaattcagccaaggattaatgtagaaatccattttttcacttagaggaaataaaagaaaaaaatcaaagaaaagccaaaaatagaatttctctctttcccttctctttccttcttcgaaccagcttggaaccagagtattgttgctcgtttttggtgttttcagcaagaattcagagggaatcaagccaaggtaaaccctagatactttctagctatgttttctcaagattttaattggtttcaagtagtaatttttaaaattagtggctgttagggttaggttgtttgatagttcgaattctaaggttcatttgagttggttttagcttcttgaagctgcttttgatgtatggttatagatttgagcaagtttgagctttgaactccaagtttaggtctttaatggcataatttgattcaatgagtttttctgtgattttctcgttggaatatgttgtatatgcattgtnnnggtactctggaaagtttggtaacatttggataagttttgagcaagaaatggattattggggaaacctggtgcaaaccggctagccggttttggcagaatcctcgaacaagctattttctcaactctcgtccatttcagtgtcgtagttgagtgtttccttgtttcctgagttagtgtaattcctagagagtataacaaaacctagagttgtgggttcgggtttcatagattaaggttttgaccatgtgatttacccggtttcattatgtgattagggcatccatttaacgcaagactttccgttcaggtccgtcagcacacttgaatctggaaagaaggtaagaactgtgtataatatgtgatatttatacgaatgtatatatgtatgatatatatgcatgttgtgtgtatgattgtatatgtctgagtgatatcatagtgacacaatctagtgtcggttcagcagtacatgcatcgtactggataagagtgatattaaccccagaaagtatgaattggtgctatcatagcgacacaaccattgtgtcggttcaacagtacatgcatcgtactggttaagaatgatatcctggccaattatacttttggatgttattaatgctatcatagcggcacgaacctattgccggtcctgcagtacgatcatagtgctggtagtgcgtgatatcatggtcaataggacaaccagttagaacgttcttactcatctgttaagccttgtaaataggtgtatgggcacctagatacaagtcggtattatatgatatattatatg

SEQ ID NO: 28016 - DNA, 3440 bp, Cannabis sativa
atggatttggacttgtgcctacaaagaagaaaaattttctcatgttatggacacaagtacagctgcccagagaactcttcatgcataatggaaaaggccaagtcatcttagtctccttgttataaaagatccattcatgaacatctattgagtagtttgttggacattacaaatggcaaggaattttctaaagttgtagaaaaattatatgatattggtgaaaacgctgaagttgtacatcttatggatgcaatgacaaccgttcaatttgataaatcaaaggagtgcgagattttattttgaaaattatgaatattcagtccaagttgaaagatcattatatatatattttttttttttggaataggtacatcaaacactattttttgtaaattttttacatatttacgtttaaagatttttttttttacatttttacggttttttatagaaataacacgaaaaataacaaaaaaaaaactacataaaattaacagaaaaatgacatccaaacaacaacaaaaaaataacatacaaacaataaaaaaatcaacaacaaattaataaaatatacaaaataaaaagactgtatttcttataaataaaatcataaaaatcgtacaaatatttaaaattctgtacaaccgtatttttgtaatttttttattgtttttatatatttgtgaaataattcctttttttctatattttccatcccttttctttgttcaccaaaatccaacttccaaattcttttttttctacattttccatcccttttctttcctcaccaaaatccagtttgattgatttgagtttaggtactaacaataacatagtcaattttcagcataaacttcaagaatttaatttttttttaactttacttcaaatggaaggattttaatttggtgatacccaagtaactctttttccaccaaacttggaagcctagtccctagttaccaactttccatcaaatttggtggtaactaaattaaaccatattcctttcatttttctttctcctcaaaaataaaaaatacacccccctctccccaatgtcaaaaaaataaaaaaataaaaccatccacctttatatataattgcagcttggtattatagtattatgaaataataaaaaaaaaatacactttttagttcaacacaattttttaattttcatgctaagttgaggtgttctaagtaagcaaaatttgttcctttgccatatcaagtcttacaaagtgtaggcaaaacataaatcaaatggcatacatatatccaatatataaaatattttggaaacacttaaagataaaagagtttctttttacccttgtatacttttgtgtttcaatcatacaatgcaggaagctttgctgagagagcagtttgctgcatttctcagaagcctcaaataatgtacttattgtttttctttatatatttttatatatatattgctttccaaatgaattgtgaagttttcaatttctaatgtagcagaaactataattttgtagattactctactagatcatcattatataattatggtcatcatgtggatgagccaatttcatgtatttgaatcatcggaaaactagattatggcaagtgttgtcacaagggtagggacaatctatgtccttaacagctgctcggtcgaagtaccagtctccaacagcgagtgcaattggctgcaaatcaaaaaccgcagaggaaaaatcatcagaaaagaagatcatcagcatggagtgttagtgactagaacaagtttctccaccacttgagagtttactatcttcaatagtgataagagttcagatatgtattccttaagtgaacaaaatacagctagtgcatgaggcttaccttgtttctgatgacgggagaatcatcggcaaaccatgtatcttgcctttcagtttggcaatgagcaaagcaagagttaataaataaaccattttgacgagagcgtgagaatcgactgattacttttagcatctgattcctgaatcctattttcgagaataagtagacaacatttaacgtcttgaaaagaaatagttgccatacaggacttggaaattgaaaatattaccttgtaagaaatgaatttgtgtagaagaacattttgcatggtttaatctgcattcatgccagaagccatggggatctgctgatggtggagctaagctggattgaatctgatttcaaagaaggaatatgttagtgttgattcgagagaataagccgaaacatagatttcggtgtcaaatattaggtagaccgagaaactacctgccatgaatcgtaggctgcattgagaataaacagcggggtcttaacgctggcaatcaaattttgagggaagaagcactaaacaaacaggacagatgaatagcaaagtcagtagtatgataaaagaaacaagctcaaatttttactttaattccaaattttctaataaagtaaaaaccattaccgaagttgggtcaagatggttagtacaaatccgcggtaaactctttcccactccctgaaagaatgcagaaaaaaaaacacagtgaacattttttttcttttgaacccaaaatcgacaaaatggatgttaaagtttcaactcaaattacagttaaagtctgaccaaggtaacactgtacacaaatgtaagaagttgactatcctcgaaagaaatgcaatacctgcaaacctactacgccactgtatagattcctgagtgttcttccaccagaaacatcgaccctgaaattgcagagaggaacatatcaatgaaagttcagatgcatcaactaacctaacaacaaatctgcataacaaaaactgaaaaaacaatgaaagaagaaggcttttcggtgaaagatagaatatttacgcgtcaagaaacaatccagcatcactgaggcacttcactttagtgtttccggaaaacaaactcttaaagtcatcacaatgtaaaatagatgcaagacccccagcagagcatccagaaagaagagtctaataaaattaaaaggatcaattagtatatttcgagttgctgcattgactgatacgtaaaaaggtagaagaaactagataggagttaaaaatactgcacctgacgagcattacgcattccctttgacattaaatcttccattgcagcccaccatatacgttctcctctaaattgcaattgtgcaccctagaacgaagcaatgtgtttaaatgacaaaatgtttagaaagaatcaagaactacaatgatgatatatagcatactaatcctagaattgcagaagagataaacaatggctattattgaagttgatattcttgatttgattagacataagttttgttgctcaatcaacataaactgaaaagcagtacatcatgtaaaaacctcaaatggtgagtatattgtccaaa

SEQ ID NO: 28017 - DNA, 2212 bp, Cannabis sativa
  modified_base (866)..(882): a, c, t, g, unknown or other
tcttattccaaattctaacatggtatcagagcgaaaacaaataaaaaaaaaatctctagcaactatccaaccccaaaaaaaaactcgatcgaagtagctccaaaaaaaaggagccaccgaaaatccaaaaaaattgacccaagagccaaaagtcaaaaaatgtcatttgtgattcgggaatagtgagcgaaaaaaaaagagagccactaaaaatctaaaaataccgatccaaaaagtagagcaaaagaaccacttgtgatcagggatagtgagccaaaaaaaagaggagcttatgatcgagttgtccaagatggtgagcatataaaatagccaccatcttgaaggggatgttagagagtctcatattgctaatgtgtggaaagataatagaatatataagaggaatgtgctactcctcccattgctaattgattttgagatggaatcccatgcatcttatcccaaattctaataattaaaaacaagccgaatcttaaaaatatagagttctcttcttttcaaaaaatatatttatggaaaaaatttactatgtgtgtacaaatatggagttttcttcttttaaaaaaagatatttatggaaaaaattcaataaaagttgaaaaaatatgagaaagtcaatatgggtagccaaaaagataaccatgtaccttagctaataagaagggtaatgaattaccttattttgttttttttttccacattttttaactttttttttcttttcaaattttcccataaaatatttttttgttttgataataaatcatatttttgtaaaattataccttaaaatccataaaaaaaaaaaaaggaaattccccttatactatttttttaattttttnnnnnnnnnnnnnnnnnttgagtttctaaagtggttgtagccctagttgtaataggggtttctatacgattttttgttgcaatttagattgcagcgctagttgcaataagagtttctacgtagaatttcgtaaaaatgaaaaaaaaaaaatattttgaagtttaaaaataaaaaaaaaaacctaaaaaaaaaagaaatttattccccttattaacaaaaattcttggacccataaacttatagagctgggcaggacattgtactaggcatcacgattgcctttttctattagcacaataataaataaatattatatttatcaaaatattttaggatgcaaattgatatgaaaaaaaaatatttaatgatagttaataaattaaatattaattaaaagtgtgtactacagtttatcattagccaatgataatataatagatgctaaatttaactcatataattatattttgtagctgttaaaaatatatatagatatatttttctttttttacaaaattatatgatatagtattacatcacaaatttggccattcatttgagatgatttaatggtgattagtagtaatttattttttgtatcaggtttcatcttaaaacactattgtacatttgattacaattccaaatattgttttaaatatctttgtttgatatttctatcaaatttgtcactatatatatttttagatcatgatttttgatatggtattagatagaaccttatagagatgggagtagtagttgttctcatatggattatgctacaagtgtcatagtctttaaactaagagagatttgatcgaaacacgtctacatattatagccatgaaaaaaacttaaagttatgcaagtaaagattgtgcaaagaaaaaaaaaattctggggacaggggttggtgatggaacatatttgactaattaaattctcttaaatgacttgcccaaatgttaatttaaaatttggaagaaaagaaactagatatatcttctgttctatacatttcttggtatagagtttaaccattgtagtttgtctgctacattacttgattcagaagcaagcatctaacttttttttttttaatttcaaagtgtaaaaataagtttactatgccaaattgttttaagtcataaaaatatcatttttgatctcttcagtcttacttttaaattgagaagacttcatgtcattaattaagttcacactcaatctcaaactaagctcttaagacctaccaagaagaaaaaggtaccctactcaattcacatactataatatagtaagtgactcttttattaatcttcttcattcacatgaatatatata

SEQ ID NO: 28018 - DNA, 4967 bp, Cannabis sativa
  modified_base (4757)..(4766): a, c, t, g, unknown or other
catgaacaactatctatattatcatatgaaaaagcatcttaatattaaaaatagaattgtttttgtcgtggaaatttaaagtataggaatatgttcctatttgattataatatttattactttactcatttgaagtgtgtataaatacatgttcgaatttggaagacaacgaacagcttaattggaatatatatttcttttcttcactatactgttatatcgtccttaattactcattgccattaatagtattatattgttattactatttatggctcgttcttctaatttgccaacaatcttgttgcctattactatgaacaggtactaatttaataagtgcgttttcgttaaggtgtatatatacatatttactcttatgtacttatttttttatttacatgcatatgtatgtacgtaggaataataataatggtgaagaggaatatgcgaaggtgaattgggatgagcttggttttagtttaactccaacagatttcatgtacgtgatgaagtgctcctccaaggaaggggatgagtttgtggatggacaacttacgccctatggaaatattcacttgagccctgcagcaggagtcttgaactacggacaggtaatatatataaatatatacatattcatttaaaggttaataataatcttcagaaggtaagtttttagttagttttaaagaaatttgtattaaattattaaatgttttgttaataaatattcaaataaaaaaaaaatagcgacaataatacacaaaataatattttttgtaaagtgttagtactcattatgataagtattttagttgcttacaagacatgtgcgtttactaatagaaagaggataatgagaaaaataaatcggtttaaaataaaaaaaaaaattaatctaatgttttattatgctctttactaaactgtttggaaaaaaaacaaaaattatattattttgtttatataattaagaaagttaatcaggatgctttaatttcacaaaattgtcattattagaatttaaatatgtaattatttttgtttatagatttttaaagggcatatttgtattttaattaatgaaataaaataatttagcaaagcaaaaaatatttcctataaaaatgggagagaacctttttatttttttcttttactaatttgtgtgggccctatactttctctctttccaaaatttagtatataactatatgagaatcaatactataccattcgttctaattcatgcataatgaattttaaaaactaattttactagcttcttctaatgtgttcatacaaatgtaatttttagtttttttttattatttttggtaatatatagtttgattatttgtattttaaaatgcaaattgttatttttgggtttttttttctttttgaaaaattgttattttaaagtttgataatgtaaattttattgtttggatctcaaaattggctcagactaattcgtggccatgtctgaaagtatttttttttggtgttgcttctaaactaagacatatagtgtaaaaatgaattgcacacccgtaaatattagtttaaaactctaatacccaaaagtttcagtttaaaattgacactaatattaagaatataactttttgttattatggaataggtgtcgttctatgaactcacaaaaccgagactaaaaatacattttgtaatagtgctaggtggtaacaaaaatgtttatttaagagatttaagtattattgactttattttttaaatttaggtacttattagaaacaaattgaatataatttgtgtagttatgatacaaattccacttatttttatttcataattattaattattaatttttttttgacatgtatcataatataattcttaaaacaaatacataaattgaaaaattccgggcgatttagttaatgataattaattaagtagttgggcggtgtgtagggattatttgaaggtttgaaggcatacagaagagaagatggtggtattcagctatttagggcagagcagaatgccttgcgcatgaagttgggcgcagaaagactctgcatgccttctccatccattcaccaattccttcacgcactcaaactcactgtcctcgccaacaaccgttgggtacattacatatatacatactaataacatttttacttccctattttatttatttatttttgctagaacatgagttcaaaaatggatcaaacaaattttgatgatattattgtggtattttatgggattttggttttaacaaagtctagtgtgtatatatatatgggacctatatatatcttgatcttatatgtaactctctaatttctttatttattattcactattagtgataggggtatgatggacaccaatagagggtagaatgtgagaaagtaaattaattatgatgcacatgcttttgttttaattctatttagttattaattaactttagagtactattagagctactcttacattgttaatatgtctagaaataaattgtcatatataaaataaattagctactcctctcactgttaattggttttaaaatagaacttcatgcaccttatttcaaattctaacaagtatggattaaagttttttaatttttaattactttaaattaaatattatttttttaaaaatttattgttttaatatatattatttaaaattgaactcaaaatataaatattttgatccattttaaaaatttaagtagaattatctccatggcaaattaattttttcatatacatcaaattaaccaccaaaatattactcgttcaatttaaaaatagatggtttgatgcataactattgtgcgcacatatcatttcatgtatacttttgtttagtaaataccaaaaaaaactatagaatacccccaaaaaaaaaactattattataataaataaatgagttattaattatgcaataagttaatgtgtaaatgatattagattataaattaatggtttaattaaacaagtatagtataaatataaagaatttataatttaattatttatttttttaatttttataaataggttccacctccagggaaaggagcgctctatctaaggcctatgctaatgggaagtggagctgtactaggcctagcaccagcacccgaatatactttcttaatatatgcttctcctgttgggaattatcacaaggtcggtcactctacctcaattcccatttaaatatcaaatcaagtaatatctatatctatatataaactaaaatgtatgttttgtatcctacattgttctaagtaatttgaccaacctttgtatgattatatgactccactccacctaaattttttccaataatatattaaataataaattaattaataggttgttattataagtgttttaatgaattatatattgtatagggtagaacagccatgaacatatatgtggaggacaagcttcaccgagccattcctggaggaacaggaggtgttaagtccatcaccaactactcccctgtaattaaacacactttccttcatatattataaacatattaatatatatttactactctatgactctatgtcacacgaaattggatattttttcataaatattgaagcaaagaacattagaattaaagacagtgataaagcagattgagtaaggatttattcgatttcatcatcagttattgattatatatagttgtgtgaatataaatatataaatatacatataaatacatttgtttattaggttttccgagcacaaaaggaagcaaaggctaaaggatttacagacgtactattcctggattctgtgcatggaaaatatgtagaggaggttgctgcatgtaatatcttcattgtaaaggtaatcaattttagtgttaattaattatattaaatattatgctatcaaaagacaacaacaatttatataccctacgtacgaagctatagcaggaagaatatatatgtatatatatatatatataatatgacgattttaataatcagtaaacaatgatcatgatgaataagtaaaagaaattgttctctggcctaattcgacgcacttcctgttgggtagaacttaaatccattacttttcaatgcaaagagaagagagacacaaacttttttttttttctgctggagaagagagacacaaacttgtttatcacattttacccatattcttattggttatattaagattatagctactgtgcgtattgaggactaaagtgtcaaataacaatacttttatattaaaaatttctagaatggagggcattatgaaacaaacctacctaaggggcatttaatttcatgcttagagcatctctaatagtgtaattcttaaaaagtattaaaaattttcacatcacttaaaaataaaatattttattttatttctcttttctattttttatgaccctattttgttttaaaacgttctaataaaaattattaaaataatattatattattattgaatatattaaataattaaattttaatactttatgataaaataatgaaaaaaacagagaagctatatataagagcatctctataaaaaaaatttatattaaataaaatatattaaatttatatatatatatatatcttcacatctctattagaagatataaatttatattagtattattattttttatatatataaagcacaaaaatataattatttaatatatattnnnnnnnnnnataatattattttaataattttaagagaggctaactattaaaatatttatttatatattaaaagtagtcgtctaatggaatttaattttttatttaaatagaatattttaaaaatatacgaatattctgataaatttaattgtgttagtagagttagttttttaaatatatataaacattaatattatttattttaaatta

SEQ ID NO: 28019 - DNA, 4284 bp, Cannabis sativa
ctaagattagataatagagttaaatgttgtttgtgatcattttcattctgttttctgattttatatcccatgcaatgattgttttaccccatatagagactttactagtatgttgcattgcattttctgttattgatagaatatgaatatgcctcttatcttacgatgtatttgtctttcatttcagataaataaaaaataaaaaaccaaaaaaccaggcagatctcttttctatattacataaaacaatgggaaggaacaagtacaagagggtataacatctcctcaaatttcataagagctctaggaaaatttcaaaagaaactaacagccaccaaccaaaattttacaagggttgtaaacatgggacagtgcttgcttccttgaaattagaaaatgtctgaaaattgcttgaatcgaatcaatccttgacatcagtaacgccttctgtagagatctgaaagcgtgcatcagcttcagccaaacatggagagcttattactttacagatgcgctcttcccctcttcccttccgtagagcaagcctattacaaaatcaataatgatcagattgaaacattttcctgaactttttgcagcaagagacaagtaaaaaagctcgctacaacaaaccttgttgtggaggcatgcgccatgatgttaccaccaatgggcttaaactgaggacccgcaaacagtgcagagccatctacttgtgcaactacttggtttgtaataacaacagcaacaccaaactacagtcgtgttgtatacaatggttatgttgattaaagaaaagaagatcaaaaaatggagtacagaacatcatgtgcttatgcaagtaatttaaacaaagaagaaatatatagttataagcatatccagcaatgagtagagttctcatttatcaataaaacactaaaaccagcaaatcttaacaggaagagccaaaaaaaatgtctttcaggcatattaggacccaacccaaagtgtaagaatctttacctcatctgctaatttttgaagactgcgaagaaactttgcaagatgcatttggcgagctgaaagttcacctcttccagaaaagtccgtcctgtagagagctgtagcactgtctactaccatgagagcaaatctaccagccaaaaattagctttacataattagactttccagcaactttatcacctttgcccaaatcagctctaatgagtacattccatttcatgggaaaaaaaacattcccttctgtgatcactttcatgaacattttctgatattgacaactttgatcaatcggttattatcataccttgtttcaaccatcattgatgctgcttcaagcaagagccttgactgatggtcagtgttgtaagctctagcataagccacattctccaagacatcggccccattcaatccaaacctgcagcagtcaacaccctcaaatacacatggcacaacatcatattcacacaatcatatcaatgtagtcatatatataacctttctgctatctgtaagagtcgctggggtctaaatgttccctcagcatcaatgtacattgcttttccctctccacctccttgatctaatggaagctgaaataccaaaatgttagaactgtacctttaaatgaataaacctatactgcaagcaattgtaaaataaattgaccggcaactaggtgaatcccactattaccaaaattatttattctaatgaattctgaagtaatcaaatgggagattaaagtacttatctaatcatatggtcaactgatttttcttgacactaaactactctatttccacaaagattacccatctgattggtggcaaaattaaaacacttacttggcaagtgacacagagcgtatgacagagttgagtctttccagaacgaaactcaccatataactcggtaatagatcctgtctcaattcctcctgacagaaaatcaattagctttattactcatcatattagaatatattcactggaaaactaagtcatcagattcaagttaaaaattgaactagattttggtaacatatgaggattctcaccctccaagactttgtcaagttcccttgatcctgatgtaatttgaatgatttcaagcctctgggcatgaagttggctagcactagtaaaacccaatggcactaatttggaggctgtcaatacaatgaatgaagacattaagaaattctgtattaaaaaaatagctcaactgtagcaacaattctgatatataaagagtggtcaattaggcatcaagtgacatgcctgcctcaatgatcttgtcaactttagcttcactaattcctttgatttgcagaagttcttttcttggagagtaagcaacggattcaatcgtgcaaagacccgcatctttaagcttctttacatcaatggcagctataccggacgcctttagttgaagattgaaaacattaaaaataagcatcactacactactcatttgtccactcaaaaaaactacttttctaaatattgtgcatcaattgaaataataagtgttcaattaagaaaatgactacgaatacaaacccctcatcaaacaaaagcatgggcttttgcgtaattagtaatagacaaacatctagattgaaataacccattctagaaacacatgttactgtatatataaccatgtacatacatataaacctgaaaaatctaactaaaaatacgatcttgggcaatatgtgaacaaaattcggacacccagaaaaaagtagggtcaaaagaacgagattgtaggttagaaaggccgtcaaaatttgattaaaaggaaacccatttccgtaaacgcctgaatcagtcctataaacgaagaaatgggagtacagtagagtaaaaatatcgaatttgaaggagggcattttcttgaaaagcagtggagattttacctgaagctgttcgactggaaaagggccatgctggacttcctcgagttcttgttgttcttgagcccccttctgatttctctgctgctccattttcagtggctgaagaacgcagaggggtttggattggagttgggacagtgaaaagaactcagagaatggagggaaatgaaaaagtttcaaaggttttttaataaagcgctaaaagaagcttacagggtacgttaataaaactaatatttaaaaaaaaaatagaataaaaaataaattaaaggccgaaatacagtattatggcccattgggttgaagtatcggcccagttgtcatggataaaagccatgagttctttgcagtcaacatgacccaatagctacaaacaatagcttttttgttcaatctgaaaacaaaaagggatttttacaaaaaaacaaaaaatgttggattttgggcaaaggtttagaattttactatgatacggaatattttttacaaaaatactatctttttataaaaaaaccgtaaaataacaaaactgaacaattaaagcaacagtagaacaattaaaaaacaatcgtggaacaccgtaaaaacttaacacagtacacaatataaaacttacacagtatttttgaaaaaaaatttgtcccacactaaaaaagtaaaaaagttgaaaatttcaatatatggtgtaaaaactccaaacaaaaatttgtttgataaaaataaaacaaacaacttattacacaatttattaaaagaggaaggtagtttttgagtaagaaggattttagtatgacaagttatgattcgtttttgagtgatattagtttgatttgtaaaagtactaatgtgtctaagtttttattttgtactacgtgaatgttattgctcataactttgtcaaattggctctctctcttgatgatgtaagagtttggtagtcaaccttagcactgggtactaactctcgagatctcgtttttgatactttgaaggcttttgaacttgaggacaaggtctcctactttatttttgaccattctgaattcaatggtcacatcaaatttggcatttgagtaattgaaggcagtgtcccaagttgattgtcaacctaggcgttgggcccaataccaagtcaacccaggcactaggccccttttctaggggcttgattttatagttttcttctcaagcttgcttgaatcttcattatatcttataacagaaaaaatgcccaaaacactttttgatgaactcgatcgaaaacagcccaggttgacaatatgttaacctaggcagtgggcccaaccccaagtgtcaatttgaacgctgggtcccaatttcgcccc

SEQ ID NO: 28020 - DNA, 2241 bp, Cannabis sativa
  modified_base (2171)..(2193): a, c, t, g, unknown or other
ctctttgatacacattgaaaagttgcaacactctttcggcctcatcatctttggccttgcaatacacatagctatcatcagcgaatagcatgtgagaaacacgaggcgccccccttgcaacttgacaaccatttaaccaccgattttgctcataatgtttcaagagtgaagacaatccctcaacacacaccagaaaaagataaggtgagagtggatccccctgtcgaatgcctctacctggatgtatagggcccataactctccccccatatgtaacattgtaagacactgttgtgacacaagacatgataagagcaacaaaatgagaaccaaaacccatacgggttaacatggcttctaagaaagtccacccaactcgatcataggccttactcatgcctagtttaagagccataaagccttcttttcccattcttttcctcttaaaataatgcatgatctcaaaggaaaccataatattatccgatatcaaacgaccaggcaagaaagcactttgtgtattagaaataacatcaggtaaagcttctttcaatctattggctagaactttagaaataatcttatataggacattacacaaagaaattggcctaagatcactcatatgttcagggagttttttcttagggattaaaacaatgtttgtcttatttaaatcactaggaataactccagtagagaaaaaagttcgtaccatggtaataatatcttcaccaacaatatgccaaaatttttgatagaatcccggggtcattccattcggtccaggagatttttgtggatgcatttggaacaaggctttttaatctccttgcttgtaacatcactagccatttgagcattctgagcttctgttatttttggctgtatacaagcagttacagccccaaagtccacggcttcaacatcaaaaagttgagagaaataggcagttacaacattaggaagctaatcctcccatccaacccaagtccccacatcatcttttagcttctgaatagcattattacgcctcctagcaatagctttggcatggaaaaatttcgagttttgatcaccctccctaagccacaactgcttactcctttgtttccaaaaaatttcccgctgcaataacacattattaagcttaagttgggccgctttatagttgctaatggccaccgaatctctcccctttttccaatgtcgaatttcagctttgcactccttgattctttctttaaaattccccgagtagtctttgctccattcaataagaacctcccacaacctttgatcttctccataatcatgctccctttatattgattccaagtatcctcaaccaccttatagcacagaggctccttcaaccagcaattctcaaaacgaaagactttgctagtagcaaccgtataacttaagttagcaggcatcaagtgtaaaggacaatggtccaaggtcgaaacttccagattgtataacttaactgtaggaaacatactcagccacctttgactaacaagagctctatccatgcgaacttcaatccactcatccgtaccacgcccacgttcccatgtatacgggtatccactcaagtctagatcatggagtccacactcatccaacaccccccaaaagccctcaataagccaattcagatatggatttccaccacgtttatcttgttgcgaatgtaacattattgagatcggccaacaatgcaccaaggtaaatcatacttatctttcaaacctctaatgagatcccaagtcttcttacgatatgttctatttggctccccatataaaccggttaatctccatctcccactctccctagcatctattgatacatcaatgtagtttggaccataaccaagcaactgtacttcttcctcatgtctccataacatagccactcctccacttctaccttgaaatcagcagaaaacgccccatcaaaaccaagtgatactctaagcttctccacagtatccttttttgaaagagtttcacataaaaaaacaaaattgggtctcttttggaccacaaggtccttaatgaattgataggcccatgggttcccaagcccatggcaattccaagataatagactcataatgcttggtgggcttgagaaccaatgttggaaatattttaccnnnnnnnnnnnnnnnnnnnnnnnatgtttcattaacatcctaatattaattctaaaacaatgaaataaaca

SEQ ID NO: 28021 - DNA, 1597 bp, Cannabis sativa
gagagggtgacgacatctgtgaggtcgaggttttggttgtcggcgagctatttgagaatggctttggcgccgcttgtgggtggtggaaggtcgtcattggttttgttttatgttacgaatgctaagccagaccacctgactgtaattaattcaagaatcaagaatatggtcagtgagcacataataaatatagatttaagacttagtagttgtactggtaaatcaagggtcatctccactctcgattgggctcaaggggaagaccgaaactggtaaatctctttctcttatttgctccacccttttttcgcagcgaagttgtaagctcaagtatcacaatgagtcaaaacacgacccgcaagctatgaatcaaaacccgacccctaagctatggctgatcctcttgctcgtggcggtggattttttcccgatgagaacattcaagtaagaaaatccagaatcgtaaattcgtaaattcttttaatttacattttcttttagttattttgttttgataatatatataatatatttatatatctgtgtgtatatgaggtgggatagaattaaaagagtcgggacctgcaaagtctcctgcaaataaaaagaacgagaagaaaaaggtatcaaccatttcatggaaaagtttgattggattcaagatgaatatccaagcactttcacgatgcctttgtgttaaaatgtaaagtacaaatgatgatgaagatatatttaatgttttcattatctgaatcgcagaaattcatgggttaaattcaaatataaaagattctatttggtatggttaatttctctatttttatttaagtttctaaaattaatttattcattgggttttactcttttttgtagtttgcagtggcaactataaatggttatcaagcttaaagtgttgattgtactattttgagattaagtgtgcactaatttatgttgggtgcattcacgtatatgcttagttttgattgtactatgtaagagtaagaccaatctctagacatactattttgattgtaacatatagtttgcagtggcaaattcaaagctacattactgtttgaccatgtaattttgtacatcgagaaacttttcaattcaagaaacttggtatacaaacgatggtattgatgagcacatggtctggtctggtatttgattcttttgcaaaccctgtcgaagaaacttctttagattgttaaagaaaagagatcgcttggtcagtgctgcggtgaacaatttgaaatattggcatcaagtgctgccggagctttaatgcatgggcttgaggacaaattctttgaggtaatgttttcttgtcttgttcaaggccttctatttctaccctgttgttccaatgcttttttctccttttgcaattctcatagactatttggaattatgatacggtcctttaatttacagatagtcttatctgaactttggagaagttgttcctttttgctttgtttgccatagttggcgatctatgaatataaaatttaaatcttaatcttttgttgtttctttacatatgtcttcttgatattttaattggaatgaatatgaaggtgcggaa

SEQ ID NO: 28022 - DNA, 2343 bp, Cannabis sativa
tgttctctggcaccgcaggaaccacaacagctggtggttgcggaggaggccccacaggagcatctcgttgtctgagccttcgaatttcctcttgtagttgattaatttgggcttgcatttgtgcaaacctctactcccaatcaagaggagcctggggtggattctcttggccacccctctgagttcgaccacggcctctgccgcatccatgggaattttaggggtttctacctccccgaccacctctactctcaaccatttcgccctaacctttaacgtttcgctaggcgtccataatctaggacttagcctacgaaccataggttagacactggtcaatatattttcaagaccgcatttatggattttaggagcatacttcctactaaaaattaaactagataccactgggaaagcttacggaaccgtgagtgaagctcaccactggccataattatacatattttgatggtctagtgaacaatctggtggctctgatactaaaattgttacgcccaaacttgaaaatcacttggatttaaactttacttacataaaccaactataattatatgtaaatacacatataaagtcttgcacgtcgggatcccacattaaaaatcgtttcaaaaaatacaatgcgtacatgtacatatatatttaattattttttttacacacgtcacaaggtgacacaacaacatccaaactcaaaatatactgatgaaaccctccaagttgccgcgatatgtacaatcattgttgagccttcaactcacacttcctccgtcttagcttttcttttacctacacatggtaccaaactgatgagtcaacaaactcagtaagatatgcataaaatataataatgtgtaataccaacttgtacctaggccctcctacgcctacttacaagacctactaaatgattaagaacgttcttaatggaagtatgatctctgtaccacatgcactgaagtaccaccttcgtactagtgtcggtagggccaaattgtactttcgggttctactgggtgttgtgccacatgcacccgtactcactcatactcgtgttggtaacaccataacattcccttaaacattatagactgtaccaacacactcagtattacatttatcccagtgttagtagtgtaaaacagcataaaacagcaggcattcacatacatacacatgtacatatacataatttatgttaatcttacctcacttccagattcaagcgtgccggtcgaattgaatggaaaattcacgagctgaacggatgtcccatgtcacatttgcataaacgggtaaatattttgtacgaactttcctggaaacctaaacccataacctagggtaatctcaatgataaagaacatagtattgtcctaaatattggggaaacactgaactaaaacacaaaaaccagcacaagtcaacaaatcaaaatttctgggggtcctgtaaaaccgattgaccggtttgcaccaggattccccaaaagtaccaaaactcaggcaaaacttttccaaatgcaatcaaactttccaaaacacctgtacacacattctataacaattttcaagtgcaaacagcaagaaaaatccaccaaaatttattatgccatagttgagccaagttgagttctaagaactcaaacttgctctaacacaaaaccacacaacacaaacaactcaatcaaactcaagatccattagaatcaactgagaacatctccaaccgaaatttaaccaaatagaacataattctagcatgtaaccctaaacccaataaaactttaataatatcaagaataggattactagagcttacctctactaacaacacctcaaccctagctggaatctatagaaaaatttgatgcttgacactgatttgtccttcaatttaggctggctcaaaaagggaagaagaagaagaagatagaaaggtctaagtttttgtcttcattaaattttctaactttcctaattacataatacttttactcttattattattatatttttataaaaaagaacagttgtaaacttaggaggaggacacctatgcatggagtgaaattacaaaattacatttatttcaaaacctaattcaataaatagcttaaggttaaaataattcaataccacaaccccaactaaaatcaccatttgaacccacttacaataattcactaaaataaaaatcctccatttttactcatgtgacttaaataaccatccgttgcatttttcatcgccaccaaactagaatgggtaaatactattttggaccctgtattttgcaaaagttatcaattggaccttctatttt

SEQ ID NO: 28023 - DNA, 2438 bp, Cannabis sativa
aatatgtttacatgttgttttgacagtgttggaagcttgggaaagtatccaaatgaagaagatgtaagtgggttagttgtaaaagattgcataatgacagggacaagtaatgggattaggatcaaaacatggcctaactcaccaggaaatagtgcagcaactaatatgacatttaagaacattgtaatgaacaatgtgagcaatcccattataatagaccaatcctattgtccatctttatcttgttcttctaaggtaagtaatcaaattcatacaatggtgttgttttttatttcttcttttaataaactcattgatatacaaaatgaaatgcaggcaccatcaagggtgaaattgagtgacatttactttaagaacataagaggaacttcatcatctgaggtagcagtgagtttagaatgtagcagaggatttccatgtcagaatatataccttgaagatgttcatttgaatttgtcatcaggggataagagttcaacttctttgtgtagcaatgttagagctaaattcattggcacccaaatcccacccccttgttactaaactgtttttcgtttgatgatcttggtttgttgtttgctcttgtaaccatttatactttgttctactgcaatattttaactgattgtagttgttgttgaatgacaaatatggatacaaaaaatgagatcgttagatagggttgttcatataattcacaattcgtggttccaaactccaaccaatccgaaccaaatgaatcaggtgttaatagtttggtcaatctggaccgattataattctttggttcgatcacggttttaaaattttagcctgtgattcaaatcaaaccaaaccaaaccgcaccaaattaatcttttttaagtggattggtttgagcatttaattagtctgcttcagttttgaattttaaaaaattgtaacattattggtttggttcgaaaaaaaaaaaaattaggaccaaaccaaaccataaacacaacctactattagaataataaggcagcttgagtgtattttcattgtgagaagaaaaacaagcaaaaggtttaaaaaaagggcaataaagctttacaaagttctaaaacgacatgtggtttggaagcaaagtttgaatggcagcaagttgttcatacttcataacataaaacgacatgtcgttcacatgaagttgctttccaaattccaatttccaacatatttggttttgattttggttttggtgtggtctggtgttgatgctgacttcatctctagatttctattttcgatggaatattcttattctatattctattttatttatttttggaagtaatttatttccatcaaaccaaaaaacatcaaataaaaataaaaaataaattcaatcaagaaagaaagatgctggtcacaaagtgcgtcacgtttccaaaaacactgaaaaacccaattcgaggcgtgtaattgagagaattttttatattctgtaaaattttaatcttatttttgacaattatttcctttaaataattacaatttaattataaaaaaagttaaatattttttttttcaaatatcgaaatagatatagtgtatcatcgatagacatgatttttgtgtgcattgtaaaagtagaaaattttacaacacccttatttattttaatatctaaaaaataaattgtatgtttataaaattgtaaaaaaattaaaatgtcaaaactcaaaaaacagagtaattacactcaaaaaaaatttataaacgatttcgacatttttgatattataaattatttaaaatttctataattacaaaattcttatcattgaagcaccctctgaataaataattatatatataaatatatattctggtattctctccaaatctttccatagtaacatcgctttagctttcttcttcttcttcttcttcttcttctaccattctttctttgtttccatatctgtagataagatataaagcttttgtagattctggtttggttttggttcgaagccagaaatggaaagcgctgcagaattggtggcattccctttgctgattactccaatcgactctaactacagagcctgcactattccctaccgctttccttccgataatcctcgcaaacccactcccacggagctcgcatggatcgaccttttcctcaattccatcccttccttcaagtacgttttatgcttatttcattcgttttcgatttttatttatgtttttttagggatcaaggattcattagattgtcgtgtacaattgctgttttgttttgaaggaaacgagctgagagtgattctactgttcctgatgctccgattcaagctgaaaaatttgctcaaaggtttgatttttcttttgtctttatgttatgagccttttaatcataagtgctgaaattcaccaaattccct

SEQ ID NO: 28024 - DNA, 1781 bp, Cannabis sativa
atattttattgttttatatatgtgagtcatatatataacatttcctttttcattatataatcatatctctcttgctttttgaactgtttttttctccattcttgacacttttacaaaaatcagttttagtgacccttgttgagggactttaattaaaaccttttagtgacattgttactaatgtgggtgactcaaaagatagtatttagtgacacttcaaggtgagtcactaaactcttataaagtcgctcatcgcttacagagtgttactatatttttttaaaaaataaataatattttttttaaaaaaaaataaatatgatttttttattcaaattatatattataaaatttattataataatttaattaataatattttgataaaaatatacttaatgatataatttaattaattatatattaattatgaattaatgcaaaccattacatcaaaataccataaaatatatacaaattatgaaacaatatcactaaaactaaatcaaaatttataactcatttgaacagtaagacaaatttcataaataaatgggcatcttcataaataaattccagagggtgagaaaagttgtcaccttcgattagctcatcttcattgatggcgtgcgagcgaaatggggtgcgaacgaaaaggaaaacaactgccatttgggtttccaggtattgcgagcatcatgtggtcaatttggaccaccgtatagttcggagagaggcatggcaacatcactgcgcaagggaaataggaaagatagatgagagagatattgggactttgggttttcttgggtttaggaagccatggtcggaacacgactgtctagccgtggtcactccagaccacacgcagtaaacaaagggagagatagatagatacgggaggatgtgggaagatgatgagatttagggtttgtttcagaaaaaaaaaaatgagatttattagggtttcaacatatcctttttatactcccatttattttcttatttttttttcttttatttcttttaataaataaattaagagagaaagaaggaaccattgcacgtgtccttcaacttttttggctttttaatttcttttatttatttttattgaatctttagtgacccaccttatgggactctgaatacatttagagttagaatgtgtgtgtcgctatatatttataaattttttaaaataaataagttttttagtgacacgcattatggaacatatacttaaaatttttactgtctagtaatgtgtgtcactaaaaattaactaaaatatttagttacccgcactttgtgtgcatgttattaaattgtgtcactaaatgtgtaaatattgtagtagtgtgatctctcttttgaatggcacaagtaggtgttaactctttctcaattcgcttataaatatttacaagattagtggtgtgctaagttattacggtagacgacagagtgcaagattagaattttaataaaattttagtgtaaggaatttatattttattttttattcatatatacttaaatatatgagaattgagaattaattattatttttttgtttgaattttgattcgtgtaaataatttttatgattattgctgaccgaggttttcagcaaccaaatgtataatgtaataattggagcttagggataattaatgcaggtacttttacgtagttcaggcattaatgagccatagtccacgagtctctgttattaatgagagagtatttcttacagagaatatttctgtgtctttttt

SEQ ID NO: 28025 - DNA, 1358 bp, Cannabis sativa
taagaagtcatatgattcaacatgcacaaaattaagaaaacacaaatttactaaaatcctaataaaatagataaatagccaaaaaataattatagaatgacacttcatctcatttgtgttttcctttatattaatatatagattatcggtagtttcagtcttaattcattggtgcattatttgcatattagtcccaatatatgtagttctcttaaatttgtccctcttctaattttgttgttgtacaccattgaagtcaatttccttcattcaccaagttaagaatttcccaatatttaaataaataacatcctccatacaaaatgaataaatgaataaatatcatcctaaaactagaaaaaactttttgtccaaagaaaggatacagagagagatttccccaaataatagtaaccccaaaaaaacccaagataacataccaaagacccctagaaagctcattattagaaaattaaaagaaataatattgaataaagaagcaaaatatagaggaaataaccccacaaaaggaaaataaaatggtcaagaatcaccaaaaaaaatatatagaaaacacatttacatatgatgtatgaaaaaaaaaaaagcacaaatgtgatatgagaagtaaaaattaaaagtttatttgttgtaaatatttgattgagagaaaagaaaaaataaaatcgggctggggcttgggcaacacgattctattataatgggctttttcttttctttggtttgattgggcttgatgagaatcaatatccatcaaaatatcacagttaggtaaaaggaacattattattgataatttcatactaagctatatataaaaaataaataaataaacttggttgacattacttactacatgaatgtgttaaaattaaataatatctatcagtggtgtatgtatggttctctttatttatttttaatttttttgaaatagaaatactatcatttatataaaaataaatattaaataaatgtgggagttaggtgtaattttgaactatgtatgtcaatatgtcatgtgtaatgtctacgttatacaattactcatcccatgtgatgctacccgatatatagtgaataattgtactcaccattctaagtttagtatactatagtactataccatcactaataatattgaacaatattattaaatcaatctaaaataattgaaaaataaatatatatttttttttctaaaaagataaataatttgatcaattaataagttttgtcgattctgtgtttagtcatagtaattgggtaaataatgtgtataatattgtgatttgatttatacgtataaatgtctattctaaaatcactaaagaatt

SEQ ID NO: 28026 - DNA, 3865 bp, Cannabis sativa
tagttttttgacttcttagtttcatcataccttctcctacttctctctctaacttcatatttcatgcaggcttcttttcttgtgtttatggcttaccaaaaaagtcttcaaaactttaaccacttaaggctagagcttcgcaaggccaatgaccactactagctactagtcactcagtggaatgatgttcgaatagagattacttgtttcaagaaacacattgaagatctggagaagtttgagaaggcactaaaggtagaagttgacaacttgaaacaacaactcgaatccccctaaaaagcccctaaagaccttgatgaggctaagagaagatgcttgcgtaagggttactttgatggcaaacgcaccatttataaggcttcgttagaaaataaagacatggacttcagttttttgggtgatgatggactatttcaagcaaaccaaggaagaggaggatgttagctccgacaaggagaatgaggtcgaggttgctgatgaggaagaagacaatgtaccctctaagtctcctaccatgaaaacttagtttaaataacatcttcttttgaacaatggccttctagtcgagacattacctggtcctttgtggtatttcttatttatgtaattaatttcattttgttttgttggacgaccaacttagctttaattataccataattttatgccattttttgtttatatacatttcatctacttttgaaaaaaaaatatacgagtttgtaattattgtgaatatattatgcattattactcttgagtaagctttgtctacataactttatcaaaacatattttctcaattttcaatattgagtaaagaaggaacttaaatgtttggagcagttggttgattttgaacattttttatcactcatgtgcaagtagttaatatcgagtaaagagcaaacttaaatgttttgaacagtacttgattgttttgaacatttttgattgctcatgtgcgaatagttagtcctctatccacaccttagcttgtatactatttatcaagactcactatgagatctctttttatagtacttgctatatatgtgagccgttatttattcatatcgcatttagcttgatgttgtttacaagactttctactgttttaaactagctttaatcaatctcttttatctttttgcaattttctttattgttgtttctaggcatcatcgagtgaacctagttatttctagtcatttttgagtgagcctagttatttctatgcattatcaaacctagttagtaattagaatatatttctaggcattatcaagcctaagcctagtaattgtaattgtatattcatatgcccccaagtaattttaaagaaatgctttacgattacttaagataagatgtatttataaaaatgaattacttttacataaataattaaatacactagaatcaataactactaatagggtctcaagtgctcgttgttctaggtgatttttatcagcgagccattaagctatgcaaatttataattttagatagacattgccatcctgcatgatctccacaaaaggcctcctaaatttctttaataatttgcaagacttttaatgggagcacacatcgcaataaatgcatggagtaccctagtctgtaaagttaacatcgaaagtgtgtatctcagaatttcatatgagtctgcgtgtcttgtctttatctatcagaagttctccattcagcaagtacttaattatgggagtcatccatgtgggactcgtatctatcatttctatgtcttacttttcagctttgtagatacttgctctcacaacacttctactggaactaaattcaatttgtataactcaaattgtaatgccaactttgctaaggcttgaacattagagtttttttctctgggaacttgcttgattttaaagtaatcaaacttttccaagttctttcaaactttctctagatatttttccatcttggtaacttttgcttggtattcaccaaatacttgattcacgatcagttgtgaatcgctgaaccactgaactgatatggcttttaaggtttcagtgatgcccagtcctacaactaaggcctcgtattctgcctcattatttgaagcattaaactggaaccttaatgcatagtaaaacttaaattttttaagagataccactataacgcctacccttgagccatcttcattcatagcaccatctacaaatagtttccacacttcctgatatgttcctgatctggagtcttctcctcaatttactccttctaccaggaagtcgactaaagcatgtcccttgatggcaactcgaggatggtcttttatttcaaatttacccaatttgatcgaccacattatcaatttatgagatacatcaggttttgataatacttgtcgcaaaggctggtctgtcaaaactttgatgagatgtgcttgataataaggtcgtaattttctggaggtgtgtaccaagctgagtgtgagcatctctagtgggggtaccatgattctacccctagtaatcatttacttatatagtaaatcagctgctgatttatgccctcttctcgcactagtgcctcacttatggaattttttgagatggctaagtaaatgtaaaatacttctccaattatcggttttgctaatactggtggtgttgaaagatgtctcttgatttcttgaaaggtgttcttgcattcttcattccactcaaattttttgttgccttgcaaaacattaaaaaatgatagacacttatcaattaattttgagaagaatctagttaaggttgccattctgttagttagagattgagcctcctttggcttctttagagaaggcattttgaacagtgcctttatattgtcggagttagcctcaattcctctggcatttacaataaaaccaagaaactttcctaaggataccctgaaggaacatttttttttggatttagcttcatattgaattttttcaatattgtgaagcgttccacgaggtcttctacatgattcttgcttttgactgactttactagtatatcatctacatatactttcatgttccgacctattttattttccaacataccattcataagacgttgatatgttgctctaacatttttgagtccgaatgacatgaccttataacaataaaacctcatatttgtaacgaagcttgtgtgttcttgatatggcacatgcattttaatctggttgtatctagaatatgtgtccataaaggtcatcaactcatgtcctgctgacggatcagctagctggtcgattcttggcaactggacacagtctttcagacatgctttattcaagtcgaaaaagtctatgcaggttctccatgtcccgtttaatttaggaacgagaataggattcgagatccacgaggggtaaaatacttctcttatgaagttgtcggttaataatttgtcaacctcttctttctaagcattttgtcgctcgagatttaaaggatgcctttttaggcactttgatgggtaagatgtatcaatgttgagatggtggcaaataacatttaggtcgatcccgaccatgtctaaatggctctaagaaatttggtcttggtttgcctttagaaatgtgattaattgctattttagctcttctcccaaatccttcccaatgttagcacatttagtcgggctatttgggtctaaattcacttcttccaactcttcaattgcgcctagagttggttgtactcatcttggatcctaggatccatgtcttccttctcgcattccttattctcgtctgttaaaattactatgagctagtgatttttgttggaaattatttt

SEQ ID NO: 28027 - DNA, 1276 bp, Cannabis sativa
ttgtgccaatgaccaaggttgctaccacttttaaaggcaaatggcttacttgccaaaatatggagaggagaaagtccatgctcatcgacggagttgactagtttcgggtacaactgaattatctgaaatgccaaatctgtccaaacacaaacaactgtctgtctataaaatatgtcatatatgtgagattctataattatagtgaatgtagaagttttactgaccgaagtactctcctgctattgcacaatgaagaacggtctgaccgtcacgcctacggcaaaaggagccgtcgtgagcggtggccgtacttaggtaatgcagacagagaaaagcttctttttttcctcttagagcggccaaaaacagaggagtctcgctgttatggttacgaacaccaaccaacaagggatcaactttggccatacaatgacacattctgacgtaccccattgaggctgccagatggagaggagtgttccctctgtcgttttgaatagcgagcactgttttcgaattggaaacgacacgtcgtaccagcagttccactacttcttcttggcagtcagagacggctatgtgaagcgccgtgtcacctgacttggtgatcttagccttatgcgctctgtagttttgctcgtaaacccttattacttcattccattcgcctttcatggccacattgaacaactctttgttgattttctccatttcacaatttttcatattggtttccaccttataagttattgtgctcctctattctatatataaataaatatatatatttatagtatatatgtatattcaatcataagatttgttatggaaaagaataggaaaagtgaaaggttgatgcttatttgtagtaatggtttttttttattcttttgataaagcagtaaaatgttatttaattaatgtgtatcttcaaaataaggaacgtcttgtaatgctatcaatattgagaaatgcttaaggcatattggatttttgttaggtgtaatattattattaaggcaatttaatattgggtttcacttattttattttaataaatattatagaaaattgctaactaattatagagagcgacacttgatcatgaaactaggtgttaatctcgcttttagccgacgacgctcaatctagaaagcaatttaaaattaattagatcaatgagaatatatttaatttgaagcataaactaagaacacaagattttatagaggttcagtcccatttatttgataatagtttatttctctttctgatt

SEQ ID NO: 28028 - DNA, 7720 bp, Cannabis sativa
aatcaaattggaaagttaggaacggtttaactgacgtcaccggttcaaaacgcaaaactccaaagtccaaaaccaaacaaaacgacatccactctctctctttctctcgtctgtcaacttcttcacttttctattctctttcattttttttcctttacactttccctcatattttctctctcattttctcaccaaccaaccagacccttttcctcttccctcactcacattatcacatacaatttataatcaaatataaatatatatatttgtatatgttttcttctccattgtctatgtaagagactctccgatactgaaaccgacgtcgttccacccaccgacgatctcggaggagaagccggagcttcgtaagccgccggttcggtcggaatggactcgagcgatgtcaatacagtaaggtcagaaaccatgaaggactacgctagggagtttatgaaaggcgtagcggagatgagtgtggagtttggaaaaggatgtagagatatattcaaacagagcttggcgaatcgtgattccttcttggttaggaagtttgggaaagagtcgtatattgggaggagaatcagtggaccgtgtgagaagattcgtttaaaattgaggttctttaatgagtacttgcccgaggacaaggatccacttcactcatggtctgtgatcttgttcgtacttgttcttgcttttgcaggtgcgtaagtaattgctggttctatttttctttgtttgtgaggttagttaatggagtggaatttgtttggtttactggaaaatgcgacttgctctgagagaatgtcagagacggagagaaggaatcttgagatttgagcttttcattttctttttaaattttggagactgacttaggtgacttttttagacccttttggactgtaatcacgaaagaaaacacaggacgcttttgtcagcagccgactttttcctcgttttcctccactttctcggaaaccaaacagtatttagaactcatggttttttttttcttcttttttttttttgcgaatccttagttttcccatttcggagatggaagggtcagagagatgtgaatttgggatattcgaaacagattaattccactcaatgcctttcccaaatcccaattcgtttatttgtttagtatctctagttatctgcgcatttggggtgataaatggattgaattttgattacttttctctattttttcttagattaaggaaggtgttacttccaggtccctgtttgaatagagttattagctgagaaaattggatacccaattaggtggtggatgaacttcatcctatcattaatcactttcttttttattagggaagcttgtcttggtcccatttttcaatcagttacttgccttaacccaatcaaggttacgccagcttctattacaatgttaggtgttattgatgggggactaactttgccattgttatataaaaaaagtctcttgtttgagttcaatgcttatggtattggtggtacagtgcaaacaataggttctgtcacaatcattcctaacagatggctgatggggttatggcagttaagagtgttagacttttgccagcaaatttattaggaagtagtcttctagagtttgacaaatggtactctgctgaaattatttgcactaagttcatatagactcagaggatttggtggaatctttttttgggggggatgattattgaccactggataaataaatagtaaagaagttaatatgaaacagtagtacctactccagatcttcaatgcaaagtttcctagttttaatttggttctataatttatattgcataggttctagtctattattatgcttggtttcataatagtacacaataaatgttcatttattttatcacctcacctttacctgtctctatctccaccatatggatgtttggatttttactgaaatggcaaacaaattatgcagtcttgagttttaccatggaatccaaatccgaatactcttcttctacggctcccactcccaccccagagactaagaaaatatacctacatcctcctagtgccagtcgtgtggtgcttcctgatggtagatacatggcgtacagggagcaaggtgttcctgctgagagagctagattttcagtgattgctccacatgcttttctttcctccaggcttgcaggtttttataacttggttgttgaaagtacactcattttcttcagctgcaatgtgtatattttattctttcctcttatttctggtgtcttttattctgttaatttagggatacctgggcttaaagcatcactacttgaagaatttggtgttcgctggttaacatatgatcttcctggttttggagagagtgaccctcatcctgaaagaacccttgaatcttcagcaatggacatgtcactcttagctgatgctgttggtgttaatggcaagttctgggttgtgggatactcaagcggaagccttcatgcttgggcagcgcttagattcattccagaaaaacttgccggtatcaagctcttcttctctgtgagaatcctttaatctttgtttgcatgcataactgcattggatcagcttatggcctatgatctattcttgaatgaatttttctttttccctcaaaagaaccttttttgcttcggaatttatagttataaagattgagaatgtgtctgcgactatatttaggtaggttcacacagtggatggcaaattttcttttctagtcaaaatagcaacctgattggctttacaattaggctaaaattattactgttagtaccatttttattttcaattcaaaatagcatgagcagatccactttgaccagcgctcttaagttaataatctgttaaagaaatagagcaaaaatattttatcattttgtttgaaactaatctatgtttactgctctctaggctgttttcagaactcttgggtcaatggtcatcttttacctatttcctaacaacataacatgaatgttctcatttagagagagagagaaagaaagaaaacaataggggaaagcgtcatgatttagtatttacacctacattgcaggtgcagcaatgtttgctcctatggtaaatccatatgatccaaccatgagtagggaagagagacgtaaaacatgggaaaagtggtcaagaaggaagaaattcatgttctttttagctcgaaggtttcctcgatttctcgcttatttctatcatagaagcttcttatctgggaaacacggtcagattgacaagtggttgtctatgtctctgggaaagagggtaaggcattttctatcataattttgtagtttgttttccatttcttttcactactgagctggtttataaactttacactgtcataagcttttatgaggttcagaagagaaggttatactaaggtgcaaaagcttttgctttacattggctatgaatcacaagtgggctccaaccttttttgaagtgaaaagtcttgaactttatgtgactagccaattaagactccaaataacctgtttaaagccttaatgaacaattttcttaccttctccaggacaaggctttaatagaggacccaatctatgaagaattctggcaaagggatgtggaagaatccattagacagggagatgtaaaaccctttattgaggaagctgtaatgcaagtttcaaattggggtttctgtcttccagaacttagattgcaaaagaaagaaagaggcaaaggtttgtttaattggcttaaatcattggtcattgaagagcaggaagaatacttgggctttctaggtccaattcacatatggcaggttagtgtgatctgcatcaaacattctttctttttacttctgattacatctatagatcccccacttctctacagataagaaattggtaatgttaggcagataagtagaaatttaagctatgtttggaagttagactttggtgaagaaagaaaaatgtaaggaaaatatagggaaaaacatagtgtaggaaataaaagaaaaatcaattttttttatgttcgatgttccctataattctttctatgccaaacatgagaaattgttttttattttccatactttttgttttccctaattttctttagctccttcttttctccaccaaaatgcaatttccaaacacagccttagcaaaacaattgttagtattcttatttattacaaaccgagttgtgatcttttcctctctatatcccaatgttgaacaacagggaatggatgacagagttgttccgccatcaatgacagatttcgtgcaccgaattctaccaggagctgcagtacataaactcccatacgaggggcacttcacctacgtttacttctgcgatgaatgccatagacagattttcaccacactttttggaatcccacaaggccctttgaacaacaacagcaacaataacaccacattagaactgaatcaaagtcccatagaagatgaggctgaaacaacagacgaaatggtaacaacaccagttgaggaaagatttgaagtttgatgagatttaaacttttccttttttttttctacttgaggaagctactgctgtacataccgtagctaattcggctattcgtccaccacagaatcgaaaatagaatagaaggtgtaatattccaagtgttcaggttttaagcttctataggaaacattgccaatacaacaaaaatataatctggtttttaattgtaatgatgagccattgatatctgtttatgctacagccattgatgagcacattataaatgttgttacataaataaaatcaaacaagaaataatgaactgagatagtaacacaatttgatctttatttataaattatcagcaaacacaaacttcttgtgtctctgcaattgaagacatgtcactatgtcatgcctcttctaagagcaatcaatcccaactgatgagctataattgttctaaagctaaatgttctatttttggtgctaaacatattttaattatttatttatttctctcttcaaatatgttaatttattttttattatttaataaataaagatacaatattttaatgatgtaaagaaaaatatagagaagttgttgtagggtgaaaggtaaaagtttaaagtaaaataaaaaaaaaatgaaattttaatgagatattttaaaatatgatatagagaagttgctgggagtgctctaggtacacaaacgagcaaatgtgtaccatgcaaaatttgactttctatgtatttattgaattaaaattatttttctaaacttaaattaatccatactgatagaataggctaacatttcataaaatccaattttacctattctatttcaaacaccttaccctctcttcctcccttgtctctctcactatttgaacttaccttaaggacttgacccacgacccacaacctcgatcccttctctctacgaccactgtgaccacggacccaatgacctctgcggacccaacgacccacagactcaacgacttctccatcaaccacaatttctccattgacaatgttgtcaaaggtaagtatcgtttttttttttttttgcatgatttttgactttgggttagatttaaagttagaatggtcatcaaagataagtctttagagtttctttctgcttccaaattcgtctctcaaaagtgctaaaagttttcttttatatctcctcattaggatttaaaatcctgggttttacaaaatcaaatagtgggtcgtgacactgctggagcatgctgcgactcgtgtctctaatcatgcgcttgggatttcaaattttcacctagcgagcttggacattcactccccatgtcgtgagcttgaagattgaaattgggtagcaagtttcaatcgctccaatgcctcaacatggaattccaatgttgaggcccgcctggacacattcaaaacaccatcttgttgcctatcttatgcatcttagcaccctggcattgaatttccatgccatggcgctactctagattttctaattttttaacttcaagcgctccaatcacactgaatcttttaattttttccttgaattaatctttggtgcactagcgacaatatttgtttctctaacctagttaaaaaaagaagaagtaattaatatgattgccataatcttacacacaaaaaaaactcacataaagccttcataaaatccgctaaaaataaaacttaatataaaattctttgaaaactatgtatcaccatataaaataaaaagaagaagaaccaaacaaatttaccattttgtttttgtggggtctctttacatcatttctactattaaacaatacctttcccatttgaagagcaaagtgttgtagtgttagaatatgttaaaacccaaaaagcaaataaaagtcccttattgaaagaaaggtattaaaagcttttctttttgttctcttctctaaaattctctaacaagaaccccaaacatgaattttgggtatttgatattgaccacaataattgggctttcaacaacaaccatctcatactttgttgtgagcccaaccatagagagatggcaaatgaagcaaatgagaaaagagaagctaaaggtgataaaagaagcattggaagaggccaatgaaagagttgaaaggcttgagaatagacacgagcgtattttgagtcaattttgtggctattacttgacacatgcagagcttgaggaggctgttgtggaagctcgaaatgcagtcaaagaggcacttgtggtcacttctacactcaccaaaatgcaaattcatctcatcaactctctatctactgattattatcataatattgatctctaatttatttttgagtcttccaattttcttcttttttatatattttatttactatgcttcactcttatgacttcagtggattaggaccactttcgaatagaggtggattttgctttcttaacacaaacaagggtgtcggaagaataagaacattatatatatactttgagtctcaaattatgaaattatgcatgactgtaatatataaaccattaaataaaaaaaaagtaataaaaatcagcttaagatatttattttgattattgttttagttacataaataaagtaaaataattttggttttgtttttgtttttatggttaaaaaaggttagtttaataaataacataatcgcataatagttttcattattttatattctgattctagtttagtaaacatattattacatttggttggagtaatgatttttaccatttaaaagtaatacttaacatacaagaacaagctatgtttggtgatttatcaaaaatataatttatgtgtctttcttctacattgtttatgtggtgtttatgttacacactagtagctaacctcttaataatttttagttggataactgtttttttttttttataatttttattcaattaaaataaatggacttaatattaaattacacctcaagagtgctaatcatcgtgagagcgctttttagtatttttttaataaataaaatataaatagttattttttttaacaaaatatataaatagaggaacgatattaccgaatgaagaattctgggttgagtcgcggactaagtcgctctctttaagacgttcgcggcactgcccaggagtgtgcaagca

SEQ ID NO: 28029 - DNA, 1766 bp, Cannabis sativa
gtgtgctgtgctggcctggccgacctaaacaaaaaatcacgtgctagatggatgccctatgtcacatatacacaaataggtaaataacacgctaaaacccgatctggatacctaactcacaactacaagtttcgatattgataatcaacttgacaataccctaattattgaagaaacaccacaaccaaaaatctaaaaatgacacgaattagaaaaatagaattttttgggatcctgcctgtgatctggttaaccatttctacatgacctgtagaaccggttaatcggtttacaccagaaaactccaacaattccaaaacttgcacaattcgtacccaaacttcaccaaaccttccagatcacctataacaacatccaagaacacaattcaagcactaaaagtaacatacaaacacaaaatccaaaactaccattgatgagtcaagtttgagttctcaaactcaaacttgctcattcttctctcaaaccaacataaccagctataatcaacttaattctattcaaaataaccttagaaatcattctagaacaaagcctaccataaacaaccaccgactttcaaaattgcatagccaaacctaacttgaaatttaaacatcattcaagcaagaattctagagtttaccttgatgaaaaccttccacaaactattgagcaacactctgagaaagctttcttgatgggccaacttctttttagtctcgaggaactctttagacactcgatccaccttagggtcttgctcatagtgatacccatccttgtagtacctgtatttgacgtactctccatcatcatcttttccctcatcagcatattggttatcgtcaacatgcttatggtgttttctggggtcaccttgtcagttgtcatcttttaatgtatcccctcccctcacattgctcagctgagcgtgctctggagaaagagggtttacgtcttccaaacagtgttgagactgccttgaggagtcattttggtaattgtttttcgagtaagcaccattgttataatagcactatgggtttagatttttcttcagctctcaaggaaagtaccaaaatatttgttgagattttttaaaactaatataataagagcttaataaatagtaaaatgcaataaatttttacgtggttcaagcattaatgagccttagttcacgagtcagtctattagccttaaaaggcgtatatgatcttttttacaatgtttatgcaagaaatcctaactctgtactcttaatttctcttggataagaggaaagtttagagtaattttagcagagcttcgactatcttcctttttcatccccctttgtatggaaatataagggtatttataggctaaagggaaggtatggacatgcctatgatctgcctagagtttttgcaaaaagcccactaatggggtaaaatacatgcaaagagctgactattaggtcccttagaaggtattgtgctcgtccgttaaagcagttggacaataggggaccaccatttgtacaagatgtgtgttgccaaaaggtttaaccttaaaaagtaaatgtctggaataatcgtctgacaaaaaggtgtagggagtgtgcacactaccatggccagatataggggacaagatctgatcctgtattagaaaagcataaccgtcgttgggcgatccgggctcatcttcaaggtagacatccacattctttttgggtggtcagtgtctgtgataaaccctttgagtatccttccaggtat

SEQ ID NO: 28030 - DNA, 2864 bp, Cannabis sativa
  modified_base (2242)..(2246): a, c, t, g, unknown or other
gtccaataaaagtttgaagcagggacgttacaatatgtttaatattgttaataaactgtatttcagatagtttttcaaaaatagcttgttaaaaatagactttcctactgtaactatacgtgaaacgatcatgactatatatataagcaaatatattgtttaaaagaaatgactatatatataagcaaatatattgtttaaaagaaataagcaaaatgtgattataaaaagtgatatatttgaaacaattatagttttcgagagaaatttttacaacaaaaaaaacagttaaaaggcgcgacaaaattcttttaaagatcatatagtttggggacaaataatcttatttattctttattatgtacatgaatttagtggtgaaggaaaatagaagagatactaatctaacactcgtattccactcatggcaaagtatgttactctatataacataagtcattaattaattttttcgtaggaagtctcataaatataaaatgtatatatatcgtataataaaaaagaaagttgcattaagtacgattcaaaacgtaagaactatgcaaaggaaatgcaactttataactttcttgttaaaaataaagaaaaaattaaaatgataaagttatatattgtagaaagaaaaaaacaatgagaagctatatatagcataattacttttatgaactggaatgaagtagatatatttgacactttctgtttgattcgtttgttttaattaaatttaacatttccttctttaaaagagaagtagccaatatgataaaagagcttaaagaagatcaagtagatacaaagacaagcatctatctttagaccataaagacataataactttataatcatgaaagggattccatatgttcacatatataaccatattaatttatatataagaaaatataatatatttatagtacattaataatatatgttggtgaatcaaattgaaagttcatgttactctatctaagaaattattaattatcaataaaatcaccctaataagtttgaaagcacctgatcataattatgatgtagggtgatcaccttttttttttttttgcatatattattattcgacatatattctgtttctgatgtgtctatgataataacctaataataaattcaacctttcttttttcactgaccaatgtcaataataatgtactgatgtaataatttttcttatggcatggtaaagtgataacaaataaatataaactaaaatgcttcctgatccaagaagaaaaggaaaaggtatgaggtggttacaaagtaaaatttgaaattttgaattaaattaaaaaaagtgttaaataggaaaaggaaaaaagaaaagtaaaaaaaaaaatgggataaagagaaaagtccggttctacttcgattttaggaagcttggtcaattttaagctagcttaaaaatataccttccccaacctaaaagaaactattattttatttattattttatttttctcaaacaaaagaattattataattaatgataggaaaattaacattctctatactttttaaagtataattaaatctttatgtatataatcaaagaatttaagggcaccattttcataccaacattttttgagtaattgatggatgtttaccaaaaattacaaaaaaaaaaaaaaaaatcacttctctcgtagattttttattacaagcagcttgtgtaactaactttactatgatatcgataacaagtagtaaaactagtactatattattatatatgaatatatatattatcaaaattaattgaaaaataatatggagatttatatttggaaatttgactagttatgcatttgataaaaaaaaatctaaacctaaattatttaatattggtagaatatatcattttttcctaaaatctcattctacccctctcatttgaacaaccctctctctctgctttgtaaacacgcacacaacccaccacctacaaccttggtcccttctctctacaaccaccatgaccacagacccatggacccaatgattatcgcggacccaactagttctccatcaactacggcttcaccatcaaaaatgttgtcaaaggaataaattgtatgataaatgtttgttatatgtgagtaaatattggatttagggtcgaaaataaccagatctgtcaggcccgatggtagtctgatagtggtccgatgtcatcctgttgttaaaatgagtaaannnnnaagacgaaggtccgatggtagcccgatgatatggttcgatggagtccgatggtggcccaatgccttcctgacgagcttaatatggagtttaacatctataaatgtagatatggtccgatgatagtctaatagtagtccgattcacctgatctattttttttatgtacaaaaacataaaatatgaaaataaaaaatggatagcatcggaccatcatcgaaccccattagaccaccatcactatagaaaaagaaagaaagttataatgggtatgaatataaaatgtgcctatttttttttaattttaataagcttgtgtttaaaaatttaatacacactaaatataatgtatgcatataaattcaaattttcatttatatttaacttaattttcacaagtgttacatcatcatcaccatggttaagtcttataataatatataatattgtttggaatatatcatatttataagaactagttcccatgatatattgaattgagtacatattataatttagtcctaataattaatttttcttttcctatattatattttgaaatataggaagaaattataaccaattaatcccaatcaaataatgaaaatcggatattaatt

SEQ ID NO: 28031 - DNA, 1979 bp, Cannabis sativa
cccatacaaatcattttaaaaatacatacatttttcagtaactttctcaaaaatattgcattttcttttgaaaggggctcattaatagatggatttccttatttattttggaatgtttagagtttctagcttgaataacattatttttttttttgatgaattattcactttgctttttgaaaaaatatatataggattcatattgaattgaacaattaatgatatgacagatatttgtaatgttgagtattatatcatttaacatttctcattattaaattaagctccgaaatatatacaaagtgatcattaattttttttataaaatttatttaggatcccactttgtaattaataaaaactaaaaaccacacatcaatacagagtatttaagatggaacaagttgtatgagtgatcaatatacacatattatgatcaccttttcttatatttctttgtttgttttgttttgtttgtagatatttatttggttagtgattccggggacaagaaactcaagagcagaccatgcaaacaacactctagctctgttcgttctcattcaatacattcctagactttttctcatgttccctttgaaccaacgtattatcaaaactactggcgttgtaaccaaaacagcttgggctggcgcagcatacaatcttgttctttacatgctagcaagtcatgtacatatatataaatacatttacacaactcactaacttaatcaatctctttaattgcaatgtttttatttcatatcccaataaaatactttatttgttgtttttggtacaggtattaggagcttcgtggtacttgttatctttaggaaaacaattctcatgttggcaaacagagtgtactaaggaaagtacctcaaaacttgtcccttgtatcccttcttttctagattgtaacagcttacaacaccctgatcgaaaattctggttgaacgttactcgtctaaccaccaaatgtgatgtatcaaatgataatgctgccttcaagtttggaatgtttgaagatgcttatgttaatgatgttgcctcctcaaggtttcttgagaagtacttgtattgtctttggtggggtttgagaaacttaaggtatgatttgcatctttaatttgagagctttgtttgttatttgttatcttaaataacactaagatggttgtccaatacaagatttatcaatttttttttatatataaaatgatatttttggaaaaattaaataacttctctgtatatagaaaaagggcattttttttttaaaatcatgcacctcaagaagtaagccataggctccagtcttggacacaattgaccttaagcacatgcaggagggccataatgcaaaaaaataaattaggggtaaatagaattttttaaaataaaagggtacaaatataaaaaaaaatatatttaattcttatttttttaaaaaaaattggggcctcgtgatagtgctataataattattaaattaagttatatgaaatttgatagttaattttaataatatgacaggtgtttttttaatattgttctaactactaatgtaatatagtaaattactatatggttctacttatttttaatttaaaaataaaatatgaaaagtttgatattagtcactaacaataatatgttgtttatcctttccacaacttctgaaatgaatttgcaaaaacaacataataaaataatgcttccacttctttttttggttctggtgctaatgttacttctatctgtagttcatatggaacgaatttggacacaagtagatttattggggagacaatcttttgcattcttttatgcatgattggtttgattttgttctcacatttgattggaaacatgcaggtattatattttaattgatttgtcttttcacaattcactttttttaatgtatgatattaatgaatgttgtattttgaataatggttgaaaagaca

SEQ ID NO: 28032 - DNA, 2421 bp, Cannabis sativa
tttaaatttatttacgcccccccctcactttaaattctgggcccgccactggtaacaatatatatatgaattgtggtggttactaataccatgtacacatttcctacaaaaataacgtgaacattaattatacctaacataataactttgcttttcaacttgtgaacaccacttgtttggtgtgagacattatttaccattcaaataccatttcatcactctatcatgatctttcttttacttcccggaatttttaatcttgggttacgatttctctgcctattatatttaatgagattgtgacttgtatttatatataaaaattaaaaaagaagtaaagtatttaaataaaaaagtggtgacgtgtacatataacaggtcattaatgcacctaagagaattaaatccaagtgggccatattattttataataaaatttttctttcttttcgtttatagttgatcagtatttggtaggaagaaagagctaatattagctaaatagctcaattcaaatgggttttctttttcacacttacacattaataccaatcgaaatatctttaatcgtcatctaattttcatgttgactaactcaatattaacgtccccaacaccaaatcaatgttagactagttagcggttattaatattatttttaaattaaaatatatgatatttaatattaaaatgtattaataataatatgttaccttttgttttagagtattgctattgaatattagtagtatctaattttttttttataagtaacgctctagaattagttagcaatatttgttaaaaattattttcttaaattatataggatccgattagaccaatagcagtatgataccaaagagaatattagctaccaatagtaatttttagcaattctctttattttatagtgcttaataccttgaggtgtatgtttggtatgagggggagatgggtggatggagaggggtggagggagagagatggaagaagagactaaatcacttgtttggcaagagggagaggagagatagagggagacattctcgctccaaaccttcaaaatttaatccctccaaatttaaaagaattgtaaaaaaagacaatatattttgcaaaatacaataactacccttaaaaaaaataaaaaaatatatttttaaaaagacaattttataattttattaatcaattttttcttcattcttctcacctcacaactaataccaaacaatacaaacaagattaaaaatcctctccatccctccctctccatccatcctactctccatccctcccaccaaacatagcctatcttttttattttttttttattttaattattaccaaaaggataaaataaataaaatataagagaaagagaaagctgcatgcatgtaataatggtagccaaactcttctctctctttattttttttttctttaaatgtcacagttggtgcagttgtggcggtacccattacccaaacaacacttaatacaccatatgctacaaaccaagctcataaagcttcccattatagctctcttaaacgctgtcgtttaactctaaaaactctctaaaaactcatcaaaactcatcatcatcatcatcttcttcttctttttcttttttatatctttctcagcatttgtttatttttagtatgtgtgtgtgcctaagtacaaatacacacatacaaatatgagctttaccgaaggttgtaatgctttcaagaggaaaggaatgaaagaaatggatcaaacccatcaaaagaattctttcattgcaatctcttctgtaaaaaacagaaagaaagataaggattcacagagcttaaacaagccaaaacgatatgctttgatgtcgtttagggacttaccggagtacatgaaggacaatgagttcattttgaattattacagagctgattggcctttgaaagaagctttttttagcttactgcgttggcataatgaaacacttaatgtttggacgtatgtgttattgcaatttcttttcaatcaagattttttgttttggtcatagttttgtcttgtatttgatgatgtaacatgttctaattttgattcaattatgaatttattgagctgatttgggaattggggtttggaatgttttgcaggcacttacttggatttcttctgtttctgggtttgactatggcgaattttttggaagtacctcatgttgtggatctccttggtttttttgccaggttgtttattctgttctttgtctttttattattatttattcatttggaatatatttacttttttttttacatatatatatgtgttttgtgttactttcagattttttaaaatattatgattgaactgaatatataggattaaactaatatatgaattcagaattttatatatagatag

SEQ ID NO: 28033 - DNA, 1466 bp, Cannabis sativa
agagaacttacctggggtgcctcccaagagagtggtcgttaatgtcatatagtcggacgctgaatttctcttgcaagctttaacttggataaagtctacctcttgcatccatataagggctcttgtataccaaatgaagaaaattgtccatcaatgttgctaatgtcgaagctatccataagactagatcccccttcacgattcccacacatcagccttattatacaacgtcaaataattcaaaatcgttctttaggctttcctttcttcttcttgacaatcacttcttaaaatctttcactaattcaaccttacagtaggtaggaatgtcaattggagcaaatacattgaaactcatctcttcatcttgaacttgcaacattaattcccctttttatacatctatcaatgctctctctgtggctaaaaacagtctttccaaaataataagaattgtttaatcttcctcaatatcaattattaaaaaaaatcaagaaggaagataaacttattaccaacatttgccaattatcaacgaacggtctgtcagttgcagtgcctgttgtcggtttggcttctctcaattttagtcttttaaaaacagacaaggaaattaagttaacgcttgctctcaaaacacatagagcttttatttccactgaaccccctatcgagcatggaatagtgaaactactcaaatctttaattaagcttgggtgatagtttcatttgcatattgcattgcagtccttagtaagtgtcattgtctcatattcctccaactttcttttctttgctaaaatctccttcataaattaaattaagttggcatatgctcaagtgcctctataaagggaatgttaatgtgcaatttcttaaatatttcaagaaattaaaatcgaaagaggcggaccttcttccccattttctagttttcatctctctctctaaaaaaattaaaaaggaaccactgcatcgtgcattgtaggatgccatgccaccacccctccaacatcgcccgagagatcaaacctcaacccccctccactatcgtccaataatttaaggtaattactaaaattctaattttaatttgtaatttttttaaaaaagttttataacatatttgaatttgtgtataaatgtgtacatgtatttaaattgtgttaatttatattatttgtatatatttacacatattttattttaaattttttgaccgttatgtatatacatatgtatgtgtgtgtttgtgtgtatggtatatttgtatatgtgtgtgagtatgtctatggatcttgtattttttaaagtaaataataattacactttaagaagctatttgagctcacatactgaccctcgtctagctttgtagaaaaatccttgcacaaaggtaaacaagtcgtcgctaaggacatgtttggaaaattatggaagaattacatttgaaataaatataaccg

SEQ ID NO: 28034 - DNA, 6909 bp, Cannabis sativa
  modified_base (6332)..(6346): a, c, t, g, unknown or other
taatgaccatattttctgattagattccaaatcctatatattgttggatttgattggttgtatatgttggatgtattttaattttaattctattaaattttaaattcatacaatattttaagtccaaattagttagattggattcaaggtaagtcttgaaattttgtgagacataagaaaaaaaaaatattttggtccctcatttgaaaaatagtattttttaaatctgtaataaaaaaatattttttttaaaagaagaataaatttttttagacccttaaattaagtgggttctaggtacaaagcatgagaccatacttaattggactgaatccatccaatgttttaattcaattcaaaaagaaaatatattataatcctaatttatgtataaatatctaacaacactaaatttaattactcttccaaaccatattataaaaatactttcaattagtttaattatatattagattatatttaattaacttttagacatctcatccaacaactaatactctctaattggatgttaaaacttttaattcgatacaattataattaaatactaactattaatttaacagctaaatatgattggatcggttagttataattagctcaaatcattttatgcatcacaatcgtactcactagacattttgttgattcaatgtaaaaatgttactaaaacattaattttttttttttaaaaaaaaaatggattaaattaaattattgtttattgtggtccatttttctcttattaatttttttatcacaaaaagtcttagaagataagatgacattatttcaaacactattctttgataactgtcaacaaatagatatggtgtccaacccttctatgtggtcattaaatagaatagtcaaaaatcatttgtcaacttcatcatccccacacaatattaaacaaaaataaaaatcaataaccatagaagttttgatccacaatttgaatacataaattttgatccacaattcacatccatatccattattggatagactgatttttttttttcaataataataatatcaacataatatctatctagatgatagatatataagaatagacactactttatttattaatacgagaccttctaagaaagttagtataactcaaaagctaataatatttcccaatgtagtattaattcacttatgtttttgtttaatatagtattaaggtcgcgtatatatatacatattttataatatagttttataattttttttttaatttttcctttttataatttaaattatatctcaacacaacaagctgattgaacagatccactgaattcacagggcacaattatattttccaacttccccttttgtccttgtttcaattccaccataaagaaaccatgggccccaccctgataatctgagcccatcactagggcccgataatccaggcccacccaacacgttccaatccgaaccgccgaatccaactcggcccaattagaaaacttcccttccttctctttccaaacacccacgcgtcctctaggacactccccttcagcccacacactctccacgcgcctccattccccactagcaaaactataaacctccgcgcttgactcaaacgcgccctgactgtcggtgccgtacccactcacaacccaaaactcaccgtttaacaccacgccttcgcactcgtcacggccctgactcatctgagccaactcgctccactcgtccagactcacatcgtaaacccaagcagaactcaacgcgttcttattctcatcgtgcccacccgcaacatagatccgacccgaataagacccgaccgcaaagaacgacctcttacccggcatggccttggcttcgctccaccgattcttagcgaaatcgaaaacgaaaacatccgaaacgggtccgtagcttttcggatcccaaccgcccattacaaccagcttaccttcacaacccgccacgtggcagaacataggcaatccgtccgcgtatttcggaaccggatcgatccggcgccaggtcgaatcggtggtatcgaacgcgacgagtccgaaactcggtgagtcggtgcgtttcggggaagcgagttgaggattggtttgagcttgtactaagcaagctagtttgtgagtgaaaccttttgattttctgtatcgatgaaattcggaggtttggatgagatctcgccatcgatggcaaactcgggaggcgacacagtgagtcgtgtactgaagacgagttaagcactcgtaaccgagttcgtcgggtagacccggaatgagttgagagaactcgttatcgttagagtgagaattttccatttttttttttcaattaaagaaagcttctagaagaaccttatcctctgtggcggtttgagaagtgagatcgttgtgaggtgtatgggtatttatacagtgtgtttcagtgataaaatgaagctgcaataacgtgtaatatactgccacgtgtataagaagtacactctaaactattctcactagtcttggagtacattttatttttaaaactgtaaactattagaattttctaaaaatttataagcagttttaaataactacaacgtatgcaagccggatcttgggctatgcccgtgcttagagccacccaaactaaaggctcaaaatttttgttcaatatattaatatattaatgtgtagaagaaaaaatagtaatttcgtaaaattttgttaaatataagctcaaaatcaataattatcgagaaaattacattgtatattcactttttagtttttaatttaatttttacccttttttttatcactctttaatttataccaattttataggttatacctctattatctgtgttaggaattctaattttgataagttatgtgaggttatatttgatagtttaatcataaatagagtacttatcaattaaaattattttatagttatatttacttaatatgtaataaaaaatagtaattcttaacttatctcacaattatctctatactttaaatacaacaaaaaatcttaagcccaatttttgtcagggccagaacatatgtgattattaaaaaaaaaaagatattagcagctaaactatctgaactttacgttttgtaacacttatccacaaaaattaaaattttggtggcaaaacctactgaactcccattgtgttttgctctatacctattcgtctaaaaatcacagttaagtgccacggtggactgtcctcgtgtacacacttgtacacgtggcaaatttttagtggtgcacgtaatattcttattttttgtaactttgtaaactgaaaattatttttaaaaaataaggccaaataaatttaattgttttcaaaaaacaattttttgtttttaaaatcaaaaaataattttttgtttttaaaatcaaaaatttattttttagttatgaagtcaaacatgcactgatatttttttttttttttttttgtaaaaatcccttaaaaaaaattaaacatagaaaaatctcttaaatgtcaaaatcgatcgattaggaattaagaggaccaatttgtattaatgtatagtactttgggtaattataacaagtggttgtaaaattgggtctaaggttaaaatagtaaattaatgcatgcatgtcattgtaaaggctgccacgtgtggataactagataaagaggtcttggtataaatagttgtcgtgtttatggggtagagttttctcgaataacttttaggaaaaagacactttgtgatcacattcacaaaaaaatcacactttttttctcataatgttttttttttttaaaggaaaatatcattttcgattagattttctgttttattaaattataaaataaattctatattttttaaaatagtataaataagatcttaaattgattttttttttatcaaaataaaatttaattataatccgatctaaaagtgctatgactaaactatttatattttctgtattcgttcgtattagaaattgtttttaagttggttatattaaaaaaaattatcaagcattaagttcaggatcctatttttactattttaaaaaatacagcgtccattttgtcaattaaaaaaacaagtagtctaatcgataacttttacaaaacacagattcaaaatagtatttattatttttacacgacattgttcatttacgtgctatattcttttaactaattatatttactaaagattactttatcgatggtttaaaaaaaaattatatttgtactccacaaaatgataattacactctaatatttaaaaaaaaaataagcttaaaataacttttaaaaattactcttaatatttttttttaaaaaaaattctcatattattttgtgttaattttattatattttaatttttttttaaatcataaataattttttttaataaaatttcacatattattttattttaatttttgttataatatttgaaatataattatttttatttgataggcatattttttaagaatataaattagaaaaaaaaaaaaactaatgtaattaaggatatatatatattttttataaaataaaaattattaaaataaaacacatttataaatttttaatgtataaatctcccaaaaaaaatactttaatttattgcaaaggagagattaaagatgagttttactaaagtaaataggcttgttatatactttttaccttttaaaggaatttaaatatatatatatatatatatattttacagaatgttattttttcaattttttttttcacaaaataatattactttcaccttactaaaacataatataagttttgtgacaaagtgaaaacatacttttgatatagcctaattacaatttttgtccctgaatttttcaggccgttaaaatttttcgttgaaccattaaaattgttagatttaaggatttttgtttaattttatttaattttgctaacatgatgattgtccataaactaaattgtacccctaaattttgatatcttgtcaaatcatgttttttttttttgaaatgaatcatattattaagcagtctcactaggcttatctgccaacaaagggacagcagcacaagagggcaaaaaatctgtccaaatacaagaagaatgagtcattcaactccaaatagctaaggcatttgctacagcattacaagctctagggacataagaaaactttacagaaataaaatgatgctgaagagataaaatttcactaattagcatgccccaatccgatgagatatatgtagcagtaagcaaactattgataactcccaaacagtctgagttaataataagctgaggtaaagaccatttgtgagccaataaaatgcccagccgaattgctaccgcctcagcaagatgcaccgatagagtacctggaagaaatgaactttaacatgcatcaaattttactcttaaagttttcatccacgtgagactttttatagtaaaattagacaaaaatcattaaatttaactatcttaatggtttgagagaaacttttaacgacctgaaaaatttagaaagtataatttattatatgtcaaagctcaagaggaaaaacctacattaatcttgatatattattgttgaagttaaaagagtgctcgaaatgtgtggataatttagaaagaatgattagtatatggattaagtgtgagaggaattgaatcctcttccttactcttttctcaatattaaataatattatgccgttaatctctaatttgtcataagaccttgtccacgtaaaagttttccattcgatttttcttttctttttcagtacttttttctactagcttaataaagctttagtattaattatctcatactttaatttttgtccctcttcttttttcaattaccaaacatttccaaagtgatctacttgcttgggtttgcttattattgtataaactaattatggaaaaaacaaatttaaaatttaaacaaagttagtcataaaagtgatttattattaatagaaaaatgctaattaaatggcaccaactgtttgtaacataacaccttaattataatactggtgtagttatatattaagttctacatatcttagttagtaattattatagaaaacacttaattattcgtgtgcaaaattttacctcatgatattattatacattaggctaattaagatttttatttcctgaactttgacatgtaccaaattatgtcttctgaacttttaaggtcgttaaaaatgctcctaaattattgaaattgttggatttaaggactttnnnnnnnnnnnnnnnaattttactatttcagtaattgtttatgtactaaatcatgctcctcaaactttgatatctatcaaataatgtccctcgaattttgacatgtactaaatcgtgccgctgaactttcattatcttagacttttttactaaaattggaaaaaagtcattaaatctaataatctcaatagttcaaggagcatttttaacgaccttaaaagttcatgggtcataatttagtacatgtcaaagtttagataaacaaaaatcctaattagcctatacattatttatgttcctctattaatataataaatatttaatattaagattcatatattttaatttaataattattataaaaaaattgctaatcattcacacttaacacctattattacacatgatcaattagcaaattagcagcacaacctaaagccgaaagttaagtctaaactacttttagccgaaagtaaatgtgtgaattatggaccattaattaatccaagcacctatactattagcttaacaaaaaccaataacacaagtaaatcataatatatatatatatgggtgac

SEQ ID NO: 28035 - DNA, 4036 bp, Cannabis sativa
  modified_base (3996)..(4006): a, c, t, g, unknown or other
atattataaaaaataaattttaaatgtaaaatagtttaactattaaacttaatttatatatattatattatagataattttagtaaaaaatatataaatcggtttgtttgttcgggttatttaggcgggttagaataatattcaactcacccaatacattcattaggcggtttgaattttcgtaaagttattcgagttatattttttatcggtttatttggtttggtttgggcggtttattcgggttggatagtttgtaattttttttgaacaacctaaagcaaaatagtacggattaaattaaatgaacacccctactgcaaatacctcaatgtttgaaaataatttaacagaatggtaataacagaagtaacaaaaaaatgtaactttaaatatttaatccatataaaagtataagaaactgaaaacataagatattcatgcagcatttgattactaaatttccttaatgctcgattctcatttaattaaacatattaaagatgtaactaggcataaatcatttttttagaaaaataaaaaattattttaaatttaaaaagaatattgatattaaattcaacaccaaagagcattacaaagttaaattcaacaataaaaacaactaactctaaatgttcttaatggctaataaatataaattccaaaaactaatgttactattaaacataatttctcaatttttcactcaaaaatatccctcaagtaaaacactcttaccagaaattttaggcttcaatttcttaatgtccaaactcttatccagattgctcagagctgcaacacaagagttctcaccatccttttcaacccactgaggcaacacatgtatcacaaccttttgcaacaaattttgctcaataccctctttcactagctcattaatatcatctacatttcctctcaaatccaacaaaacactgcaaaacccttggcgcttactgtattccagaatggcgttcaagctgatttgattcaaaactactgtttctatttctctcttaacgattttcgggtttactactatctcttggttactgaaaactaccaccttagtagatgcttcttttatgggcaaatcaaatattttatccaaagatgtattgttagtattattacttgttgtgatgatccagagcggttgattggctccgagttcttgagattgaggaattgatagcttgtcagttatcgaggcagatgaaactataacagcatcatattcttgcagcaactgcgagtagtaaccaccggactctgtagatccttctccgagctggtctacaatttggccattgactgagagtgagtatctgctggtcaggaagagacccttaaataaacatattttgaatgtcacacaattaattcatagtttataaatttgtagatcagttaactgaaagtatcaaaagtagcaattaatttatttacctaagcgtgacgaaaggcttcccagtgagcattaggtggacaaaaggctcattcaagctcttgcatagctcttcttcgatccctacagtaacttcaatcccagcatttctgagtctctcaacccctttcgatgctacaagtggatttggatctaccattccaatcacaacccttttcactttggctttaatgagggcctcagtacacggtggagttcttccaaagtggttacacggttctaagcttacatacgctgttgcattctcagtcgaatctttagcatctctaagagcaaatacctatagaacatgcatgccccctaactcagcattagaaaagctacttgaccgaaaagccactagttctataagcataagctttagctttaataattgaagatcaaatgggctacttgggattttcacagcatcaaaagcttcagtttttcatgccaacttagtaaatatatgcccagaaagccatagctttaccaacagaaataaggcttttcagtattaaaaacacctagaaatcaaagaatttaacaaaccccttagagtcaattaaatctagtcaaatctcctgataccattttactacttttgtaacaatacaacactaatatgactttaatataactaattcacagagttttattataagtgaaatttacctcagcatgaggctggccagctttaggatgaaacccttgaccaacaatttttccatccttgacaataacacaacccaccaagggattgggactggtacacccgatagcctttcttgcaatctccacacacttcctcatgtaaaacccatcatcataatcaaaatcaccatcgccatcactgtatccttgtttagcagataccccactcattaacttaggcaaagtggttggtgatatagagattgttttggatatgagaggaccagaaggaaaattcgaattggataagaaaagttgggttataggaagaaggggatagtttgaggaaagtggtgtagagagaagggccaagggaagtgacagtctttgaacttgcattctcaactacaatagtgattagttgccaatatgaaaatataacaaaatcaatatacatgattggttgtgctgaattcaataaaatggattttaagaacctcaagccaatatgcatatccttacaatctatgttctttgtatctaggtagacatggtatcaattatcacaaccatacaattatattcaaattccaagatactaacctaaatatgtcacactaagttgccttactagttgctctttagttcaactaaataagaaatagtggaaaaccatatatagtcctttgatacagattggataaatcatacttataagaaatgagcatgtactttaacattacataaacagagaaagctaaatcaaacacaacattcatggttatcatctaaattgaaacattaattatttgtttcctgaaaaattggtaaagtatccatttttttcacaagtgtttgttgtggaaattgggtattggttggctttgagacattttatcaaacagttggtggtgggaagagaccaaatcttgaatgcactctttactaacatattcagatttgatttcagtaaaacaacaaccaccactacaaaattacaaatatattacactcatgtacccaaagaaagagtctttaagatccaaaagttgtgttcatcacagcataattcatttgtatatacacaaaagagaaaaagggtaccttttgagagtgagatgatgcggggttgaagttgggtattgtagaaagccatgaaaatgtgacagcagcaacagaagttgcagccattgaattttgtgtttctcagagaaatttctccatatcaattttttttgttaggtgaaacattcacatacaacacaactgtttgaggggtataatcgtcttttcgccccaccttgataatccgatggctacaatttcagtcagcgtaagtatttttacaatcaatttaatagattgtatcttaggtctagccttagtgactttgtttattattattttttaaataaattatgaaattttattgataataatgagctaaaataatagttttaattttttattggaaacatttggattacaattaaaattctaattttgagatcatttgatagaaaaattaaaataaaatgagatagaaaaatattgcagcaaaatttactagtcaactttctaaaaaaaaattacttgtcaacaaaaataacaaaatttaatttttcatgtagaggagtgctactatcaactttctgttacaatctattagtcagtcttgcacccgaatatacatgttggaatttttttttcaatttttttatggcggtgtttgttatagttacaacatcatactgcacctactaggttatgatcaataaagtctagtgacgactactctgtgaggaatcacatcagtcaaaaaggacgaaggactggactcataaaatccctacagaacctagggattagaccacgcattacctatgatnnnnnnnnnnnaatgtgtgactttactgatagttacagaaa

SEQ ID NO: 28036 - DNA, 1565 bp, Cannabis sativa
ttaacaaaacagagggtccaatcagtaacttttacaaaacacagggtccaaaatgtattgaattgggctgtgttggattttctcttgtgctactacttttccaagtccaataggtgattttcttctcacctggattgttgcttttacaatataataatatatacacatgttccaatgcatcctgtgagagttgtttttccttggcttcaaattatctctgtaattttgggaatattgctcactgataatgttgtatgttgatagttttgggaatatatacacatgtttccaatgcatcctctctgtgtgtgtgtataattcacgaaataagagggttctagattataggaggtgatcaagcaagtcgtagggggactagttgtttgtgttgttgcttccattgaaataatagtctctactaatggctttgttactttggctgctttttgtatctttctattattattaaattatttcaatttgtttggattaatatgattcgaggaaatttgttcttaggcctttcaattatgcatagggatcttttgatgacaaattggatcagtaggatatgaaattcctttggactcaaactttggttaatcctctatatcttatttaaattttagacagtattctaaagtacaaagttgaaacttaagacataatcatttgattatagttataataaaaaatcctagttttttttgtctaaatgcattgcaatgtgtttattattattttttttctatgatgtgcatacattcatcaagaatattgatgttttaagtgaagatgaatgtgtaagcatttgcaagtcaattttattatttttggacacttgtttagaatagttgaggatatacaagtagtttaatatttgcattagtagttttagcaagagttagtagtttagaactaaaaaaggcataaaagtcttaacctaactagtatcattgtcttgctttgtgcagtataaattatttctagcaatatggataatcagaaaaatgtagaggagatgattgatgacttgaccgctacagaaactaatttgtctagttctggtggggattaaccagtgaaagaaagaagaaaagagaatgtaaggaagaatagaaatgatcgttaaatgcatgacaaggacaagagcaaggacaaggacaaagacaaggagacagacaaagaaaaagagggatgtgaaaatgaaaaagggaatggaagaccggaaaagaagcaaataattggaaagaaaacatctagtgtttaggatcattacactatgttgccagattgtggtcccgagaagccaagggctgcttacaattattgtggtaccgattatgcgacagatacaaagttgaacgagaccagcacattatgggcccatgtgaagagaaaatgtaaaaaatgtccttttagtgactgggttgtacaaaataaaagacaataatctactatcgatagatttactaaaaagaaaacaacaacttgcaatgaagaagaagttgcttcaagtgggctgccattaagatttaatcaaaacctagttcggaaagcaatag

SEQ ID NO: 28037 - DNA, 3497 bp, Cannabis sativa
agatggtatgatcttataagatagtacaagagagttaagatcatacaatatgaataaaacaagtcggtaatgtattaacgaatgaaatctttaatatggaattaccaagtacagtttactatgcactatactttagtgcgtgtgattttgattcagattacatatgtagatagacatgcggtaaaagtattgtgtgtaatttgattatacatgactggaccgatatgtaataacatctttcatcaacatgcatttatcatgaaagagttattcatattacaacgataaccattagtaaatcagtctgaatcttgagtatacatgaactcctgtttgtgttcatcgagttctttgattcactcattaaagtttctcagagaaggtgattcttacaacttctattttgggagcttaataacatgagtgactaggaacatattatacgataatagaatccaagctttccgataggattaaatattaattctcttatagtgttaattctggaaatactaacagttggatctaaatttataattggattatagattaattggccacattgaattaatggttcatataattgaattatagagtaactgttccaagtaagaattcagtaaatataattttatattgtcaaagtgtgcaattttatatttatagtggagtaataatgaaattaataaaccaaattattctattgaagagttcaataatgattaagtgtttattggagtttcgaaatataggtccatggtctacaaatcaccactatacaacaatgtacaagagaatgtttaatttgatggaacaaattgaaaaaaaaaaattaatttctatgagaaataagtcttataggcaagattataatttttaaaaaattattcttttgaataattatatcaattatgaattgaataattaaattaatatttaacgataaaatatattaattagttaaatataatattattcttaaataataattaaagagagaaatagattatcttagtgtaaaataatatttattttaatcttaataaaataagagattaatgaagattaataaattattatttgttgcagaatgaataataaattttatttatggcaaaattgaaaaattaattttgggctttaaaatatggtccacgcttgtggggcttagtcccatacatgtagggtgacatataaaagcctcattagtttattttgattattttatttaataagataaataaaaattaatgataattattttttaattatttgaattaaatatattataagataatgtatttaaattaactgataatataaaataaatggatataaccgaattatgttattccattatataatgtttaccgagttttcggcaaccgaatatttttagaccttaagaaagtagtgaaggcatgaagtaataacaaacaagagattttcacgtggttcaagcgttaactatccttagtccacgagtccattttattaggctctttggccggtgattgtttattcaaataaaaaaatgatggactattactccttcccaccgtgttcctcttgaagaagatgaagcttagtaggaatattctaggattaatcctggggttacagtaatgtgtatggagaatcggtctttagcttgaagacgaagggctgaagtagtggaaaaaaattggttgggatcaaatcccttccttatgctttctttcgagtatttataggccgacttcacttgcctgggccatcttggatggattttcatagggatgaaccccaccattggattggtaggtggcatatttttcatgtggtctttaccgatgtcagattgtactggatgtaccggcggtgcttttggacgcgtgtcaccttagagccattctcatttgaattttcctcatccctagttgttgaatcgtttggaaaattacacaaggacacgcatgctcttcatagtgtcatggcgtgggggaagacgtctaatatcgtacactaagaatccctgtcattgggtccgtagcctgccatgcagggaccgacctttcgcgggccaaaggcgtaccctggactgatgcaccctggtagaagatccatattctttgcgggggacaaagggtcccgtcctctaggatggagagaattgttagctcacggacatctctcgtggcctgcacccaggaagacttttcacgcggagaccggttctgctaggttaatgttcttatcttcgtggactgcgaagtgaagcacttgggcggctcaatgactctttagccttctttaatcaatgtccctgtgtcttcctagaaaaaatacagatcacatttacccccaagcttttgggacataccatggtctgggagcttgcagcgccatctcttgagaaatctttgcgcacgtgggacttatgacaagtcatttaatgcattacgtcttcagcctccaaactgaagtgtcatgatgtgggaggcatgatttctcccattttcttgtgagcgtgttaaatgctaacttttggatttttgcgcaagtgctgggcgcgtgtctttaggaagctcaaaacggcggcaattggacttaggcagtcttctcatttgttgtgttctttacgatgcatgcaatgatgagagccgtttgttgggagatgaggtactcttttagctcctcacatccaatcattggatgtcttttggggcgaattgaagcgtggacttcttacaaaaggttctccttcctaggcatcccataattaccttcaacggccattatatttttcactctttctgcttgtcaagtcaaaacccttgagttgccttcttcccagtcacattttactgttattatcgccgaacaccgatcctcacgttgtcgacgttgcaatgaaatcttcaattctaacctcccctcatctactggtaagttcttcgtttattcattgttaagagttttttagggaatcatgacggcgcacccgcttctaggacaccagtttcagcagtgtcatacttggaaatttcggggtcgaataatgacctttttttttttcttttgtgccgacttctcacaggtacattatgtctactccggagaaaaccagcccttctaagacagcgggcagtatttcttctgccaggaagaagcaaaagctcgtggtgtctaacctcggaatggggggaatgggggaccgctcccggcccccttattcccaactgaggctgggccagcctaggtctctcccttcggcctcgtcaagaactccttcggtggggtttgccctccctaggagggtagttccttttgatcctcttcagatgcaaagggaaaaggaagcaaacaagaccctgatagggcatctggaggcgaagagactccaagttcgtcggcgggcggccatgatgtcggtggttcgcaagacggagattgcgacgacatgcacgcagtgccttcgacggagcaaattgtggaggtgaaagccttggagaatc

SEQ ID NO: 28038 - DNA, 3567 bp, Cannabis sativa
tctcatctgaataatatacgtctctatggaccttctatatttacacttattgttcaaataaaaaaattatcaaaatgtaataaatttttaaataaatttaaataagcactctaaactttcgttaatttattatttaaaaattaaatcaaagaaaaatacatgtaacattaccatataatcttatgataatcaaattaaaataataatcacattaattaaaattacaatgtctcatgagtttttcactatttttcatctttattattggctctagcttaaactttgtcaactttcattgtgtgtatacatatatatatgtgatatatatatatatataaaaatatcattagatatatatttatctttatctctctagttgttgttgttgagaagcttgttggcaatgaaggtgatgatcctcttcaatgatttctcttctaggagatttgtttaagggaattggaagaacttcagcagttgcaccacttagtcttgggctccattcacttgagagagtagaacaaaattgtatggactgttcttgttgttttctccttcttttcctcacttctgtcaaccattgctttataatcgctcctagttgctcttctactactttgtttttgaattctgaacccatctacgtataaaaataaactaattaaactttacatactatttattttagtaatatttatggtgaggtgtgattttttcttggataacaaattataatctaatttttctatatagcaattatattgtagttattttgtatgtgacaaaaattttcataaaatcttgaataattcatgacattaaaatgtggcttcaaaaaactaatttatttcgtcaaagtgtaaaataaatttcaaaaaataaattcgctaaggttctaaatagcaacaatttatgagcttaaaaatagattgcaatatgtcaaaaatatgaatgttttgcttcgtttctaaactgaaaaggctgaagttagcattgaaagagatcaatcaaacaaggtgtagtggcattcaaagtcgagatcatcaagattatcaagagatgatagagtgccaataagtattttagaggaatcaactttgtttgtccttaatagaacaagaaagacaaacccaaaagaagtatacaacgattcataaagttctcttgtcctttgtacatcaaaaagtaatggtaacatgggtcatggaaggggatgagaatacaatattcttccgagctaggtgaacttctaattagatctattcagtgatagatatggaacgtagatggcatgatcaactagactagagatgtttttcttcactattataagcagttgcaaggttctcaaatgggaggaaggaggaatgtggtttcaagtttgattagagcaagctcgactataacttcttctcataggcaattattgttgcaaaaatttaccaaagttgatgtgaaacaagttggttttgcaattcctgagagtaaggtgccaagccctaatggttttggtagttatttcttccaacataattgggattcagtgggaaatgaagtctgtgaagttgtaatagattttttgcatacatgaaagttattaaaggagctgaatttcacggtaatttattattgtaatgttctctataaagtagctaccaaaataatttgttctaaacttagatctatttttctagatttgatttcatggaatcaatgtgggtttttacatggaaggtatattgcttataatataatggtttttcaagatttggtgtgacattatgaaagagctaattctcaatcgatttgtatgattaacatggatcttaaaaactaacatgttacaatgaagtgtgagttcattaaagaggcattacatgcattcaattttaccctagagtttatacagattattatgatttgtattaaaataacaaggtttagcttaataattttgcatgattttttttaagggaaagatatccaatgtctcctttattgtttgttcttggcatggaatacctctcaaaaatcatgactaaagtgtgaatgaacgagggtttcaagtttcataaatggtgtagagccttgaagataaatcatcattgtttcgtagatgatgtcttctttttatgtaatggggacttcaagttggtttatttcatgttacaagggctgaaactattctcacaacttcatgttatagcctagtgaagctaatcagccttctattgtagtggaatggaccaacaagaggtttagaattcattgatgtgtttaggttgttgaaagatagcatgtcgttcatgtatttaaaaatatctatttgtgaaaaaatgattatggaatgctcagtgtgatggtctaattgagaagatggttactagaattagagtttggattctctccatctttattattctgggggagtcactctaattatttttgtgtttatttccattcactcttattgggcacaaattgtgttagtttctaagagggtcctgaaacaaataatagatgcaatttttcgctcttttctttggaaagggaccactgactttgatggttcatattatgtttcatggcatgatttgtgtagttctcagaaagaagtaacctattgcaatggaatcaagcgacacttggtttatatgtttgggaagtagctattaaacaagacacactatgggtgaaattggtgcataatgtatatattgagggtggagagtggtgggattacaaggctacttcgcagagcagtaggtattgaaggcaaatagtagaaatcaaggagagaaattcaggtaagtcattaacctccaacatatctcgatgtgcaattgacaattaaacaaggatatgaaaagcttatgcctgaacaagtagcgatgtcctggtatggtgaggtctagggtagatttatcactccaaagcataaatttattatagttgactatgctaaataggtttcagacaaaagatagaccattcatgttcaatattacaaatgatgataattgtttgacttgtgcacaaaatgtgaaaatagcaagttatttattttttgaatattaatatagcagacaatggttagaggacatttcaaagtggcttggttggaggcgacttgagtgttgaaacccaataaaaggaggaggtgcacaagatttagaagggaggtttttgctacaatagagttacagtagtgtaccatgtttggaggaaagaatgaggttttttggaatttttccaaacaaaacatggattgtattaatatatagagtgatgaagcatgatgttaagttcagattcttaagagttttaccaaagaaattgtcaaaagttgatattgtatggtttgaaagcttatgaaaggaatatatgtatagtatagtagtctgtcagatatttgtttggggtactattaggatgtacacgatgaattgatgcaatatagagtaatttgtggcattacatctataagtgcttagtttattgcaactaacctccaattttaaaattttggtgataaaatctctaaaactcgtgttttgttagtagttt

SEQ ID NO: 28039 - DNA, 3121 bp, Cannabis sativa
tttagtgataacagacaaaatacttatttattatgtatatttatttgataaaaacacgtcaaagtgccaaatcaattttctattagtcatgtaagatagagtgtatgagaagggtcacaactcagtataaaaataatttagaggaatattttacatcgataatagtttagtgacttaattctttccactatgaatcaggaaacaatatattgacttatttattcttataataatttaagtggtaccaaaactataaactaaccatgaatttaaacaatataatatgtaatatttaatataaaaaatatatattttttaatacaagaaattctcaattcttataaaaaatcattcgaaatgcgctattattttctagttaaataataaaacaaattagtttggcaataagaccattgcaatcaacttttagggcttgctatgtgaacacagaaatttcattggtcattgtccatttggccaagttatagactacataattaaagtatctagcaacaaaaaagaaaggtacaccccaagaaagaagccttcaatttcttgtttttatcagaaagttatgaattttctatctataattctcaccctaaggtgtccaatactatatgtagtgacattttataattagttagtaattttttatattatttattaaatctaaatacgtgggatacgatattcaaatacactagtattgcatatttcgtaatgtttgacaccttaaaataatactccttagcaattctcatcataaaatgatacatgttaactcaatcaacacttaacagagtgtagcacatggatactaacactattcagtatttctttttgctaaaaaataattaaataatttcagttactaatgcaacgtatgccacaaatagtgccatacaagttagaaagtctaaatatttaagataaaataagaaaagtagaagtagtttattcattttaagagcatgcaaaattaattcatgtgtagctacatgatgacactcctataaaatgatcctaagtagtgacacgtcaaaaatgttcatattatctaaaaataatctaatttattttatctccttttcaaattatttttgtgttttttgttctaataatattttttaaaaaaggctaatctagcttctctctttctctttccatggtgaagaagaagagggttctaagaaagccgatcacaagatcgtcggagctgatttcaggtgagaaacatgcagtatgaatcgaggatggtggagctccagccaaggacgaagtcatggatgtctttatggacatgaatcaaccagaagagattgacgtcgatggagatttagagaaagctctgtacgttgatgaagatgttaaggctgaaagaagcttaaattgggcagaggaagtagatcaagaagtggattttctttcaagtgctcagaatcaatggaagaaatttacagatggtaagttgttctattctgactctaagctttgttttacagaacctttggttaagaatggattgaaaatcgctaaagtagatattgaggaagcgaagattgaagaggcacactggagttcgactatgatttgtatggttcttggagccaatgttcctgcaccaatttttgagggttttattcgaagaatctagggtcatcttgacattactcaaatggctagaatgacaatggggcttacaatggtgaagtttaatgatgatgctactcgtgatcaggtgttggaactcgacatgattcagtttgacaaaaaacctattatagtgaggccttggtcatctgatcttgatacggttcgattagtcaaatttgtgttgttatggattaggctccatggacttgccctgcaatactggagaagcaagactctcagtgctcttattagcacaatagggaatcctattatggtagacaaatttaccaaagataggactcgaatccaatttgtaagagttttggtcgaaatggatatcttagaaagccctccgagatacttgtggtactttaatgaagctaggtaatttgtagatcaggctattgactatgaatggctgcctgcgaaatgcaagaattacagctcatttggttacattcaggcagattgtaggaagacagagaaaccacttgagaaaaaactaggggtgagcaagaaaaaggctgatctgaataaggaagtcaagaagaaagataatgatcaagatttagtaaaaagtggaaatcaagctactgaaggaggctcgatagttgatcctggtcttgatgcgaataagctagatcatgttgttggggaatccagtgtccaaaaatagtgaaaacgccaaagaaagttgtgtctaaacctaagagtactactggaggttatgtagaggaacaccatgccactaagaattcttttgaagctcttaaagtaaggcgggaggaggggataggagaggaaggatttattttgtccatgttgggttaatggattgttgtaatataggaagttgaaatgtgagggggttgaataataaggaaaaacaagggattgtttttgatatcttttgtttaaataaagttaggattggagccttttttgagactaaattaaaaggaaatagagttagagacatgatgaataaattcactagctggaatttttattctagtgctacaattgaaggtagaatttgggtagtttggaggaaagactttattaaggtgaacatcataaaagaaacttctcaactaatacactgccatgtcaagatggttgggcaacaaaataattgttgtattacctttgtctatggtgctaactcgattgaagaaacctttggcaggaccttcgaagcttgagttttcctactaaagcttggatggtgctaggtgacttcaatgcagtgttttttcaagatgaccgaagtggagggaacaaagtcacaattgctgagatttttgattctactaattagctcacccaagctttaatgggatcgctgaaaaggacgggatcaaattatacttgaactaacaatcaagaggggcaagctaggatctattcgagaatagatcatgtttttcataatgaagattggattgacatcttcccgcaatca

SEQ ID NO: 28040 - DNA, 1782 bp, Cannabis sativa
  modified_base (1735)..(1755): a, c, t, g, unknown or other
tgttagagctgttggttagatcagttagttagttactagtcttgacagttagtttgttatgttgagctgtcatgttagttacataactaactgattagttgttatgagctgtatcaactgattgtctcgtgttcattgtttcttgattgtataaatactcttccaatacacatttaataaagtgactctttcttctacctttggctctctcttttctctgctttctttctctgttcttacctttctttatgttcagctatggctagaaggtttaataaaacataacattctcgaataagtatattacaactttgttgtcacagtagagggtggttggttgggattgtgagatgcaaaagtctgagagaatattgtgtagccaaagtatttcacaagttgtactagctaagaagcgatattcagcttctatagacgatttcaaaatagttgattgtttctttgatttccatgaaatgagggactgaccatgaaaaatacagaatccaataatagatcgtcttgtatctggacatgtagcccaatctgcatcaacaaaagcttgaatgtggaaaatacaatttgcaggaagctgagatgaaacatcagaatggaatagaagtccttttccaagggtgtccttgaggtacttaacaatgtagtaagcagccttcagataaggttgtcgaggatcacttatgtactaacttaggcgattaactgaatatgatgtatcagctcaagtgattgtgaggaaagaagcttgccaatgagactacgatatgatgttgcatcacacaggaggtccaacatctttactaagagagaagttggcatccataggtgttgagacaactttggaactaaggagtctagtttcattgagcaattgaatggtaaaaggtctttgtaagactgaaatgtctgctttggatctggcgatgttgagcccaaggaagaaccttagtgtcccaagatcctttaattgaaacttggagttgaaaaaagttttcaaaactactacatcagagtcatttgtgcttgcaatgattatatcatcaatataaactaagagtgcaagaaaacctgtgtttgatgactttatgaataaagaatgatcatatgcagactgttgaaaactattctcaattagagttgtgcttaattttacaaactattatcgagaagcttgtttaaggtcataaaggcttttgtacaataggcaaacaaggttaggaggtaactccccctcatgtacatatcctttgggaagggtcatatagacttgttcttcgagttcaccataaaaaaagtattatcaatatccatttggtgtaaggaccaattgtgaatggcagctagtgctaaaaatagtttaagggtattacattttgcaataggtgcaaaggtctcaacatagtcaatgtcatgttgttgtgaataccttttagcaaccagacgtgccttatacctgtcatttgagttatatttgattttctacactcatttcttgtttgcggactaaggctggcatgtaaatgttgtaagttgtgagtacattatatattaatttttcatttagcacatacctcatggataatcactaatagtctatcaaaatgatttctcttttgaaattaccatgattcaaaatagagtacatgtattctggcaattgattttgtaaattttggtgccgtttggcaacacttatgttttttaattttttaatcacaannnnnnnnnnnnnnnnnnnnntttaaaaaatttatttttgaaaaacaa

SEQ ID NO: 28041 - DNA, 6738 bp, Cannabis sativa
  modified_base (31)..(44): a, c, t, g, unknown or other
taaacaagtaatgaaattaaatccatttctnnnnnnnnnnnnnnatagaaaagattacattgaaatagagttttatttagggaagaaatcccaaaaagatatggcataggaaaacccctgcggttcagcctgcagtccattatcacataacatggagcttgatatttgcccttccatgacgtagctcgatttgtggggagttctcctacgctaaaaaacttgtaaattggcgtcacctaggagtgtgaattattggcgctaccgcatttacccctaggtatcaatactatgtctttgcaggtggcccacagggactattccatgttccatgatttttgaatctatggctaacttagccaacatgccagcgaatgaattttattccctagggatttatcgtatattataattcttaaatccctgtaacagctcttgtgacattaaaacataggtaaccattcgttcgcctttcgtttgatattcctcggagatctgattcaccacgagttgtgaatcattgtaaacatccacttgttgggctcctacttccttcgttagcttcaaacctaccaacataacttcatgttcatcttcattattcgaggcacagaactcaacaaggagggcgctctggagctagtgtccctatggggagaataaacttactccaacccgtacccctttctcattagacgcgtcgttgacgtagaccgtccaagtaggtagcttagggatgggttcttttgggaggtcattgaaacacgtgcattttgtgataaaatcagcgagggcttgcctgtttatttacacatgcggctggtaaaggatgtcaaactggctaagctctatagcccattttagtaatatgccaaatgattctggcatctgcagtacctatcgcagggggtgatttgtaagtaccctaatggcgtgggcctagaagtataatcccagcttttgcaaagctataagtaagtaaaaggttagttttttaatcatagggtatctggactttgtgcccagcaatcttttactcatgtaatacgccgtatactggaccttgtcctcctctagcacaagtgcggcactaacaacatgatctgacactgctaggtacaaaaaaaaatcttccccttccataaatttcgataatataggagccttggtaagatgctcctttaacttctaaaaagtttcctcacactcttcaatccactcaaattttttgttgtcgcgaaacacattaaaaaatgggatacacttgttggtagatttggaaatcaaccgactaagggtagcaacacgtcccataacactttggacatctttatgcttcttaggagagggcatgtcgatgaaggatttgatcttttatgggttggcctctattgcttatgaactgactatgtatcccaagaacttcccagaaaagacctcgaatgtgcactttttaggattcagcttcatcctgtacttccttatgactgcgaaagcttcttctaaatctcgactgttcccctaaggcgttttagattttaccaacatgtcgtccacgtttactttcatgttttggcccaactggtacttgaaaatctggttcatcattctctagtacgttgctcctacatttttaagcaaaaatggcatcaccttgtagcaataaacacctttatcagtctggaagctggtgtgttcttcatcagcaatgtgcatcttgatttggttatatccagagtaagcatccatgaaggtaagcaacttgaacccggacatggcatctaccgcctgatcaattcgtggtaacgggaaataatcctttgggcaggccttattcagaagtcaatacacatcctccacgtaccgttgggcttcgggacaaggactggatttgtgagccagactgggtacaacaattcccaaaggaaatcgttagcttgtcgacttccaccttgactgcatcagatctgataggatccaggggccttcttttttgacggaccgccgtcgcatcctcgtggatgttcaaagcatggaaaatggtattctaatcgattcctatcatatcagaatggctttaggccaacacatcctagttttccttcacagtgttaattacgtcttctttcacgacggggggaaggtgctttcccgccctaataattttggtgggatcttcttggcagatactcacttcctcaatttcttccatggcttctaaattttgctcaagcccgacccttggatctaacccatcttcatacttttctagtgcgacctctgtgtccatcgggtcctctaacccaagcgttctgggcgctctttctctaaccatgtacacggctcttgttggaacattataacagttccttgtgcttcgctgattcccattaatggtgccaatgaaaccattatcacatggaaacttcaaacataggtgtcagatggaggacactgtacgaaagtctacttgagttggccaacccaatattgtgttatatgctgtgggacagttaaccactatgaacattgagtgttttaatgcattcgccttgttatctcccttgagggtgattggcagttggatccttcccatgggcatcagggtatcaccattaatgccttgcaactagataggacatgagttaaatcccccttagtgagtctgattgcttagaatgcaaatttaattaagatatctacagaacttccattatcaaccaagatcctagaaactcttttgttagcaatctgcgcatcaattaccaaaggatctttgtgaaggaaatgaacatttttagcgtgatcctcggtgaatgtcattagaaggttcatcttcctcaagcgttgcacagggtactgcacaagcacacacacttccccatattctacctcttttaagtatcttttctaagcaatatggtactcccggcaagatggggtctgcctgatatttttccaacgtgtttgtccactgatggcaaagccatccctagaagatatggagttcctggtcctggagcttggatggttactccagctggagctggcgaagcagaaagaaaacaaagaagttcctagagcttgaggacgtgcaaccccctgcgggggatttacagcgccctgctatccgggaagcatcacgtgtcccttgacctccctctatttgggatagatgattgggattcggacccagtgtcctaagtgtccggctcaaaatagcatctagagctcatcctttaagtattcacactcatttgtagtgtgacctttttccccgtggtactcatattgtttgctttggtcccgcctgttcctcccaccattcgacatgcgcggaggcttttagtaatggaccatattgcacattgctttgtagacattctcccaactgtctattaagctcgtgtatttattagtgtacttcagatcatagtccttccttggcttatttactaaatcattttgactacggttcttttctcctcttttccctcgtgaatgccccgcacttgaaattaggacctcagatttagactatccaagagttgcactacacccagtctatgccacatagtagagaaatgggtttgtgtggggataaggctagatgcggtgagcccatacacagtccaggagaactgggatctgagaagtgataaagcgggggcagacatctgagaggcaaaactcagagtagttgttgtaggcatcggtgccggagggactctaaaggcttgaatataggcgtcttccagattaattatgacttgagctttggagataaactcacttaaggtttcagccctcttcctttgcatcttcttccataacaaggaacctacaaccaatcctgacggggggcccatcaacttcaagtcatcgctgaccttcgtcttagctacaacctccatcattcatcgaataaaagctttcaaactctcattaggctgttgcttgacattagttagagagcctacttcgatgttcttctggcacacgacaataaattacttacgaaatgcatattgtaaatctttccaattgtcgattgatcccgaagatagccacttccaccagtctttcgcgaacttagttagagtcagggagaaacataggcaattagtgtcatcgctaacgcgagcgacttgcttcatctttttgtatatagccaagtgtgttcgcggatcaattcttcccttatacaattcgatatgcggcatgttgaagttttcaggaaggggggtttctgcgatccttttgacacaaggttccaggtcctcgtcttcagatcaaataatgctccactttgcttttcttatcaatttcttcaaggcaacaatttgatcttctagtcttttggtttcacttcttgggaggtcacatcctctcagcttgtcacgcagatgatttcgtaggtcacctccacatggccttgccctttcacttttgtatcattcatactttacgtctagccgttgtcgcaagtctgccgtagaccaactatcctcagtatcattgactgtagtccttccatcctaattaactgaatcactcagtagattcactctcctcttaggcccggagaactctgtcgctggtccttttggtgcagctcgtttcgagggtctgaggggcatccaggcccaaaggcactggtggccttctacgtcctccagggttgtctgattggaggcgcatcttcgtgatgaggctttggaacagttcttcgtgagggttctcctactttaccattgcccttgtctgtacgggggttctgggctcatgcgttagcttgcgtttaggttcgccccctcagctacttcttctaaagacggttccccatcagttccatcttgaccactgaactttttatgtagctgctccatggtcttcttcattcttgcagtgagctattgctctttctctagggcctcctgtggagctgccaactctttggttattcatagcaggctagggtcatgctcataatacagatcatatttataatatttttctttgtagtagttgttgtcgtcctcctcctcacatgtttcattatactggtcatccccatgaccatcttcaacattttcatcattcgcttctagatttccaacggtactacctttttctagattctcagtagcggctatgccttctctacctactttccatgtgcgtcaactgcacgagacgtaccttcctccatcactgcatctactggagttcttttgctggagttttgtcgcatctgtaccatgattagaaggtgacgaacactaccacgcttccttctgctctcaatggaagcactgaaatgtttaccgagtttttcaaaaactaaatattttgagagattaaaggaaatgttaagctataaataatatgaacaacaagtctttacgtggttcaagcgttaaagatccttagtccacgagtcaatattattagcctcttagggcgaataatatgagattacaatgtattacagcaggggaacttcgtatcaaaagagttatagttaggtatttttgggtaacggtagataaaattctctttcccttctcttcaaaagaactatggtatatataggcgcagatggagtgaagggcatgctctttgcctacttagggtttcgtcttccacatgttactaaggctggtactgtaggaaggacgatctgaccatccacttgtgggaaccttcttcatcgtgcggtttaacgcgactggtgaggggccttgtatgaccttggacacgtatcgtgcaaaggtctctccttgacgaaatagtctctacacatgcctttgggcaaaaagcgcattcgaaggtgcgtacgtgcactaccatggttggcacaggggacaagatttgatcctatgtcaggaaaaaggtgtaattatctttggagcgccattttccaaggagctgacgtgtcccgggcttctaaaacctacatcgttgttcagattccttaatgaaagaaaccgctccaggtagacattacctcttatcgactctcggttctaagaattatttgcccttaattttcctggatgtctcgtgtagaattcatatccctgccatgatcgtgccacgtgtctattaaaggaaaatttggataacaattagagatgctaaagttaaataaaaggggagacattgggtctgcttggcgaatgcctttttcacctttgaacgagccatggcaccttccattcattaaaagagtgtaagaagctccatgaaggcagcttaaaatgaaagaaatgaatctgacatggaagcacaaacccttcaagagatcagctatgaaaccccaatccacagtgttataagctttactaatatcaatcttaaagaaacatctggccgagatgttcttccttgtgtaacctttgagcaagtcttgaaaaatcagaatgttgtgacacaggagtctgtcctgaacaaacgcaccttggttatcatgaaccaaacttgggagaacttccgacagtctggtgcatgtcatcttcgagatgcataatagtaaaaataaaattcttaaaataaatttattctataaatataaaaataataattaaaataattaataattattaatttataaataaatactcaaaacatattaggtaacatattgattaaatatgttttttaatgaaaaaaagtaacataacaaaaggtatcttttaaaacttacatatatatagacaacactttaatattttttaa

SEQ ID NO: 28042 - DNA, 4363 bp, Cannabis sativa
gtgaagaggcaggtcctgtggattcacaggcctaccaggagtaatgagtctcataagctggaatgctcgtgggcttgggagtgatcgagcattccgaaatctctccctccttgttagaatgtataagccctccttactttttgttatggaaactaaactgtgtaagaactctgtggatcgttttaactttaagttaggctttgattttggttttgaagtcccccgagttggccttagtgggggactttttcttttctggaactcggatttggatgtaattataactaattattctgttaatcacattcactgttttatttcgtctgctgtgttttccagttttaatcttactgctttttatggtgctcctaatcctggaaatagatctcatacttgggaattattatctaggatcaggctgtcttgcatttctgttccttggtgtgtcttaggtgattttaatgatttcttaacctgtgaggataaatctagtagtaattctagtaacggcccctctcatcttttctgcacttttatgaacaaatttcatcttcaagctctgcatcctaatggccctcgtctaacttggaccaacaacagccaaggccatcgaaaaacactggaacgccttgactgggctgttgggaatagcatttggcattcccagcaccccaacagcatcttaaatcatcttgacttttttggttctgaccacagagccatccaactctccatcaatcagaaccatcattcccaattttccaggaaaaaggacaaacggtttcttttcgaaaatgtttggctttctgaaccacaatggaatgatgttctcttagaagcttggtcttcaaacacccctagcgatgaaccttccacaaatcttttgttaaagcaatccccttgttctacctttctttcaaactggaaacataaagccttctttggttttcaaaaacgaattaagcaagctcaacaagcccttgaacaggctaggaattctgaagacacttcttcagaatcctactgtcgacaaaaggctctccaagtgaaccttgattctctcctgttaaaggaagaaacttattggaggcaacgatctcggatacaatggctcaacctgggtgataagaacactcgttttttccataagtttgcttctaacaggaagcgaagtaacatgattgaatccctgacttctgaggatggaactgtctttcaagattctgaatccatcctctctcttatccagtcgtattactcaaacctgtttacttctcaacatccccaggattcggacatagaagttgggctctctgacccccttcctaggattgatcctacacattgtcagctgcttgaaaaagctttttctccctctaaggtgaaaaaagcacttttccaaatgggtcctgataaagctctaggtatagatggttttaataaccaattctattaaaaaaactggaatgttgttggcaaatatgtcactgaagctgtcctcaatgttcttaataattttactgacatcgccccattcaacaccaccctggtcactttgattcctaaggttaaaaaccagtttctttgaaggactatcgtcctattagcctctgtacaactatctacaaaatcatctcgaaagtccttgctaataggcttaaacttgtcctcagccctttgatttccccaaatcaaagcgcttttctcaaaggccgcctcatttctgataacattcttatggctcaggaaatcttgcatgccatcaaaaataaaaagcaaggaagagtaagctggatggctgtcaagcttgacatggcaaaggcatttgatcgagtggagtggacattcctacataaaattatggaaaaatttgagttccctactcggtttatcaaactgatcatggcatgcatcaccacagccactttcaaattcaaccttaatggccaagctatggggcttgtcactccttctcgggggattaggcaaggtgatcccctctccccatatctctttctcatgtgtgctgagggcctctcatccatcctcaagcgtgctgagagacaagaggaggcttttggtatcaaaattgcacgtttagccccaaagatctcccatctcctatttgtagatgacaacattttattctgcaagtcaaatattcaagcgtgcaatgccattaaagaagcccttgatcagtaccaaaaaatctctggccagcaagtcaatttccaaaaatcttctctgtttttctcctcaaacacaagcctcacctatcagacccttattcaagattatatgcagatccccacgacaaatcaactagacaaataccttaggttgcctcagtgttttagtaggtccaagagttcttctttcaactctcttaaagaccgaatctggtcgtacttgtctaaatggcaaggcaaacttctctctaagggaggaaaggaagttcttcttaaggctgtggtccaagctattccaacctatgccatgtcagttttcaaacttcctgactctttctgcaactttgtggaaaaggaaatggcaaatttttgatggggagtagcagatggtaaacacaaacttcactggaagaaatggaaatttttgtgtaactccaaaagtattggggggttaggctttcaatctctcaagccctttaatcaagcgatgcttgccaaggaagcttggagaattcaaacaaaccagtcacctcttctcaaccaactctttcaagccaagtacttccccagaacttctttcttagactcatccctgggacactcaccatcatatgtctggcacagtattcattggggcaaatcacttctcaaaacaggcctatgcaaaagaattgggaatggtgctaacaccaatatccttgatccctggatccctaaccaccgtttcattcctacccaaatcccaccttccctggctcatgtttctgatctccttcttcccaatggggattggaatatacccttattacaaacacatttccagcaggacaccgttaatgacattctgtcccttcctccccctgataactcccaacaggattcctacttctggcagcacaccccttcaggccactattctgttaaaaccggctaccatgttgcaaaatgatccatcaacttgacacaaccttcctcttcagacatggaagccctttcccggtggtggaaatccctctggagtcttccaataccccctaagattaggcattattttcaggcttgctcagaaatccattccaactgctgaaaatctttatcataggcactgtcttagctctcctatttgtcctagatgtaatctctgttatgagtcggtacaacatgctttatttgagtgcaggaatatgaagaaggcttggtcaggtacgttttttaactctgccattaaggataccaaacacttgaacatgttagatatcattttatacatgcagcttaatttctcagcaggtgcctttaactttttctttgtatgttatggaagtgttggaatgcaagaaatgcagctgttttcagaaaccaagactcaaatccagtgcgtattgaacaagaagcccaagattacttggacttttatcaagcagctcaagacaagcggatgacacagccccaagctaccacagacctaaataatttggcatgggaaccaccaccagtgggaaccctcaaactcaatgctgatgctgcagtgtctagccaccagaataaaacaggaggtggggttctagttcgtgactacactggaaaagtgattgcagcaacagctttcagtcgcatgggacagatgcaacctaaggcagcagaaggctgggttttgtgggaaggccttaaatggagccgtgacaatggaattaacattcatcatatagaagtggactgaaaaaacctactcacggatttacaatcaactgatgaatatctttcaagctatggaaccataatcaatgctattcgacggatgttatcttcgctccccactgtaactcttcaccacactcgatggcaagggaatacagcagctcataatttggcacaaatgtccatagggttagataacacatggtgttggaatagccaagacccctaccctttccctttgtaaccttttgggtctttactttcaaaaaaaaaaaattatttattgagttatgctattcctccccatccaggtggcttgaactttctcttgagccacgtgtcagccgtgtgtatcatgcaacaaaaattttataattaatattttttatttatttacacacatttaatggaatggcctaccacacatataattattttttttatctctcctatgtaatgagtccgtcttcttcttc

SEQ ID NO: 28043 - DNA, 3200 bp, Cannabis sativa
actaactaactgatttaaccacctacatctccaatatcccccctcaaatgacactgggtaagaccaagtgttaatttgtctcgaaaaaatagaaagggagatgctgccagaggctttgtgaagagatcagcgagttggtgttgcgagtctacatatcgaacatcaagttcttgagctaggactttgtctcgcacgaagtgaatgtctatttcgatatgttttgtgcgggcatgaaacactggattggaggctaaggaccctgctcctaagttatcacaccacagaatgggacaatttggaactggaattttaatttctgagagcagggactgtatccatatgagttcagttgtggccaaagcaagtgcacgatactcagactcggtacttgaccttgctacaacactttgtttatttgaacaccagctgacaagattacctccaagaaaaatgcagtaccctgaagtggattttctgtcatcgtaacagccggcccaatcggcatcagtaaacccttgtaagtcaagttgtgtagcagctttgaaggttaaacctctgtccaatgtgcctgcaagatatcggaggatgcgtttgcaagcgctccaatgttcagaggttggggattgcataaattgactgagcttattcacagggaatgcaatatcaggtctagacatggtgagatattgcaatgcccctatcacacttctatatgtagttgggttttgcattggggtgccgactgtagcagacaatttagtggtagaacacataggcgtggtttggggctttgaatccagtaactgagtgttggtgagaagatctcttgtatatttttgctgagtcaaggtaatagaatcctgggatcgatgaacttcaaaacccaaaaagtagctcacagacccgagctttttaagagcaaaactgtcatgtaactgggtgattacttgctggatgtgtgtgatgttttctcctgtgatgagaatatcatcaacatacacaaggaggagtaaaagttggccactttttctggtgtagaacaaactggtgtccgatttactgttgtgaaaaccccactgcagtagagatgttttgagcttatcaaaccaagcgcgaggagcttgtctaaggccatagatagccttgttcaatttgcaaacatgatttgggtagtccggatcaatgaaaccttgtggttgatacatatagacatcttctttaagttcaccattcaagaaagcattattgatgtctacttgctgaatatcccagccaaatgttgctgcaagagtaaaaataactcgaatagtacaaggtttaatcacaggactgtaagtttcaaagaaatcaataccagggagttgttgaaagccttttgcaacaagacgggctttgtgtcgatcaacagacccatccttgttgaatttaacccgatatacccatttgttgtggacaattgtcatgtctgaagtaggaggcacaagaacccaagttttctttcttttcaaagctgtaacttctgtagacattgctgcattccaaatgggactagctaaggcagcctttagggactttggttcagtctcaatattagtacttgcaagatatgactttggtttaaatattacatgtttagatcgagtaaccatagggtgaatatttgtgggaattgtggtagtggggttactgtcagcaccagatataataggaggagaggttggtgtgttgttaaatgaagaattattgatggctgagttgacatcagggagtatggacacagaagtgggagtgggaggatcttgattatgttggcagacatgatcttggctgttggtacttggtggaacataagtactgtaagggaaagtataggctgcagaatcaatgactacaggcagtgaggaggatgcagattgtgatgtgggaaatagatgagggtagggaaattcttgctcattgaaggtgacacttcgagcaacatatatcctaccacttggatgaaggcgacgataccctttggaagaaatgctatagcctataaacaagcacttggatgacctaaaagacaccttgtgattttcatatggccgtagcaagggaaaacaggaacagccaaacactttaagcatattgtaatctggtttggagtgaaacaacttttcatagggagagagcaggttatttgtgggtgtaggaagcctatttatgagataggcagcagaggtaaaggcttcccaccaaaaggataagggcatgtgggcttgggcaagaagagtaagacccatgtcaaccacatgcctatctttcctttcaactctcccttgtcgttggtgagtgtggggacaagagtttctttttaaaattcccatattgttaagtgtttggtataaaggttcatattccttgccaagatcaagttggatgctttttattttggcttgaaaatgtctttcaacaaaggcattaaactgtaaaaacagattggtggtttcagatttggttttcatgggaaaaatccaaacaaacttggtaaaatcatcaacaaagcttaagtaatatttgtagccttcactagaactataaaaggagggaccccacacatcagagaaaacaagttcgaaaggcatagtagtattattcatagaaggcttaaaggaaaagtgatgtaatttgcctaattggcaggcatcacaaaagggaatttgtttacatttctggtttggaacaacaatagacaagactttattgagcacaacttgagatgggtgaccaagtcttgaatgccaagtggaagcaatctgagattggtcacggacagggttgcttgtggtagtgaagttgtaagcctggggattggactgagatgaattgttactggatggtggtgagtctttatgcttgagagatgatacttcaagtttgtataggccttcactgagatggccctgaagaaggaccttcttggaagtcttgtccttaataagacaaacacaaaatcaatcaaaatttcaaagaatgacattattgtcttttgtgaattgagatatgctaattaaattttttgtaacagatgggacatggagaatatcttgcaagactaagtttttagagggaaatgttgttgagactaaactatgacctatatgatgaattggtaaagttgagccattacctacaacaaccttagcttttcccttgta

SEQ ID NO: 28044 - DNA, 1933 bp, Cannabis sativa
aaggtatttttaccgccaaaaatatgacttaggtatttatctgctactcagtataaaatttaggtatttataccgcaaattactctaaaaataataatgagcctacaagtcatgtcagaactatcatataaatttgttgccatggtacaacataattcatattttttttttggaaaatttaacacagctatatgccattatgtctttaattaaaaaacgactcacaaaagatattatgacccaatgataatttttttttgtcaatataccaaattttaataatttgtaactgacattatattaaattaattactgtatttgaatataggattattaaatttaaaagaatacatataaatatatactatgaagtatttatctatgtatatataatatatgttcgagtatataagattcttttttttttattattagcatatattagagactgattttttttttgttcaaccaaaaacttcaaaataagtatgcgcgtacaatatattatcataatattacacatatatataaatcctaatcaatgaaataaaagtgatattaagtagtatataaagattttaattatgttacaatttatacaaattaggatcatttatgtattaaatagtatataaataaaatttacactaattattttaataaaaataatatataaatttgattaaaagaaatatatatagatatatatatgtaaatgtagtatatatattactaaataatatataaataaaatttaatgtatactaagcaatatttaccaaaaaatattcacttttttatatataaatatatcaattttattttcttagtaaaaatatttatttttatataaagtgaatattatttagtagcatatattaaatttatatataaataatactaagtggtacataaatataatttacactaattactttaattttaaatgataaatgtaatacttactattatatcttttcacatattatatataaaaaattatatgattattttaattgaagaatctagggtaacgttatcttaagttacaaattgctaaccccaaagatcagcatccttaagttttgagattattcgcctaagggaagaaagacccgcgatagtgcaccaagtcagcatattttcccgaggcctactcctcaaaaacagtactctgagtgttggggtgcgttcgcatcgtcacgagaattacctcggggagtcccgcgaagatagcgcaggagtggtgagtgggggggctcgcaagtgagccatgtgtgcaaagggagaacgggcgtgtgtgcgagtggggggctcgcacgcgagtcgtgtgtgcgagggggggacgggcgagtgtgtgtagggggagccaagtgtggagttgtgaaaggagggcgccaagtgtgaagttgtgagaagaggaagccaagtgggaggttgtgggagaagggagtcaagtatgagattgcatgggtgaagttggatgggaactccggggacacgatgtgcagaggaaggcatactcccacgccttctgaaacctttgaatgcaagggagtacaagtagcggtgataatggacctgcatggtctgagggcccgaccaaaggtacaccatggccactcacctaaggcgtgcaggtggggacccctaaacttgtaatcgggagacctcgcacctgcagctcaaaaccacacgtttgcagctagggaccacgcacctgcaactcggaacgacacacctgcaactcgagatcactctcctgtaactggggaccactaacttgcaacccaggaccataggcctgcaatcagggatcacctgacacccgacaagagtacgaggtgcaaggctactaccagcacctacaaccctctgcttgagagcggtgtgttggtaccttttgaccatgttgttgttggaaatattttac

SEQ ID NO: 28045 - DNA, 2254 bp, Cannabis sativa
gattacagagactttgccgataagtctaattcaagaattgttatcaagaattgtctcttttgatacttattatttcttggtgttagttatttttcaggtagtattacaagccaaaatttgtgctcttttgctatcaaacaaatgaatgatattttttagtgagttgcaagtattgtttgaggttgctatagctttattgtttatattttttagaataattttgtcccatgtgacttgtgatattctgcagctatatagctcataatttagcaaaacatgccttcagttaaatgataaactatcctgattcgatcgaggaggtgtcgccaccaattataaattacttatgtgttgtgattttgatcaccacgtttaaaaaaataataatcccaacttgtgataatatttacccactaaacattcatttccttattgtttcaataatattataattatttaattccttcttcatcatcattttgcgttttgggacacggcggtgtttaataaaaaccaaaacaatagaattaaatagatcggtcaattctaaatcgatggctggatttgaaaacctaaccccaaaagtgaattcttagtattgaaaaaatttaccgtgtgctaattattgtatattttacttaaaacaatagtgcccttctcattattattggtggcatgcactaaaaaaatacttctctatgtatttgttagagaagtgctaattataacttcttattataatttttttagtcaaattttactttcgaaatcatatgccgaatattttttcatagcaatattcgttatagttacaatatcatccctgtaaatttttgaaaaattccaaatagtttacaatgccgaaagagttcctgatattccaatttaccacgcgtgttcaaaaaacttcaaacgtactttcagcactgtaaactattcgaaatttttcaaaaatttacaggaatgatattgtaagcgtaacgaacaccgccgtgaaaaaaaatttgaaaaaattatttctacatgtattttgagtgtaaaggttgactaaaatttataataagaggttgacgatagcactcatctttcgtcttattaatattagttacaatctaataatgttttatacaatatattgagtttttgtgaacttaagttacaaaattgtttagcttgctagtttttatttttataataatcaagtttattgttgaaattcatataatatattggttattaatattatacatgtattgtattaccattattcacattatatgttgaagatatacactcgtaaaaaagcaagaaactaataaatctaaaaataatcccattagaaaacaccctaaaaaaagaataaacaaaattgacaacaacttcaacatcagagcatatcagcgtctcttatatattttttaaaataccttatcaaaactcaattttatttattttagctcacacttttacataaacttttgatctatattttcttttataacattataatattataatttttattaattaaaataagaaaaaaatgtaagaaatagaaaataataaacaaataattagtgttgagataaaaattaaaaatgaaaaaaaaaattgaaaaaaaaaagatatttaaagaagctcaaagtatgaatagtgtttgagctaaaatgaggaaggatttagctcacttgatgtatcactatttcatcatttttttagcaaaaaaattaaagatgaattattttagctacactaatacgagtgctctcatctctacaaaggaagcaaaaaaattcagcgcattgaacaactctgggcatgcatgaggagaatcttagcagttgaaggtgagaattgactccctcgaagaaagaaaatattttaactgcaaataaacaaaatatacattagtagaataaaaaaaagaaaataataatcataaaataaacattgttacaaattttgtaatatattttcactacaaataaacattattgataaatagtaacaatagttgttctatatggaaaatgagaaaacttttttgtcaaatacaaacattacttcaaataattaataacttgaataactcaataactttaccactctaataaccaataactaataactttgataataataataagattaattatgatttttgtcccctgaattttgacatttaccaaatcatgccccctgaacttttaaggtcgctaaaaatactctatgaacgattgagattgttggattt

SEQ ID NO: 28046 - DNA, 1641 bp, Cannabis sativa
  modified_base (31)..(58): a, c, t, g, unknown or other
  modified_base (1603)..(1615): a, c, t, g, unknown or other
aataaaaagtcactcatgaatttctcataannnnnnnnnnnnnnnnnnnnnnnnnnnnttatatagaatagatatactagttgtgcagtacgagcacctaacacccgtcaaaacttgtgggttatgattatatcttttatttttattaatatatttaaaaaaaattaaaagatatatgtatttaaacaagcacatagtgtggtataggttcgtttattgaagttaaggtcatcagttgtcatctctaaatataagcgcatataaaatttatgaaaaaaattaatattatatgtatgcttatatagtcttttacataattatatatttactaataaataaataagaaataaaataaaataaaaaaaaaaagtaaaattcattaaaaacaacatggcaaaaaaattgtaaaaaatagtacaaaagatttattttaaaaaagcaaatagaataaaaaataagattttttaagaaaaaaaaaagaaatatgagagattaaaaaatcaatctcataatttttaatttttaattcaagagattcagtttgatgagataattgtttattaggtttcgacaatgttctaatcttttttttcaatggtattattcaaacatatcaacatttctttcacctgtgaattacaaaacaaactagaagaaattgatattagagcaacattattcgaattttcatcatcactctatgtgacattgaaacttttactcttttacaaagtatttgcacattcaaattgaatatgtccaaaagtcaaaaccttcacatttccttcattgaatcccttttttattagttacataagattttgaaaaagtattacctttggagaattttgaaaaattctatttgtcacttatctttttcatgtttttctaaaagtttctagttaaaacaactatctcatcatcttcttcatatctgaactttttttttttcattaacattaaaagcaatacttttacctttatcaattgtaggcttggattcgttattttgcttaattttttgatttagttcaaaagtacgcaaggacccccatcaactcaccccctttcttcttgctaaattttttgcttcttttatagccaatagcttagcgtcgaatcaattaggaagaactttgacaaattttttgactatcacttattcatcaagtttttctcccaaggtaaaaaattcattagtaatatcagataatctttcataaaatttagacaaaaatttattatcagacattctaagatcaacaaacctagtttgaaccattataaatctagatcgcttaacaccaattgtttcttcaaattgggtttgaagaattttctaagcatctttaacagttcataagaagatataagcttaataaaaccttcaccaactccattaaatatagcatataaagcattactattgtaagcatataacttatcatcttcagtagaccattaaagtccaggttttaacttagaattatcttcgaaatctaccacaacaggatgagaccatcttgaaagaattattctctatgctttcccatcttgagacttgataaatgcccttattctatgttggaaatattttaccagnnnnnnnnnnnnntaccatgtatgtttcattaacatcct

SEQ ID NO: 28047 - DNA, 1345 bp, Cannabis sativa
aactaatactctaccattgttattcactataaagttttgtattatttttttttaacatatacttactataattagttaccataaaaaattattactcaattagatgacatgacatcctatgataactattgtaaacgatccccaatccctatatatttatatatagagtaaatattattttggaccatgtattttgtaaaagttactaattggactctctattttattaaatgacaaagtgagtcctgtattttctaaatgtacaaatagctaggaccttgaacttattttttatcaaaatagaacttaatattaaactgatctagagatattgtgacaaaattggttatattttttgtatctgttcgtgttagaaattatcttaaaattggttatattaaaaaaataaaattgttaaaaattgagctcaggatcctatttttaccattttagaaaatataaggtccattttatcatttaacaaaacagatggtcaaattggtaacttttacaaaacacaaggtttaaaatagcatttatacccttctatagactagggaattaatgccgaaaattccacaaaattagcaatatgactaatcataatcttcactataatttctgatatcattcaaaatattcactattattatggtaataatatcattgaccaaatttgcatttattagcaactatcaatggacttaagatatcaatttctttttttttttttttaaaaaaaaaaaaagaaattgcaacttcattaaaatttagtattcagagtacaaaataccttgaagattaggcggtaaattctaaacatgaatgctacaactagataaaaatcgagagtgcctagccacatagtgggcaacttgactaactgatcgtttaagatatcaatttctcattcacacattagcctaaaattagctatttattataaattaaatataattttctaatagtcagatagctaaatagattatcgtaatgtaaatatatttgtgacatgcgaccacattaaaaagttagtagaaagtaacagatgtaacactaaattgcaatattttcttatcgaaatttgttttgcaataaaacaaaaattcaggcaatagaacaaaaatttagaggaccaaattttacaaagtgcaatagtattggggacaaattcttatttatcctataaaatatatatatagtgtctattgtcaacatataattaaaacatcaatagttcataaatttaagactaattagtaatttttttccttgaaattttttgattgttaaaaattctctctgaactattgagattgttaaatttaaggacttttatctaatt

SEQ ID NO: 28048 - DNA, 1877 bp, Cannabis sativa
  modified_base (415)..(446): a, c, t, g, unknown or other
ttttttcaataatgcttattggatgcatctattcaaatttgatcagtaaagctcatgatcgaaatttcttgaacttatgaattataaattcaaattttaattatttaactatataaatgactcaaagttttatatttgtaagtggcataaatttaatgtttatttttagcggtataagtattcaatgtttgtaaaactgtaatttttctctaatttcgtcggtagagattttattattgtctatacagagcacgtataatgtccaaagactccaaactctaaattattgggtttaaacaaaaacatgttcttttaataaattacttctaaatgttcttctaataaattcaaaatagagtctgtgctgacaaaacagaaagaaaattacagttttacaaatattggatacttatgnnnnnnnnnnnnnnnnnnnnnnnnnnnnnnnntacaaacttaaaactttaggtacttatgcagttatttaacttatgactgaaaaaaattggttatatgatgaaattttattgatcaaatttgagtttagggtactttgtatgtgataaaacacaatgtcttaaaggagtatattctctatattttaaattctactgttgtaggttgaactgattgagcctgctgtgaatggcacactaaatgtgctcaaagcttgtgttgaagcgaaaattgaacgagtgatttacgtgtcttcaagtgctgctgtggccttgaatcccaactggcccaaagatcaagtcatggatgaaacatgctggtctgataaggattactgcaaaagaactgaggtagtttatccaagtacagatcattctgtctttaattacactatgattttgtaaaactgactatgcccctattcctgtgtgtaccagaactggtattgtttatctaaaacactagcagaaagtgaggcttgggagttttcgaagaaaactgggcttgacgttgtggctatctgtccgacacttgtttttggaccgattctacagtccaatgtgaattcaagcaccttggttctccttaaacttttgaaaggtttgtaactgtattacttaattttctatcataggcatgttggacaaaatatcatagataaaacaatgcaaaataccaaggaaatgaaagaaaatcgaaatactaagggacaaaactacctttaggcttgaatctttacaaatgaatacacagctagaactcttttacactctcaattttcataaaaaaaagattaaacctttacaaatgaatgaagagaggtgtttataactctcaaacatgaaatacaaaatcgaaagataactaactgtatcatcagcagagataagcttaactgattccatccaatctgtttgagtttgttactgttctaacattttctttgtaagaattttctatgaacaacacaaaatgtgtatgcagaagggtacgattccatcgaaaacagactgcgagttatagtagatgtacgcgatgtagctgatgcaattcttatggggtacgagaagcctgaggctgaaggaagatacatatgtacatctcacttaatcaaggcaaaggatttggtggacaagctgaagagtttatatcctaactacaattatcccaagaagtaagttcttattttacatccttagatgacaaaatgctttgaatttttggagaccattgtctttgtgaggtgaattactaatatagagtgtctgtatgtgagttgcaggtttactgaagttgagaatgacttgaaattgagctctgaaaagctgcagaagcttggttggagttctcgaccactaaatgagactctaaccgattctattgaaagctaccgcgcagctggactattggattgaaaaaagact

SEQ ID NO: 28049 - DNA, 1928 bp, Cannabis sativa
agttcctggtaaaataacttccaacagtatccacattgtttctcatctggttgttatggacatatcagagttatccactctatgagacaaatattgcatcaatttgtcattttattatacatgttgatcaacctactcaaaatgtaaagttagcatataaatatcaaacacacttatatattatgatgttagttatagaacctgtgtggtaatgatgaatttcaaatcttttggtacttcgtcattgttggaatatccaagtacgccactatttgcgtacttgattggatgagtacaagcatcaatgaagtatttttctacacaaacaaacatgtgtaaaattattaatacatattaatatatattatgtagagttataaattattaattttaaatttacttactgattgttgtaggaggcaacaacccatttagttggatcggtcttcgccatatgttcaaccagtgctttacaacgggtactttcattctcagcctcagtggcaatgacaccaagatttagaaatacatattttctgtttaatccattagtcttgcaactgttccttcaagtatctgataaaaacacataataaataacaagctctcaaaacaaattatcaagtttattaagagttgaatatcatccttgcactaaattgttataggttgggctcctataaattctaggctgcacaattccttgatgccagtccttggaagccaaactgagtcatttttagccccaaagatattcaatctcatctaacatgcatattccacccatccggccgcaatacaattaatcgcagaacctacttcactatggatgaatatctaaaatattcaaactccactaaataaagaattttaaagttttagtgattataactttctccaaaaaagttagcttcttttttgctctacaatcaacacccaaaacccgataattaaaaaataaatttaaattatgcatcaattgttaattgagactaatcgatttccacaaattctataacatattacataaatttatccaatcaaataataatataccaagaatgaagagatcgcccggagaaccaccagtaaaataaaaggactttattggaccactaaaaaaatcaattaactcctaaaatattaaacattaacaatttaaaataaacaataataatagaacttttctaacacattacatatttataataaataaacatatacaaaaaaaattataaattataacacatatactaaactatttttttacatataacagtaatacattaaattaaattaaatcacataatataatttacctaaactaaatttacacaattaattaatttttacaataacaaattaaataaataaactttttacctaaacctaaaaaaatacacataccaaaaactaattataaaatacacatatcaggtaaacattaagaattgaaattaaaattaacttagatagatcaaaattttgatattacctaaactttactaagcttataataaactatactaaactttttttaaaaaaaaactactaaacttacacattactaatttttttcctaaactactaattacacattacaaattttttttcttaactaattacacattactaaacttccactaaaaaaacaaaaatatacatgcatgatattttcacaaacatattcacaaatatataaaattaaatctaaaaaataaatatacaaaattataaattaaaatatattaatgaataaatatttaaatttttatattgaaacaaaatgtataaataatatatataacataagaaaaaggaggaggaggcggtggctccatggtggtccagcgttgtggaggcagtggtgggtgcgtccctaaaaaggtggaggaggaaatggcgagtgcaagagagagagagagaga

SEQ ID NO: 28050 - DNA, 1664 bp, Cannabis sativa
agttagggtgttacacttaccttggacttccgtgtacaatggggagaaacaagaaagccattttgggattccttagagataaaatgcaaaagcgaattcagagttgggagggtagacttctgtccaaagccagtcgagaagtacttctcaaaacagttgctcaggctctacctagctatgccatgtcagttttcttgctgcctttagacacttgctctgccttggaaagcatgatgtctaaatattggtggaataccaattctcaagattcccgtggtatcacctggatgagttggaagaggcttacgaaaagtaaaaatgatggaggtatggaatttcgtagtcttcatgattataatctctcattactcggcaaacaaggatggcgccttcttcttcatgaaactactctcgtgggacgtgtgtttaaagcgaggtattatcctcaaggaagcttccttacttcttcacttggaagcaacccaagcttcatttggaagagcatctttgagtctcaagatattgttaaatctggcgctagaatccgtattggtgcgggtcttgatactaatgttctcaactctccttggctcccatcagatacatctcccattgttacatcagaccatccttctttgcactcatgcaaagtctaccagcttatgaagaccgatgttaaagagtgggactctgaagtgctgcttgatcttttcagccttacagaagcacaaatcattctacagatccctcttagtagcaattcttttgaagatgtatggtattggaataaagaaccaactgggttctactcagtgaagagtgcttatatgcacctgcaagtaatgaagggtaatttgtcaatggataataactcggctctttggaagaatttttggaagattaaagtccctcctaaagttctacactttgcttggcgtgtcttaactgattgtttggcaacccgtgtacagcttcaaatcaagcgggtaccagtccaaagtcactgcttattttgcaactctgcagctgagacttcccttcacttgttcattgattgtcccttctcaaaatcttgttggaacatatcagctgtgactattccccctacgactgctaccagctttcttgactggtttcatgcagtttgggatcgacataagggagatgcaattgaagaagttttaatggtaagttggtctatttggaaagcccgcaacaacattgtttggaacaataaaattaccacggctgctgaagttgttactacggcacatcaagttcttggtcaatggaaacatgctcaaagttgtcgctttgagccgctgcatctcagctctaacattagtagcagcagcgattattggacaaaacctatagaaggaacgaccaagattaatgtcgatggtgcaacgtttgaagccaacaattcctacgggactggttttattgctcgggacccaaatggaactgtcatttttgcaacttcttcgcactcgacgggactttcaagtgcaccctttgctaaaatgataagtatcaaggaagccttaagttggataaaggtatcaaacttgtcggagtgtatcaccattgagacagattgtctcacggctgtccaagctttgaactgtcagcttgatatgccttctctgtttggcgctatc

SEQ ID NO: 28051 - DNA, 2735 bp, Cannabis sativa
  modified_base (1319)..(1324): a, c, t, g, unknown or other
tatttaggctttcatctctacctttaaccttcaaagttcaacgtatatcttatactcaaccagaaaaagtaaacgaaacagaggccggagaaaacctccattaacgccgatttcggagctgcgccggtcaatccacccgcccccaaaatcatcgtctatcctgaagaaaaaagaagaaaacgaaatagagctccgttgcaatcatgccgaagttgtcggagcttagctctccgatctgtccccaaatcattgcaatgtgagtttcaatcactcaaatctctcctgtcaaatccaacggcagtctgcaaatcaccgttaattctatcaacaccaccccaaatctcataaatcagcaagtcgtcgaagccaaagtgccgataccgtcgaagccgccgtaggaccgaatcgcagagctaagtgcaaaggaagaagaagaataaaaaccagaagtgaaatagataaactgaggaagaagacgtaaaagtgaatattaaaagataaaataaaaatattaatgaaaattcaaaattatataagtgaaatttttttaaactaaacgtaaaaacggaaaaaactttgaaaaaggagtacaacgggtaatttccctaaataatatctaccaattatataaatagaaataaataataacaaacttttagaaaatgcatgaaaaatacacgcatgataaagtaaatttaagaaaataaataataagtaaaacttatctcatgaaaatctttaaatttttgaataatcactacatttaattaacacactaaattaataataatattaaattaaaatatgagttttaattttaaattaaaaaattaatgaagaaaaacttatctttgataacatctttcttggccaaagttacatttacctcacaccactattaggataattgttaaaaagacttaaactagcagatggtactaaacaaacaaggcacaccaagtacaaaaataaattaccaaacacagcacaactcaagccacaatccacaacgggtataaacaaagtatcataactataaactaccaaataaaatataaattaacaataattataagaaatattattggtaaaaagtaattataaaaataatattaaaaagtaataaattaatatttatcaatgtaaattctttgtatacaaaaagtctcactatttggagaataaagcccaattgaaaggtctgagacgacccataaagcacttgattataattaaccttataagcctacttgggtattgaacatttatctataagaactgaattttaggcaatgtctgattgttgaaactccgaaaannnnnntaaactgataaatttttacttatatagaatcattcatatatgtgtggattttttttttttttttatatggacatatttggttcatttataacacttaaacaaatataagttaaaacaactaaattttggactttcccacatcaatatcaatttaggataaatatggtgtcattttttaatggttttgatatttttatgtcgtttgtttgtgctattttttatagtttgccattaattatttatgataaatttatagtatgtttaatgagtaagagaaatatttcattttgtactcatgacttcaacaaataacattttagatttgacagataagtatttcaaatcttgatattataatatagatttatttattttttcatcaaattatgtgggtaatagaactttatattttgttattctataggtcggttttgtgaatggcctactagtacagagactttgtcgataagtttgttttacacataattcgtttgagagttgttatcttctaactattgataatttcttttattagtgttattcattttgtaatgagttggtgtatagtttttcaatggtataagttgaagctctaactcttttggtgtgttgtttgaggacattatagctttattgtttaaattttgggagacagtttatctcatatttctcacttattttagcagtctatagtttaacaaagcatacatttcaattaatcgatgagctatgaagatttttacactatttacagatatttacatcataaatttataaagtattctattcactaaaaaaaactaagtaaacccatttgactatatactagttaaaatgttatatcaacttatatctaatataagtataaatagtatcaatatataaaaggtaacaagatataatatccaaactataaattcaaaataattaataatatgatttttaaaaataaaaaataacaataataattatgaacgtaaattgaaactaccatataaaaaaacatataaaaatactaaaaaattacataaaagtaacaaaaaaatataaaaaataatatgcaataataaaaaatcaacaacaaaataacaagagtacaacataaaaatacaccaaaaaactatattttatgtaaataaaatctaaaaagccgtaaaaatattgataattaaactgtatttctgtaattttttttttatttttttatgtttttttaaattatccctaaaatatattgatatgatcatattaattataaaatataaattataattaatactaaccgaaaaaaggtaaatactattttggagcatgtattttgcaaaagttattagttggaccatctgttttgttaaatgactaaatagaccttatattttccaaaatgctaaaaataggacactgagcttaa

SEQ ID NO: 28052 - DNA, 1918 bp, Cannabis sativa
aaaaaaagctctaaacaattatcaatcaaaattggatgaacttatcaatgatgatcttgttattgtcatttatttatttgtataaaaagaaccaagaagagtaagagaagttgtaatgtatgaataacaaaaaataataattcttaattaaattatagaaaagtaataactattttataacaaaacaattattctttattatataatgcagttacttttaaaaggctcaaaagatttaattatgatgataatcaaaattggattaccatttattgatttatttatttttataaaaagaaccaagatgagtaagagaagttgtaatttatgaatcaaaaataaaaaaaaaattctgaattattcattaatttatatatttttcttctttgactaatagaaaagtcataactaacaaaaataactaaaaccattattttataatgctcaaaagattattgcagaccatgattagaaaaaaaaaataaactctaaacacccagaaaagagaaaagtgtaagtttcaaaaaaaaaaaaaacttaataattagcaaaagtagaaagaaagaaaaaatacaattatgcaaaaaagtaacacctttatttagggttactttattttttacctaattaaaataattctctaccaaacaaaaataatttataaaaaataaaaattatataaaccaacaaacctgaaagatacgcctgatgtttgtaaaggaaaaaactgatctgaaacgactaagcaacgccatgaaaacgaacaaaagagcaaaactttgatgtttgtaattaaaaatggcaaatttatataaaactgataaaagggtttcttagtaaagctaataaaagttagggaaggaaggaaaataatgaacttgagaatttttgaaaatgattactttctcgagaaaatgtttgaaactttctcgagaaaaataattgggaaaatgaaaggggggaccccaccaacccaaccaaccaaccgatgcaaagacgtaagagatgttgttaatggggtttgggtttgccgagtaatgatgaatttatacgacggttgagagaagaattttattcttaatttgaagaaaattaagcggtttgggagagaggagcggttgagatttttgctgtattaactatataaaccttttttctatttacaatcaaatgagactctttgggaatgacacctgtcccaattatatgactattctcttttttcttagaaaaatattaaaaggcaccactggtgacaagcatcatcttacgtgttaatatcgttattagtctaatttagtatcgggttttatatagtttaatataatagcttttagggtactaggcaccactggtgccgaatagcaaaactaatcaacattgctattgcatacttaatagtaatgcttttttattttatttactattgtttattttaaaaaaataataaaaaaagttgaataaatttttgggtgtttttataagacactcttgtaaaagagatgcattaataaatcattcacttgatttgacatcgagaagaagtttttaattaattttttttttcatattcgcgaacgttatagttatttaaaatattttacaacctattcatagtaattggtctataatagataatgtttctagttggaaaaggttgtggaaattgggggttcctcctaaggttttgcattttctatggtgtgccgtttcaggttgtttgccaactaaagtgcaattacaaactaagcatgttaatgtggatcttcagtgtcaattctgccttaccttttatgaaaccatatcacatgtgcttatggaatgtcaatttgcaaaggcatgttggaatttggccagcccgactgtgatttctggggtccataatgattttagttgctagttttttaatattttggac

SEQ ID NO: 28053 - DNA, 4823 bp, Cannabis sativa
  modified_base (1361)..(1363): a, c, t, g, unknown or other
  modified_base (3980)..(3981): a, c, t, g, unknown or other
ttttttttatattttttttaatatatttttgagggcccaaaatttatttcgtcttgggccaatatattttcagggccggccctgtgtatgtgtaccttcacatattttatataattaatatatatattttttaatataataaaactgcatgctttcataattaataataacactactaaaattaccatgccatgcatccaaatatatatactataattaaactttcagatttttaatcctcgtacgtacaacgtagttaatactgatagtaattggcttggagtttaccaggttagtatttttttttttttgataaatttgcaccacaatataattattctctttccaagcagttaaaatcaataggaggggaccaaatatatttgtgtcaattgtgaaggtaaacgtataattatatatatatatacacgtacagtacaatactatagtatataagtaagtacatatactgatatttttcaatattgggagatttttaggtatgggcattatataactacaatttttctatttatatcttaaatatcatatgtttattatatattgataataaaatttaaaataattatattgcatgcacacgcgtattaattaaaaaatacacatagtgtaaattaattatttaactcttattttccgtaatataaattattttaccaacaagtaaaaaagtacgtggtctataaaaatcacccaaacttttttataaaatatatgtatatattacccaaacagagccacataatactaatatattacgttaccttattatgtcattataacttggttactttactcattgttatatatatgaaaaagtattaatatatatatatttatataattcacaactcattgttataacatcccaaaaagaaaaacatatttcaaaaatgaagaccacagaaatgttagtgaaccctactcatcactcaaactcatctcaaatcctctaccgacggccgccgctgcgaaaaacttttgttcacggcctagatggcgcaacgtcgtcgtttcgaatactctcactaccaaaacgacacaaaaataatcgtcgtataacatgccctacttctaccataagagcgattagtagctcaccgagtattactgataattttcaagaagaagaagaaaaaagagaatcagagattgaagaagaaactatcgccgttaaggcggtggttaccgtacaaccaacggtcaccggtttcatcaaaagccttgggttagaccgtggtcttgatgatatacaagatttgcttggtaaaacgttcctcttggagcttgttagtgcagaccttgatcctagtaagtatattaatatatatatatatatnnntttatataaatataaatatataaatagttatttgttataataaattggtatagtagttggtgtggaaagtagaccctttagggtttattttatactttgctttatgtatttaaattttctactaattaagtcaactttctatttcaacttctaaacctaaaaatttatatcgaattattttttttattattaactttatgacagtgttcgtgataattttaacataattaattcctgtaattttttttttatttttttgtaaaaaaatttatagtaatacagagagtttctaatattccgatcccttaaaaaagttcatttcgccagctatatgtcgtatttgtttttgtattgagaaaaatttattaatttaatttttttttatgatcccgtatgttgtaattttttagggctatctgtaaatttttagaaaattctgaataatttatagtgctaaaataaaaattcaaacaatacttatttaccacgttaaaaaagtatatgtgttcaacaaaatatttgaactttaattttaacactctaaattatttgaaaatttataattagttttaagtaattaaactaattttttttaactaaaaatagaaataaatatataaaaagatggaactaatctttaaaaagagtgtactataaaataataataaaaaaaaaaagtactcctattcacactttgtttaacacgtgtaggtgtaccatatatgaagtttgatatgagttatttgagaaatgttaaagggtatttatatggtgtttaacactcttatgtagtttattggtataatttaatataaagtcatacttattttattttgataattattataaaaaatcgttaaccacttatatatcgattaatttgggtgtatagagacgggagaagagaaggagacagttgaaggatatgcacataaaattggaaaaaaagaagatggaataaaatatgaggcaagctttaaagttcccattaaatttgggcatattggagctattttagtagagaatgaacaccataaagagatgtatgtatcggacatagtccttgatggcttatccaatggtcccttaaatatcatatgtggttcttgggttcattccaagtttgacaatcctgaaaagagaatattctttacctccaaggtctgttatatattctctttaattaattactcattaactaatgatatttatgtgtaattaattaattaattataacgtatacagtcatatttgccgtctcaaaccccaagcgggttgagaagactgagagacgaagagcttgttaagttgagaggtaacggagaaggagaacgaaaacatattgatagaatatatgattatgatgtctacaatgatattggtgaccctgatcgaaagtttaagctcagtagaccggtgctcggtggtgaagaacgcccttatccccgtcgatgtaggactggacgtccaccttgtgaatcaggtatgttctcattaaaattgtacaaaatagaccataaaatcaattattttttaatataacaaacttgaacccaatttctaatatgaacagatacaaaataatataaccaatcttgtcgcaatataacacattcatgtcagattattattaaattttaatatggtaaaaattataagctgattgttcaatatattattaactaaaaaatggaaagaaaagcttaaaataataacatatattttggaagtgtgaaaatgatatactgaattaacatatgatatgataaagaaataagtacaataataggtgtggtgtgtggtgttgcagaaagattctaattgatggagagaagtaaccacataatattaattctggttataataaagtaactcatataaataaactcacaaacttccaactttcactttcactttcactttcattatagacattttgtcttttattccccaattgactaatacatatgtatatataatatttaatggtccacaccccactttcaaaaattaaaaaaaaattatatgtaatttttttatttatttatatgtaatatatatttgttgtgactgtgtaatattaatcgataaatctgtgtggtccgggccgtactatatgtaataactaataatagtcccctccttaccctacttatattgtaaatatcttactttttttttttctgaaaaagaaaataaaaataaataaatatgtatcatttgcctttttgatgaaaggtcgtatgatagagatactataagatcaaatatacatcaaaagatatataattgaataataaatattccatgatagggtggggactataatacaattgtttttctttttttatttttttttaaaaaatatatgtatgtatattaattatacaccacaattatccttttaaaaaaaacacatcattatgtatattttattatataggtaaatatttcaattataaataggagaattactatatatatacggttttttaattttttttttttttaaaatttagggtttgagtttttaaagtggttgcaacgctagttgctatagaggtttatatacgatttattgttgcaatttaattagattgcagcgctagttgcaatnngagtttctatgtagaattctataaaaatgcaaaaaaaaaactattttgaagtgtaaaaataaaaaaactccttataaatattctatcaaggaaagcttaaataagttttaaattttgttttaattagtaaaaattatatatttttgtgagtaattggagaatcttttcagaaatattttaaagatttatccagtcctaaatagctcaacttagctatatagtatcatacttaaggatgaacattttatcacaaaattctaactatttttctgtgttgtgtaatgtttgacacacaagtgagcaatatagtcttaatttatctggaattttggatttttttttttaataatgaaacttattaatttttcaaaattttatttggacctcaaatttttttaagaaaataaaaataaaattaagaactaaatcattaatttttagtcaaaatatattccaatgtatgaattttggattttaaaatattttttttaaaaaaaaaaaataattatcattatactaaactataaggtccgaaatagtacactctttctataactaagggtatttcagtcattaaaataatttgaccttagggttctagttttaatctttttgaaagataagttcaaaataacttttttaaaaatatccaatcaaaataatagatggtccaaaatattataaactcatttatatacagtgatagtgtgagctagcttgggaaatatttttcagataattacatgaggcactactttttataaaaaaattacaattttacgtttacagaatttttttttacatttttacaaaaacatgtaagaaaattacataaaagtaac

SEQ ID NO: 28054 - DNA, 4076 bp, Cannabis sativa
caaacttcaaaaatccatatatggtctacggcaatcctcaaggcagtggtacaaaaaactcactgaagctctcttgcaagaaggctttcatcaatctcaagcggactacacactcttcactcgaggaaaagatgaaagtttcattgctttactcgtgtatgtggacgatatagtcattgctggtcccaacattaccattctacaacaacttcaagagtccctacatgacaaatttaaacttaagacccttggaaaactgaagtattttctgggctttgagatagctagaaccaaagatagtatgtttctctcccaaaggaaatataccctccaacttcttgaagaaagtggttacataggcagcaagcctgctaagacgcccatggatccaagacacaaacttgatgaccaacaaggtgaactcttgacaaatccaacctcctaccgacaactcatcggaaaactgctctatttgacattgtctaggcccgatatcacttatgctgtcaatgttctcagccaatttatggcctctcctcgaacacctcacttacaagccctacaacatctcattcgatatctcaaaggcagtcctggtcaaggaattctatactctgccaagtcctctcttcatctacggggtttttcggattcagattgggcttcatgtcctataactcgacggtccacaaccggattctgcattttcttaggagattgtcttgtctcctggaaaaccaaaaaacagccaacaatatcgagaagttcagcagaggctgaatacagagcacttgctgccacagcaagtgaaataacttggttgcaatacttactcaacgacttacacatccagcaaccaaatcccgctttcatctactgcgacaaccagtctgcgatccatattgccaacaacccgacttttcacgaacgaaccaaacacatcgaattggattgtcactttgtccgtgacaaaatcaaccaatctacgattagactcatccctgttccgagcaatttacagcttgccgatgcattcacaaagccactacctgcttcaattctcttggctcacactagcaagatggctgttaacaatctctaccgtccatcttgaggggggggtaacaagattacctatattttcgcctcctattgctcctagctagtggctgattagttgagttagttaggttgtttattctgttaagggtagtttagtctttacaggctgtttagtcgatcttttatttactctgtttcagttctgtatatataccactgtaatggcagactttgattaattcattcattcttgttaatacaaaatatcattccattcaaatgtgttttcgtgttagtttatgttgggaagaatgaaaagaaacggtttgtgattcccttgtcgattttgaatcattcttcgtttcaagaattgctagttcaagttgaagacgaatatggatatgatcatccaatgggaggcctaacaattccatgcagagaggatacatttatggatctcatatcaaatctaaattaatgcttcataaaaatgaggcacgtatattcgttcatttacaatattttgtaaaacaagaaataggtagaaagattcttttattattattgtatcattctctttacttgtggagtcaaaatgcagctcccagaatgagaattaataatgtataattgagatccaatatttgtattaattgttataagaaattttattgtttgatcatatatatttatgatttcgtaaaataatgttgatattatgtatatattaatattatatatttgaaatagataaaatataattttttttaagaaataaagttttagtgtgatgtattttaaggaacttgatatatggtgtaatgtaaaagtgtgttgtaaaatagagaaattaaagattttagtgatgtatagtagctaacgtatgcatcttacacattgttaatatacaagattctctactattataaaaaatcttacttttagttacaataaaatttgcgactaaaagtaaaaattagttgtaagttattataaattatgatttttatgttgtaattaaaatgttcgtcactaaaaatataattagtcacaaaattataagttgttataactaattaaatgtgtttttagtcataatacttattgtgattaaaattaaattaatttagtcacataaatttttactgtgactaaaagtcacatttggtcacaacaaatttatattatgattaaaatttattgtgactaaaggtaattattttttgtagtgtaccatacagaacaagtgtattctccactttccattacttccatgacttcttgtttaaaagaaaaacagtactttctacttataattatgtttgttttgtgatacctctgttctgtttatgaaaggaaatttacacaaatttatggattagtataatattaattagtcttagctagtatgaaatgagtaaaaggggaccagatgagcagcagtacaaaccatcttcaccactagtcaaaagagacaacaccatgtgatctctacactgtgttcatcattgtcttaaatatatatagatacacattaatatatacttgtcacaattaacttaattcaaataaaaaacaatctcatgcataagagaaatacctaattcccatttttttttccttattatctttaacttggtgacaagtttttgtttccatgaatacaatgtcaatttattaacaaattaataaaattaatatatgggtaacaaaaatcatttattcctttgctttttgtcactagtctcttatttttattacttcaaaatattagtgaaatattttatgaataagatgaatcttgtcagaagatcttcaaatatatattagcctatatggtcaagtagttgttgaactaggaacaaagaaggtcctataatatacaatatttaatattcaagtagttataaaagaatggggacccaaacacatgtgcctaatcaacagtaaagcctttaagtactttttttttttggagtacagagctgaggatcaaacataaccatgtgaagttaatttcagatgcatatgtttgtttgtatatgaatattattattatttgcaaaaccaatattttgggttgtcttttcttagatcacatttgttataaaaacttgtttgacaatcaataattttttttttttcaatcacctatattaattaatggatttcacactctcatcatgacttgaaattgttttctttcttcatcagtctacaccattcatttaatgtagcaaataaatctgtttaggtaggtattatcattctctctaatgtagggtatgccatgtttctaaaaatacattaattaagctaagttaattacaaattaacaaagttctattgtaagtggtggggtaatgtgttattttatattcaatgaattttatttgattagttagaagacattcccatgtgttgtattccaactacttcattattagcttgcaaaattctcacttgaaaagccacaagtctaataactataaataagcatatttagtagtcttaaccaaaaagtcaagttactcatctcaatagcaaagaaaatttctttctttctcaactcttgtaatcttttcttgcttattcaaaattattacaccaatatgggtttctatttgcccggagtagccccaacaaagaaatttcttcgacggtctttgtctaactcgagcaaaacaacatcaaatgcagtagatgtcccgaaaggccatttagcagtttatgttggagagagacaaaagaagcggtttatcattccagtgtcgtttttaagtcactctttatttcaagaattgcttgttcaagctgaagacgaatatggatatgatcatccgatgggaggcctcacaattccatgcagagaagatatgtttgttgatctcatatcaaatctcaatgcttcataatcaaggttgattactaagaatgtggcatattctttcatcacaacattttgtgaaactagaaatattgagatttttttttattcttattatcattctcct

SEQ ID NO: 28055 - DNA, 2814 bp, Cannabis sativa
ctatttaagcaacctcagtcaaattctaaatattataatacaagctaatacagatcatttattatgtgttaaataatacgattcatattgtattaaaatctataatcgtaataatttttttaaaaaataaatggcatatatagattaaattaacatagttagacggtcattacacaaaaataattataataattaatacaatacaagattttacaatattgtttcttttactcattagattatatatatatacacgtatatacctagtattatttctcattggcgcacccatatatatatgtacacttttttattttaaaattagaataaatgaattttttttccaaaatcatgttttataaaattattcacttttttaatttttcaattgagaatcaaaattttaaaaacaaaaaaaattcagtttcaaaatttttttaaacagtttttttttccttatttggactcccaccccaacctagaccttagaacctgaaccccgaccccgacccaaactggaccccgacccagatctggaccccgacccagacctggacctcgaacccagatcccgacctggaccaggatcttgacttgggactccgcactcgaaccttggacgccgacctagacccgaaccctaaccccggcctagccctcgaccccggactctgactcagacccaaacccaaacccaaatttgaacctcgggcttggaccccgaccctgaccccagccccaaactcgaacccagacccggaccccggacccgtaccccgacccaacatcggactggactcgaatccatacccaaaccccagactaggacccaaaccaaactcggaccccagtcccggtgctaggcctagacctgtacccaaaccccgaaccaggacccgaactgtagacccaggctcgaactccaaccttgacctggaccccgactcgaatcagacccagaccctaaacccagacccgtgccccgaactcaaaacctgaactcggaccccaaacctggtgctaggcccgaacctagacctagactcggctttcgcccgaccatggtcccagtcccgaccatggtcccggagttggactccgaccccacactcgactaaaataaaatcaacaaatgaaaataaattttagaaaatacacttttattttttgttttgaaaattaaaaaataaaagtagttatagaacacatttttaaaattttacttttatgcttgtgattaaaaaatttaaaaataaaagtgttatcaaaaactacttaaataaatgtcttaattaacattctctttccatttttcaaagaggcaggagtcgatctcttttgtcaccttaaataatattttattcttcattataaactcactctttctcaccttgaacaatacatacatacatatatactcactcaataaatatttatgtaaatacataattattttgttgctacatttggtacttgatttagaacttgttcttataccataaaacacctttattagaagattcatcatctgactcaacatagacacactccttaacctctctccacatagctttaattaccggagtgtcatcaaaacaataatactctcccaatattggcttcacagctttggttgcttccactgcattgtaatgtggcattgttgagaataaatggtgcaccacatgagtgtttgtgatgttatgaaaaaccccattgagaactccgaaatctcggtcaaccgttgacaaagcacccctaaaccaatcccattccgacgagtcataatgtggcaatgcaaggtgagtgtgattcaagtatgtgatcaccgcaaggatgctatttactactagtaatggcatcccgtacgtgatcacaacccaactcaaccctttaaccgagctgagttggtacaatacaaatatagtaattaaaacaccaatatctgaaattagtatatgaaacctttcgctttttgagtagattggagagtaaggatcaaaatgacaagcgaaacgatcatatggtctacctaatgcattgaaacacacatacaaaggccaaccgaaaatcacggtaagaccaagacttaagaatctccctaatgaattgttgaggtatttgtaatgccatggcatttgtgattttctctttggaacaatcacttcatcgcgctcaatagagccggtgttggaatggtggcgacggtgactatacttccatgagaagtatgggacgagaagagcagagtggaagataaagccaagagtgtcatccacccatgggtggtcactaaaagcatggtgaccgcactcgtgagcaatgatccaaacaccgaagcaaatgcagccttgggagatccagtaaagtggccaagccatgtacaaaagtgggtgtgggagaaggtggaagtaagaggttgctacgtagtagaataaagaggcgaaaaaaaggtctcgaaggagataagagaaggaacggagaagagagcggttgaagcaatggggcggaatggatttcttgatttggcttagtgtgaatggtggtttggtgtgtggtgctctcacaactctactatattggccaccttcagttcccatttttgtatgtcccttgaagcagacaaaaaaaaattgttaagaattcaaatatttatatagtatgcacaacaaaaaaaatgcttctaccttcattgcaaaattaagagaaaaatagcttaccttgaacaaagttgaaaaagaaagaagaaggaaagtctaaattgtgtgataagggagtgaaattgtggtatatatatttatagatggaaatggt

SEQ ID NO: 28056 - DNA, 1798 bp, Cannabis sativa
gtggagcgaaaatatcaaacctaaatttcctttattatgtttctgcaaataaaactaatccaatacctaatttgattgataattgctacatcgtgatatcactgatatggtcatataagagcatatccattcattaattgtagatatgtcaaaatgtgaacctctctattctttctatcccatatcactttgagattcacatacaaatgagcacacataaaaataaaaataattggaattggaaaggtataattaggaagaaagccaagttagagaaccatggggataaatcataattaattattgtatattgacacttatgaaagatcgtattattacaaaactaagactagtttctttcgtggtacgtctagtggtcgcatgaaaatgaaatgaataaaaattaccgtctatatatctagagaagtagaaagtacatgtagtgttgttgctcttctagctctcgacctatataggttatgggcaaaaattattaatcatcacaagagagagggagcgagactaggaagataattggacgatccagatcgaacgagagccattcatcactttttttggttatattttagtgcaagattatttggctttagttcgaagcaaattggttgttacatatataattaggtgacagtacgaatcatattatatatgtactttcatacatacgtgccagtatcgatctaatgcacgaattaatttctttatgtatattgattactataataattactacattatcttttcgaataaacgacgattcattaattacattttaattaatgtaatcatacatttaatttaattgctccattagcaataattctaatattaataataaaaagaactacgtacattttaggaaagaataatgatgtatgctcttcatttacacatgggagtgtgtcttaaaagcatgtaaagatatttattattattttaaattaaataaataaataatatatatttttttattattatatttaaattattaaattattgattgaattatttatgtaaatatatataaaaaaattatatttgtaaatcaaattctatagtgattctcagctagttataagttaaattttaggaaaatgccaagctcgagggcttaaaatgatagcttacttgaacaaaactaaggatctcttagcccaactaaagcactactctattcaacaagtaccacatgagcaagactccaacgtggattccctagaaaaattaactagtacaacagacctcaaagctctaagcataattcctgttgaatatcttgctcagcccaacataggtagaccaggggcgtattctcttgataaacaatagttcatcatggatgactctaatagcccaatacctagagcaaggtattcttccagcagccaggaatgaggagaggaagttatgagacaagtagtctgttttatcatcatggatggagtgatgtacagaagaagctactcaatgcctcttctgaggtgtctcacgcatgaagaaagcaagttactcatggttgagctacataagggtttttgtggcaaatacactggagggtaaaacctcttaaagaaaattttgagcaagggtatttttggccaataatgattgaagacttgataaattatgttaagagatgtgataaatgtaagagattctcaaaaataccccaggctaccctaaacaagctcaagaatatgcaaacaccatggccatttatggtctggggtattaatctcatatgctcattgcctaagggaaaaggtggagtctaata

SEQ ID NO: 28057 - DNA, 3609 bp, Cannabis sativa
  modified_base (3118)..(3122): a, c, t, g, unknown or other
ctattttaaagagtaaatataaaaatgaaaattaaagaaaaactaagcaaatgttgaaaagtagagtttttcttttttatttttactttggatcttgttcttatttttgtatattcattttgtataatgttcgaaatattaattaattacattcatttaaggaaatcattgcataagttgggaaaattaaaataaaaaataataataataaaaatgaaagcgcccaccgtggggctcgaacccacgaccacaaggttaagagccttgcgctctaccaactgagctagacgggcttgttgtttttcttagccactttttacactaagattactattaacaatccttttaagttgaaaagacttagctaaataaatatcttagaaattttttaaaaccattatgaaaaaaaattactaatgaaataactctagcaacgatgaaaattatattgtgcgacttcaaaatggtcatttttacgatagtgtttcttatgataatgcttcaatgaaaaaggagaagaaggctagaacactttttttgagtgtgtagattgacactcaaaaacttcttataattagtataaattgataatatatatatatttctaaaagtaaacgtttatattattagaaagatctaatggtccaaacaaaatatatatcacttgccatagaaaggacttttaattattagctagtagtgtttagtacaactaatattcttttagtaatattatgagctacaaattatgaagtgtatgagttttagtgaaatgacaacttaataacaaattgaaagcatttaaatacgcagtaacataattttgcacctagtttctttaattgcattgagatcacaaatttatgcctataatctacttctaaattcaaaaccaaaatacaagctttagcttctcctaccggcgagttgttgtggctaaatccatatagcttcctccaagcgatatctagccacaacaaccaccatgatcatctcgtcactcctcacaacatatagaaattaagcttatttcttgaacatattttgtgagtagtgtagatggtatgtgattgcaaatgtataacaattaatttggtcgagttatagatatttatactaatttaatataaatataaatttgtagttactttacagtagacacatatttcaatagtcttcaatatattttaaataatttataatactaaaaatataatttaaaataatttatgtgtatgtatacgtataaaataaagacatgcctatgaaaataattaaaattaatattctaagagcactcacagtagaaaagataaaatagctaatggctaaaaaaaataatgaaaaatgatgctctatcaaatgagctattatagctcaaagatttagttcataaatagtacttagctacatgtaaatataagcactattcatgtagaaaaacattattcattgagctataaatattatattacttttctaaatctttttaaaatgtatatgtgtgtatgtgtaatattattattgttggggtccaatctttcaccttcttgcaccgtcacctcaccttgactctgacattagtataatattgttcgctttgagcctaagccccaacacttttatttttgtgtatctttctaaagtgtcttatactaatggtggaatacttatattctagacaattcttatattgatactccaacaattaaatttatttaaaaaataaataaaatatatatttaaatgaataatttttaaatgatattgagaaaatttaaagaaattaatatatgatataatataaatgtgtgagataaaatagaaaaaaattaatgaggtattataaagagttaagaaattgaattgagtgctctaagacaattgatgaggataaagttcttgttcttctatttatttattcatttttttttaaaagggtgatgataaaattcttaagatgcaatgattgactttatagtttgtttccaaatctttctatctgaattttttctcatgctttggttcttagaataaaaagaaaaattcaagtggagaggattagaaagggacccaacaaagacagattgatgatcatgaggatcaaaagtgacactacataataatagcacaaacaaatagtattggtaaagccacaacataatatgtcaaatctcttttatatacatatattatggtccctcttgtgttttcctttttgtttttgctattttttgatcaagatttgtgacaaacatttttatattttgttaaataaagcccatatcatggtgtcattttccaaaagaacaaaaaatcagaaatgttttgaatatgttcacttgttttattccaacatgtttattatttggagttaatttaatcttagagacaacacaagacataatacaccatataggatttgagaatttttttttatataaaaaaaatggtataaattttggatttcagatatataaaccaattaaaaaaatgagcaattttaagtttattccaaggaattaataaaaaaaatggcaaaaacattatgcctttctcattgatagggtagtatataaacatgtgatatttttctccccaactcttctaattaattagcatcaaatatattatttattgaatattaaaaaattaatgtttagacctctcttaatcatataatgaatcactaatataatagttagtttattttgtacaagtaaatatgaaatttttaatgtttttacactttttatgattttttatttctttacattttgatagagaaaaaaaccatttatatacatattttaattgatagcggtaactggttattattattatattaatttgagtttttggcggctaattattgttttacttgcatttaattttaaattttaaattttagcgataaaaccttctaaattattgataggtaactcttagttatcaaaagtacacatatctattttgtatttgcggtataaatactcaagtttaacttccagttgtaaataaatacttatgtttaatatttagtggtaataatatctaagttatatttttagaactctataggtacctgaccattaaatattaagtcattatccacgtnnnnntttcttattggtatatttaaactaatgttataaaaatttaatgacttggatcaatcaaaaattatcacgtgacaaatttacttaacacttaacagccaggtacttacaaaagttctaaaattataacttaagtattattaccaccaaaaattaaacttaggtatttatttacaactgggagttaaacttaagtatttatttcgtaaattactcttttttaaatgagaagttaatcttttttcaaaacaatataatgaaaaaattaaaaaatgatgacatttaaggacagtcctaaaatttaatggttcataagaaaaaattatttttaagcccttactaacaaaatatgatatttttcaaaattaattaaaaaatatatatttttaaaaaggaaaaaaattatttttgagttcctaaattaagtggactctaagctcaaacttaacttatccgtctatatcttagaccgggcctgtaaacattgtct

SEQ ID NO: 28058 - DNA, 6759 bp, Cannabis sativa
  modified_base (6702)..(6734): a, c, t, g, unknown or other
tatatatatataagagcaaattatatttttttgattccatcaaagaaaaaaaaaagatggggaggtaaaattgatagtttgaggttgaaaggtgtgcatggaaatggaggaggtagctagtcgtagacgaaacatttttgtattaggcatagccaaaagccaattatttctagttgttttcatgtctccatagtcaaagatatcttagatttggtggggcaaccttctaccctctaatttaacttttacacgacacaaatatgtatattattatatataatgggaatccacttgatcaaaaatgatattacgtaaattatacatatttatatattacgtagattaattatgtaaattacatattattaacgacaaatatatatatttattttttttaaataaaaaaaataacaaatgttgtcacgtgaaggtcagcatacatgtagttagttaaacttaaatatttgcaattaataataaatttgttcatattatttatttttttattaaaagttattttcaaattttgatatttagaattagttaaattttaaatattttttttaaaaacatttttattaatttcgaacataaatttaagacgaataataattttttttaattattattagaaagtataataataatttttatttttatttaaattactattatgcttttaaattttaataattattatattgaatattattaattttaaaattatcatattaaaaaaaattaaaaactaaaataaaattaacaagtcacgtaacatttatttagtatatatatatttatatatgagtgaaagttgaactgtaaaacaaagaaggcagacaatttaaagtggtttggccgagtcaactaaaattctcaaaatacaagtttgagaaagagaaataatatgcgtatttaaaacataaccaaatacctgagcgaaaagttacattttatgaaatacgagatatataagaccttttatttattgacatttatttaatttggagtagtttgactgaatcaataaaaagatcacactaacctttttctatttggaatacaaaaacttaaatgtttaaatttaaaactgattttttattttctttttattcaatttcaatgagttaattttcaagttaaactaaaattcattatttatttttaaattcaaaataaaatattaagtgggtcaataaattttatgagaaaactgtaaaattcgaacccgaactcaaaaataaatgataaatgataattgatacgagatattttcagcataatttgatagtttgttgacagtttgttgtgtatcactcgtacatggacttgatgtgtgtgtcacaaaacaacttcacgtaccaccggtcgagatgttctcgtccatcatacgcgctttgaccctgcactgctcagagtatcccgcccgtgccatgtgcttggggttgtacccgagccatgtgtactatgccaatcgtcgagtatgctactccttaattactcccaatttggatccgtcaggctacacccgatggctcccatcgagagtgtgcttggcgacttcacctctactcataccccgatgagtgatcttgaacacaaaaaatccctacacgttggcactaacaacatttcttattgataacaaattttccattaattacattaatttgacatggtggaagttgcaaagtgaatagagaaaatacaatagatatggtttccctaataaattgactattataatttcatttttagtagaaaacgtgaagaagttgataattatgttaagtttacaaatatagtggcaagttaggctttacaactttcttaatagagaagagtagtcgttgttcttggtgtgcttcttctattgctaagcaacaaaagagagagattggttggaatgttgcgtaaaagtaagcaaatagaatttcctcaataaaagtctttttccttcttacttaacccttttccttttctcacttaataagtttcgttttttttctcttaggccagagccataaagctgagttgttgtctagtcttccacctaaacaattgggtgtatatggtgggaatagtgggattgtgataaaaaaattaaaattattcaatatttaaaaaatatgtatatatgtaaaaatatttataaatgatataaatataaaaatatataccgaatctgcacagttcaatttacacacgtgcaaaagttataattttcacttgtttatagaaattagagcaacattttagatatttttccaaaatttaaaatagtttatagtgtcaaagaaagcctaaaataattgttcttacataatattccacaagtggtgaaattgaaagtttggattatatattgtttctattttttttatcaaaaaaaaaaaaaaaaaagacaaataggatgcctactgtaattctaatgaacattacatgtaaaaaaattttgacgattataaaaatatgcaaattggaccatgggtatataaaaatatgtgggactataaccactgcccaatgttgggattttttttttttttttacattttaaatcaatttttatttaaatatttttactaacagaacaatctcaattgcagccagaatttatatagcaattcatataaaaattacaggaacaatcaaaactgtaatttttttttaaaaaaaaagttaaaaaataatatggttaattctcccaaaatatttacataaagaaaaagataaagtaaagaagctatgtaaaaaatcaaataagaaaacaaatattataaataggcctaaagtaataaggattatttatagttgagtactacactagaacatgtaatagttacaaccccaatcaacacaaaaatattaataatcaatattacacaagagaataaaacaatatgagctatttacataatcaaagataatattgcaagtaatttaatacaagaacaaagagtaggaaaagaatactaacaaaagcttaaatggcttccataaaagctatttttcttccacaccatacatccagaacactttaggaattttttaaaatattctttttttttcagagatttattgaattactccacaataatgcttaatcagattaccatgacggttttggagcattatgacacatttgtgacaatttggaagttacaacagtactctttatgttgttcaaaactgctcacgaaagtaggtaacaattaatcttttgaactggattcaaagtttaatgattagtgtaactccttttaaacaacaaattgtgtaactctcctatattacactatgaattgtaactcatatatcttataaaactataagttacaaagttgattttataactctcaaattaaatcaataagtagttgggaaagatcacccttagaaaaatcttagcgggttatttactaacttatgttacatcaaattggagtaaaatgtgagtcaagtagtgcaacattttagattacttagaacactatcaagctatacataagtgaactcttagttagagttaggcaaattgttagaagttagttgttctgttatgtcctatgcaactaactagaagttgtgtattcgagctatatatagctcttcctttgtattctgtaatcaactctagtaaatcaataaaacagagttcattgtttgccttttcttgttcttttctctctaattgtaatatggtatcatagcaggttcgcctgtgattattattcttcttcctcctctctctgtttctattagcaattgctcgaggtgcaggagctcaaactcgaagcaattctgatgcttcaaatcgtttctctattttagaatcaagcacttgatctttctccgatgatgctcgaaatctttattttctttctacttgtgatcatcctggagcaagtttagttccaaaaatattgattggatgcgagaacttcagctcatggcaccgtgctatgcaagtggctttgattgcgaggaacaaattcaaatttgtcaatggcaagctccctgctcctgaagaagacgacgatgaatttgaattgtggaatcgatgcaacagtactgtcatttcttggattctccatgttgtatcaaatgagatcgctgaaagtatcatgtacatggacaatgcaactacgatttggtccaatcttaaagaaagatttaaccaaaaaaatgctccctgagttttcgaagctattcgaaccaagcaatcacttgcccaaggttccaatagcataacaacgtattccacttgactcaaatctctgtgggatttgattcaagaatataggccataaccagtttgtacctgtggtgccatgaaaataattcaagattaccaaaatgaagatcgagtacttgagtttctagttggaccatataatggagctagatctcagatcttaatgcaagatcccattcccaatattaacaaagcatatgctgcagtaatacaagaagaaagtcaaagatgcttatctaatgctcctactaaaggtgacaaatatggatctggatcgaaccagggtcaatttgctagagttgtgcaaccacatcgatccaatttagtttgtactcacggtggaattactggtcacacaatatctgggtgtttttgcatacatggttatcctcctggacacaagcttcatgggaaattccctaacaaaaataccaatgctccaggaaataatcatggtcataaacctagtactgctaatgttgctggtgatactacagataatcttggcaaaatcaatgaagttgttgatagtgatcaagatctagtttctagcctttcatctgtgcagtatcaaaagctaatggcattgttgtcccaaaggattccagaaatgccaccttgccccactgaacctcccatggtttctcaattttctggtaagcctttaaaattgcctaagtctacttggatcattgatacaggtgctacacaccatgtttgtcatgacctttctttatttcaagataagttttttgatcctaatctcactatagtcaaattacctaatacaactaatgccaaaaaaatttgcttaggcactatacatatcttaccaaacttgtttcttcacaatgttctttatgtcctagattttcattgtagtctattgtctgtgagtgctttgactgattcaggtgcttattcttttaatttctaaactaaacattgcatcatttaggacaatttgaagaaacaggtgatttggatgggtgagaagattggaagactctattatttgaagtctactattatagctcctaaagatcagcaacctctcatttttttctattttttctgattcaaaaatttctggtgacacaatatggcattatagatttggccattcatcatgtatcaaaacacatcctttgaataaagctttgtaatttcatgtcaacacttctcatgatttccattgctctatttgtcactatgctaaacaaaaaaggcttccttttgtttccaatcacagtatgtctacacacatctttgatttgattcatattgaaatatagggaccctttaatactcttactctagatggctgtaggtacttcatcactattgttgataattattctaggtttacttgggttcattttattaaaaccaaagctgaagcgcaaattgtcatccctcagtttatacagcttgtcaaaacccaatttggagtccaaataaaaggggtcaagattgataatgccaaagaactccaatttcccactctttttagctcccttggcattatgcactatcactcttgtgtgcaaagacctaaatagaattcagtggttgaaaggaaacaccaatatttgcttaatgttgctcgagctttattattttagtctcatattcctctggaatattgggatgattgcataaccactcctacctatcttattaataggactcctactcctaacctccaacacaaaactccttttgaaaagctcaaaaataagcctcttgtatatgaccatttaagagcctttggttgtttagcctatgcatctaccctaccccgtgccagatcaaaatttactcctagatcttccctttgtgtgtttcttggctatcctaatggaattaaagcctacaggttacttgacctgaacaccaacaaagtattttactatagggatgttctgttgcatgagacaattttcccatttgttgcttatgcaacattacctcctcaatatgatcatttttcccttcctgttatgactaatgatgtccctgttgaatcttccccaaccacatccagcagtagacctactagaaacatcataaaaccctcatacttgaatgattatcattgtttcttattctctaacagtgtttctatttcttctcaggaatcaatgcctgtcattgcacaatctataaaaataggtgcttgattactcaaactgtcaccaaaatttcaagctcttgttttggccatttcaagtttgacagaaccaacatgttttgagcaagcacagggaattcctgagtgggacaatgctatgtctacagaaattattgctctagaggccaatgcaacatggattattgtcactcttcctcctcgccagcatgtcattggttgtaagtgggcttataagattaaatttaatgttgatgggtcagtagtgttggaattattttatcaggatctnnnnnnnnnnnnnnnnnnnnnnnnnnnnnnnnnaatatgaacttctaaaacaatatga

SEQ ID NO: 28059 - DNA, 1920 bp, Cannabis sativa
tttatgcaaagaacttgaagtgctacaccttttacactgcttaattcctaaattgaaatgtctttaaagtagttgaaagcaaataaaatgctatctttcaccatggcagctattaatattaataacaataatgtgaacaatgcttttaataacaaccaactagcaccttttgtagttgatgcacaaccacaagccgctcatcactattgcttaactgtagtgaatgaaaatctgaatagtattgctaatttagtcatcactagaaataattttaagttgaagcttgctttaatcaatatggtgcgaaaaaattagtttggtgggttggctattgaagataccaatattcctctagttatattttttgaggtatgtgctactgtaaaaatgaatggttttattgattacgccaatacgactctttctttactcttgaagggatagcgaaagaagttgttggcaatatctacagacaggatctattactacatgagatgatatggctaaaaatttcatggtaaagttatttcctccatcgaagtttgcatagttgagaagtgaaattaggaaatttagacagtttgatatagaacaactatatgaagcatgggagcaattagaagaattactacatcgctgcccacaacatagctatgaaagctagaagtctcaattttctactatgggttgaatggtccaactaggaatattattgatactactatcggaggagctttattggctaagcctgtaactgaagccattaatttataggaggagatggctactaatagttatagctggattaatggaagaaatactccaagaaaggtggttggcttacatgaagtgctaagtagatgacttggccttcttgttggcgagctgtagtggcacgtggaattgatattggccatgtagacatgccacatcaagtgggaaaaaaatcaagacaacaaaatgagttgccaaaacaactactaaaaagtagcattcttataagttggtcactggtagtactttctaaggtgttgtccattccaatactttggtaggagaactaactccattttcttattgtacctgcgaagcttgtaggaacccttacttattattcctctccttgacttgtttgttgaagtgccttgcaaccttctgctggcaggcctacaacttaatgctggcttggtcttttctttcttctattttgtcaaaggattctgccaaaaaagtattatttacttcttggtcatatgttatccttctatgagacggtagcattaactctacaagcaacattgcttcatagccataagttaaagtaaatggtgtttgtctagtggtcatcttctcggtggtcctatgtgaccagagtaactctgagagcaattcaggccaattgccttttacctcttctagatgctttttcaaagtgaccctgaggatcttgttcacaacttctacttgcccattcatttgaggatgagcaacggcagagaagcttttgatgatgttgtgtctattgtaaaaatcaaagaacatgtcactatcaaactgcttcccattgtctgacacaatcttttgtgcaagtccaaatcgacatatgatgttcttgacaataaagtcgaggacttttttagaagttattgtcgccagggattcagcttctgtccacttggtgaagtagtctactatgactacgacatattgcacacatgcttttccttttgggagttgaccaataaggtctattccccatatagaaaaaggccaaggagactgcatcaatgtgagctcattgggtggagctctcaagatcacccccccttacggggtccgacgtcctgtgcatattattgtgacagtcaatagtcccgtgatccgtaaggggaaacaccgggtaagctgcgcaatcccaca

SEQ ID NO: 28060 - DNA, 4063 bp, Cannabis sativa
  modified_base (890)..(895): a, c, t, g, unknown or other
tttttttttattttgtttgaaaaacaactacacaaaaaaattatgcacaaaatttctccctcaaatacattagaactaaatttcctacattgtttataaattatttaggtattatccatatactataaatattgttcttattatgttatattgatttgtcctaaaatatttttttttattatgggtgattgattaattttttaccctataagttttatttttattgtcttagagcatctccaaggagtacaccaaatttagtgtcatactatcactaaatttagtgttaaaaattatttctactacaatcacaacactaaaaattatacttaaaaatattctgtattattatattaactagggaaattcaccatgcgttgcgcggttgttcttaaaagtttgatgttatacattttttatttagaaatctataaaaggatagttgattatcgtattatgttttaatatttataaatttattcctttaaaaaaaatacattaatttttaaatttattctgctttgtaaaatcatgaatcataaattttgtttgtgatgaatagatgaaatacatacataaaaaaaatagactatacatagtgttacgtaataaaaggtttatttatatttattttttaattttaaatcaatgatgaatatatattgaataatatatagtataaaatataaattactaaagaaataaaaatatatatagtattaagttaaggggaattactccatatattattttttttaatttttttttttaaattaacggtttgagtttttaaaatagtttatccggtgatttccatgtgggttgctatacgatttttttgttgtaatttaggttgcgctagttgcaatagggatttttatgtaaaattnnnnnnaaatgtaaaaaaaatatatatatatatatattttgagaagtgtaaaaataaaaaaaaaaaatcccttaagttaatttagtatataacaaaataattatgctaaaatttacaatattggaatttcataatattgctctttattgttgtgctattattttcttgtaactaactttgtgtggtaggtagaataagttaaatggaagctgacaaattaaaaatgagaaagaattaaaaattgtataaaaatatgtatagttgtgacaattgattttttttttaataaaaaaaaaaaaacataacaaattgtaagaacataatagtttacctttttggtaacaatatcttgtgatttgtgaataatttagctaaatatgaagttgtaaaataatttgagtggttgattcattaatttgtatattaaaataggtaaaacacgcttttaatatttatgttctaagatgaacttattataatgtattattttaaaatatataatttaagaaagtggctgggctaacatcttcatcaaaattgactcactgtgtgtggtgcaagttattcaaagttctataaaaataatttctttgattgatttggtcattgaagattgtaaaaatttgattatatagtgattcacacgtttattagagctggtagattatattcttattgtgattttagtttggagtctattctctttttctttctctctctctcatccctagaggaaaagtcgaagacgcaagaagaatatatacccaattacataaaccactaaaaattgggtgatgacagttatgatggaggaatgccatgtctgatatctctcagtataattaaatggtcctacatatcaattcatatatatttaatattggaaagccacctccaagtttgtgatcccaaaagatccacagctggtcttctagtttttctagcatttcataaaatcaagaagtaattaatatatataatgcatggatgtgatatttttcaatttacacacaaataatattaattattctaaacatataatatgtaaacatgatgtgaaaacagaggaaaaagaaaagagagaaaataaatattgattaaagagagaaaataaatattgatttgttgaatgagttgcaaaattaccggagaaaagagtacttgtaaaactcaaggtacaacataattaataattaataaactcacaaaaaataattttatgaaataataatacaagaacaataataatgattaaataagattataactcaaaaacatataaaaaaaattaagaaatcaagaaaaggttacaattaaaacaataaaataaataatatatatgagatcgatgtgagtgcaatgtcaacactatatatatatatatataatatttgagaaatcactaaatttaaacaacgttttacacttttatctaaaaatttatttttccttgttacaaacactttaagaaaagaaaagaataaatatagtttttttagatttatctagcctaaaaagaatttctaacaatggactctcttgataaaaactaatgtatcccatttgaacctcatatgtctttatgtaagtgaaccaaaatttcaatattcaaactcccaacacttcatgatttgttaccaacccttaaatgaaattatgtacgttagagaaagaagctgaaacgaaaccctaccattgccatgttgaaaattgaattttaattttaatatcttctacctcattttaattagtcacttacataagtgtagtaactttctctaatagctatatgataatagtctttaattatccaatgttgatttgtgtaataattctcttaattacactctttaaaattattgtaataaagagttataatataattaccagatttttttctctttcaaaaataaattactagttttattatgtaattttttatgggcttgttttgtacgtcgtattatattgtattgtattgtattaaattggattatatatcatattttttatataatattatattaaattttaatttatattaaatactatatatttaggtgcacgtaaaaaccaataccacgtataattttacagaaaaatattgcatgaaatacaatttaatataatactatacaatacaatataatacgatataatacgacgtatgcaaacaaacttattatgccgagtggggtccatgatgatggtgatgagcctttgtgttgtgcccatggactgtatatataaatgctgttggaggttgtccatggacccagtggtgttaatatttcatacaacttgcactctagtaattatatgtacacataaatgatacccaggcaaacttaatacacgtatagttatatgataagtaattttaatcaaccatctattcgtttaagatgaattttatttattaaaaatatcttaccatataagtatatttcaaatttatgaattttatgtataatttatgtatgtagatattatttttcaaaacataataatttaaatttctaataccttaggtaggtgtttgaaagtaacggtaagatatagtaattaaacaaagtataataattaaattaattatactttagtttaatatctaataagtactatttagatattaggtatagtaatattacacttctatgaatttttattataatgttcagcaacatagttagtaataaaaaaatatttaataatattaatatttaaaattaatagctaatttaattaacacttacttctgatggagttatggttgttgaaaagtaattgatatatcccaacaaattacattaattatattaattacttatggtcctttttctgtcttattccgtacacctaataaaaatggtctacatttaattatagggtaatttgcggtataaatacataaatttaatttttagttgcaaataaatacttaaatttaattttttgcgctaatgatatctaaattataattctgaaacttttgtaagtacctgacttctgagtgttaaaaatcttagttatatatataaatttaaagtgaaaggtagactataaacaaaatatatatatataggaactaggaagtaatataatttatataataatattgcagcaaatggagaggaaaaaacaaggtcgtgtaatggtggtaccatgtccagc

SEQ ID NO: 28061 - DNA, 4178 bp, Cannabis sativa
tatatgtatatattatatatattatatatgtatataatgtatatgtatatggatcatttcttaatgggtattacccatgaatgattactaaacaaatttaactacaaacattaatacactacacacacatatttatataaatacacatacacatatatatacacacatatatttatcaaatacacataaatatatatatttacacatatatatacatatataaattcacaaaaataaacacattcatacacacatatatacatagatattctaactacacataaaattaaactaaaattactatacacaaaattaaatctaaatttatatatacaaaatttaacccaaatttatacacaaataaaacttaaaataaataaaatataggttaccttgactgaaatcatgaaatgcgtgagtacaatcggaggcttgggcagcggttgccggggtgcagtggcacatcgtcttcggagtctggtgaaggttttttttaattattttttttttttttaaaaaaaaggaaaaaatagatgagaaagagaaatagatgatagtggagattacggtggtgaaaatgatggttcgggatggtgaaaatggtggttggggtcaagattagtgactgccggtagtggtttggaggggtcgcagagaaaaagaaagaagaagaaagagaaagagaagaagaaaatgggggtggggggttcaggctaaagttttattcaacctgaacttttgccgacgcacttagggtcgccgacaaaagtcgaaccccaaaaaatttaatgaaacgctgcatttcattaggtttaatacttttatcgacacatattagtgcgccggcaaaagtttccaccttaatttttgcacatgtttttcactgcgagggaatttgactgccaattttttcaccacttttgtcgacgcatttacgcgcaagcaaaagtgaaaagaaatttattacactttgtcggcgcatttacattcgccggcaaaagtggattcgaaccgccaaaagtttccaccttttggcctttggtttgctatcatttgacgacgactctatgttattttgccgacaaaagtacctattactggcgaattatgtcactggcaaaactgtgatctctaggccaaaatttgggcccacttttgctagcgaatgtactcagtttcaccgacaattgtgtacttttgccggggcaattattgaattgcgccaacaaaaatacatattcttgcagtgtaagcctccaatatccctaaatatctctcctcttcttccatattctttttctatctactccatgtccatgattcaatctatttgagtgtttatctcacatattgatctttttttatcttacatattcatttattactctcatacattcgttttttttttttcagaaaagtagaaaggcacaattttttttaaattttgatttttttacatgtgtgttgtgagaaagttgttttcttttttacacatagaataaaaaagttcgattttaaccaaccaaaccgtggttcacaaaaatagctagtttttaggaggaatttggattggtcggtcggttttcggattgcaccaatccaaatcaaaaactaaaatttggattttaacatgaaaaaaatccgactaaactgaccgatgttcagccctaaaaggaacaagagttagagatctaaacgaaaagagccataatattctcctgctaccaatataacgttttatataactttatatctgtttgattcattgttttaagaaattcatgtttagggtattagattataaaatgtaatcaaacatgtttattgttagtaaatctggacctgtaaaaataacttccaacagaatagttcataaatcatttttaatttattgaaaaattcaaaaatacaataacataaggtggtaaaaattttaaataaccaaagtaaagtaaaatgcttacaacaaatatccctacatgagtgattaaataaccctttgcataaatatttatgtgtatatatataagcctatgaaaaatgattaagcgaattgtaactactataggtataacgttgacacttaataagtgagagagctgacgatgaattaatatgcatgcaatgacgatatcaaatttttatgtggcgaattgggatcctttggatcaaaagaaaattaaagtatttagatttcgtgttgctaatttggcaacctacaagtggtccaactccaaatcacgcatctaacaaagtgatcatatatataattgaaaatattgaatatcacatggcttgacctcatctattgatatgatcattaataattaacaaaagcttcgtcatatataaatatatatatatatatatataccttatacctaatcacatgacacacataatataatgctacagctcttctaagcttgttcacttttcatgtaataataaatttatccatcccattctgtttgacccttaataattaaagctttacattatattaactaacaaaattcttttatctaatctacctttcctatatgcatatacgtatggcatgatatatcctaataattatggcatatgtaaatatgctatttagctcataataattagtgatagtggtagaacattcataataaaatatttattagtactgtattatgtatacatatagactacattaatataaaaagttccccactactgcattatatatattaaataattttcacatacatatacttagctatagcatttcttgttgatgtggtcatatatatgcactataacacttttatcttcaaccgaagtgagagtctacatagctacgtacacctacacacactcgagtactgattatcgatgaagttttcaaaattcccttgaaacaaagcaactccatgattggacttcaacacaccacacacggccttcattattaaagatattatttattgacttgatatttctttgattctttgactcaatatatataatatcagcaactttttttctgggctattattatccatcaataaggttatgacttttttttgccctctgttttactattgctgatcatctttattttaaattgtgacacatactgcccaaaccacgaaaagaattgtataaacaaatattgtccataattgattaagtttctcaaagtcaaacttattacccgacagatgtctacgttctgttttatccaagttttctgaagcacatcaataatcaaattcaattttcttcgtcaacttaataattataataactctgtcctctcacatcaataagtagtaatatactaatatattagattaatttgctcgtttttagtggagacattataaatataaacttcttttttttaaatatcccaatataatttatatctatatttactaataactaaaggatgaggttggaataattaattaagccaaaaggttcagctattttaatatagtttggtcaaaatattgacttaattatgaaccacggtggtccaactcaaattacattaatgtgataatcacaaataatcttataacattcaaagcaaaaaagctacttaatagttttttttttttttttgacgtaatatataactaagagcatggggtattaatgaacctaatagcatgatgttttctaattgattagcagttctttaatatttttattaaactaatataaataggttctgatacttttttttttctgggaaatatgagagaccaatatcaataccaagagaaaattggaactgtttctcgagtgtgaacgtcaaccttacacagggatcatgctaactttatctatattattttaattttattagatgttcggagactataggaccagatattaaattacaccaattataatattacacaaagatactagacaccaaacatttccattttataattggttggcttatagttttccaataacgtttctttaaaaaaagcactaacattatatatgtgagaggacaatcagagccaagtgcatggagacctctctcccaattttttttaatttttaataaaattatagggatccgattttgtcccgtgatatactttcacggaatgtatttcgtggtacattagatgggtctcggggtacattaaataagtgtcagggtacgtttctacttt

SEQ ID NO: 28062 - DNA, 1461 bp, Cannabis sativa
cttgtattacttcgaagaattaatttgatcacaagaagctggctaagtgagtttcttaataactctcaggaaaaagttacaattatttgacatcataagagctctctaaaaattatgattttatgcttgtgcaatggaatgactccactatttacagggaaaaaaaaatacaataattaggtttcacaaaattgataaaactaaaaaggaaaactagaaaggtttcctattttttcatgtcagtgcaagtcaatcccataaaattagggatttaatcaagacctaaatgccagaatatttaagggaagtatctctgaagatcttctcacgtcgaagtaccctgctcgaaagacttggcatttttagataatgaggatttgtgtgaacaaccacgtgcaaattttgtctggatgatttctcctgaaggtgtaaacttgacagttttaagtagaaagttctctggtcgggccattcagggaaaattattcgtctagacttctcgatgttctctacgtgtcaccatactggatgccacatcaccttgtgtagaatttaggataacacaactaaaagaagagtaggctctattatcacggggctgaaccttcataaattctttgtgtttttattacttattattattattttattagtaattgatcattcaactcaatcattttaaaaaataagtgttgttggctaaatgtgaggtcaataataatatttaaataattaaaaatatgtgtaccattcaaaagttgtcatgtgtacaactttgtaccaagtcatctattcaagttagcatttaacataatttttggataaaaaagtaaaaattaaaatagaatagtagtttggaggttttattaccaaacaatccaattgtgaggctaaatgtcataaaacctatatacaatatacttacatatatttatattatgttgagtgactatgacttggcttaatagtttgcaaatcattattttaacataaattttggtctagaaatttgatgaaaccaatgataataaattgtgggtttgaatggtaaaagggtaagatggtaaaagaggagaagagtaggaagcagcagcgtagtacacgggagcaataatttggaagtacgcacgacccgaccttctcagtttgtgttgtcctttctttgttgtgtttgaaagaaagttaaaatagatacacaaagtaagctcaattcacgagagactctctctctccactcactaattccaattatgtattacatttctctccaaaaccaaatgattctttctttctttcacttacatacaattaagctcaagtcaccatcttccttcttttcttcttggctaattattaatttttactttgaatttgagatgtacgaaatcgtattctctgaactttgtctaccattaaaatttctcccgaacagggacagaggcagaagttaagaataagggg

SEQ ID NO: 28063 - DNA, 3441 bp, Cannabis sativa
tatgttctcgattatttatcgacagattcttgataggttatcgacaagatattgttaaaaaaagtttatttttggttttttttagttagttcaataatatattatttgtgttgaaatacatttcattttgatgataatttcttttaatttatgtaagtttgattatcgacatattgtcgatggattttcgataggttctcgaaagtattaattcatgtttggtatgtgtttactgattatcgatgggttctcgacaggttctcgataggatttagtattttttatattagattgtactccgaattcccaactttttttaccttagtcacaaataatggcataaattctgtgtttgacattgttgccctcatctttaagaacgttcttagttggcgttctttcttaataacctctggcggaatcatttgtcccttcatatacaaggaataaatcttcaatttcaaatcatacgccaaaggatcaacctccaactcttcatataaaatctgacgcaattgttgtatggttgtgtcagttctaattgttaacgtcaaactgccttcaactttataaacccaattaaaaccctcaacacacaaaacaccaccgtacgatataacaagaaacacaatcgatcctgtaatttgaaacaacaaaatgttcgttagggaacagtaccaaaaaaatataaaaaaccaaaaatagagaaatttaatataatcgacaacctatcgacatctcatcgatatcccattaataagaagtgtcaggatttcgagtagtgagaaaaatcgacaaagtgtcgataatatatcgatataatgtcatgacattgaggcatttgagacactcaacaaaattgtcgacatatcgataaagattggcttcaagagcctatcaaaaatctattgaatagcattcaagaaaggtcatccctgaccttgaaacatcttcttcgagaatctttcgaaaacttatcgataaccattcgagaaaaataatgtcataacatgacattgaggtagttgagacactatatagaactatcgacatatcatcgatatcatatcgataaatattggcttcgaaaacctatcgaatagcattcgagaaaggtcatccctgaccttgcaacatctgcttcgagaactaatcgataaccagtcgagaaaaatacaaaacccaaaagactcatatcgataaatattggcttcaagagcctatcgaaaagcatttgagaaacgtcatccctgaccttagattatctacttcgagaagctttcgagaactaatcgataatctgtcgagaaaaatacaaaacccagaatactctgaaaaaataaatctcgcgattttgacaaaaattctacgaacaacaccatagatctaccgaaatatgctatactttgttaggattagttagttagttaggctcagttctttatcagttatttctgttataagtcggttgtacattagttgagcctatatatatgctcttgtcctcactttgtaaattcattcaatattgaataaagacatagattttctttcccttgttttctcttctaatatggtatcagatgcaaaattctgacctattcttctaagaacttcaatcaaacaaatcaacaatggtgcgcaccagagaaacttcttcagctaccatcaccgacgatgtccctgtgatcgatgctacaaatccaattgcccagtcaccatctcaacattctgtcggtaatcgtgcttcacaaccattacccacttcaagacctgctgtccaagatcgtcctgcttatgaaaacattcgaatcccttactaattaagcatggcagatcatccaggccttgctcttgcaactccggttcttaccgatcgaaatttccaaccatggaaagatatttcatgatctccattggtccaagaaataagtctccatttcttgatggaagtcttcctcaacccaactctgatgatgctcttcttagctcttggacccgctgcaaccagatggtcatgtcctggatcatgcattcgatttctcaagaaatcaagagtagcatcatgtacctagaaacggtcgctgctcagtggactgcattgaacaatctattcaatcaagggaatggccctcagatttccgagttaaatgaatctttaatctaccttcatcagggagatgactcattcatcacttatttcaccaaattaactgcaatctgggatgagattaacaagctacgcccaagaacaacctgcacttgtgctgcagcagcacaacaccaactccaaattgataatgatcaggttcttcaattccttactggtttaaatgaatcttatcatgctattagagcccaaatattaatatatgatccgtggccatccttaaataaagttatttccatgattgtgcatcaagaaagacaacgcacactaggtactcgaaacaatgtctctgttgctgctacaacttccacacccgctggaacctctgatgcagcagcaaatcttgcatccaaaagcaagaagatgcgtcccatgtgttctcattgttaaaaacctgggcacttcaaggataagtgttactttctccacggattccccccaggatatggcaatcgaaggccacctgatgcatccaatcgaaaatcagacaaatctcaggcacccaaacaaacaccactggcttctcaagtgtctggctctacctcagaaatcactacatcagaactcacaactgaccaatatcaacaattaatttcaatgttggcacaacaacttccctcagctgcttcaacttcaagtgacacccctgttgtcaccaatttttctagtaaaaatactaatttcccctctaatttttggattgtagatagtggagcaacccaccatgtttgctatgataaccgatgctttcaatcatttcacacacacacacacacacacacaacaattttgtcacattacctgatggcacacctatccaaattgctaaaataggtactgttatccttaaaagtaaaataacactcaccaatgttctctatgtggcccagttcaggtttaatttgctatctgttagtgcactcttaaaaacttattcctttaatatgtcttttactactaacaaatgctttatttaggggcattctccgacattcaggattgggattgctaacaaaatcaacaatctatactacatacaacaagaagcatgctctcgggaaaaactctttactttctgcaatgtttcatgtaataaaaatcattggcattctcgccttggacacccttctgtattgattaccaataaattcaataaaatgttccatttacctaaccattctcctcattttcattgtcaaacttgtcattatgcaaaacaaaaaaagctttcatttatttctcaaaataatatggctgccaacatttttgat

SEQ ID NO: 28064 - DNA, 3276 bp, Cannabis sativa
ccaaactatctgaaactctttaattccacaaataataaaatatttgtagactaaaataatccctccataaattaaaaacgctgaaaacgacaccgtctcattttcatttctttgatattatttatttttctcaaaaactggcttggcgaaatctactccacttgtaactttttcaggtttcttttaagagcctcaaaaattatcttaaaaatctctttttgataaatatgtgtggataagaatctccggtggattgtcacaacacaaacacatggcactaaactacaatattactactcccttcaacttcatactcctcttcctcctcatgcataactcgaccaccaaccatgcaactccatggctccttctaagctctactacgccacagtttaacaggtaccaagaaaatctcttctttttctatttttaaaggatggtgaaattttctttttcatgcattgatgttggtcaaagtgaaatctaggaacaacccagaagggatattgattgagttgagattacaattctgacctcaagtgattgtcagaagatgagtgttggggtgttatatgcattcttgttctgttaggcccttttttggttaaaaaatttgggcattatagtttatagctaagccatctggaatttgggaatggcttttttcaaggcttaaatatagaatttggtgaaataactaactttcagagctcaaacttctgtgaagatgaccttctgaagtgccaaatggcattctgttagtatcttcactgattatcctatagaaatttagattgattctaccatttttctttgtcaatatgtgtggtttttttagatatgaaaatggttgtgagagtttatatatatatctgtggttttgctaaaatacttggtaatgtatattgtgtgtcataaatcatcagcttgccaaaatgaactatattagtacattgagcttattcattgtttgtttgttccaactacaagtggcatgttcctaagttcatatgttctccacagggtccattatggagagtatatctctctagttatatctgcaaaaactgaatgttgggtgaacaagaattccctggtatggtcttttttactgaagaattctctgttgtggtctgccagccaaggtttgaagtttttcaagggaagaagttggttgactgagatttgggtgctggtggtaggaatagaaggaattctctgaaagggttagtgaattagcatggggagacaccaagatggaacaatcgcaagcaaggaactggctcaaacttctccagttatggtaagattacagaaactatcatatagttagttataacatactttttgcatatgtaaactagcttctactgtgtttcttcctttagctttgtttaattttgacataacttcaaatagtatgtttactggacactattattgtgtatctatatgctgccttttactaggcttgagcatttaattaatggtgttagattttgtcctatcaagatttcttagatacataataacatcattattgcatgcctagatgctgcaaatggttaaattctgatcacttcttaaatttttgtaggaaccaagtttgcacaagaaggaccaagtgcaagtgtttgcaaattctgtagattcacatgttcaatcacgctgcctcgtctgtttggggaacaacagttgccgaactgttcgttcaagaacaaaactaatgagtactttgattgaaaagagaaggcctcatgaagtccaatccattttcaacagtttaatagaagaaggacacaggccaactgtaataacatacacaacacttataggagcgttgacccgcctgaagcgattcaagtccattcctagaatcctttctagactcaaggaaaatgatataaagccagatataatacttttcaatgcaatgataaatgctttcatagaatctgggaaagtggatgaagccatgaaaatctttcagaaaatggagagtaatggatgtaggccaacaactagcactttcaacaccctgattaaaggatatagtattgctggtaagcctgaagaatctctaaaactgctagagattatgtcaaagtatggaaatgtaaaacccaatgacagaacctataatattattattagggcatggtgtaacaagaataatatagatgaagcatggaatgtggtgtataaaatggttgcatctggaatacaacctgatgttgtcacttataacaccttagcaagagcttatgctgagaatggggagacatttagagctgaaatgatgatcttggagatgcaaaaatacagggttcgccccaatgaacgaacgtgtggcatcataataaatggatattgtaaagaaggaaacatggaagatgccttgaattttatgtatagaatgaaggagcttggagtgcatccaaatcttgtaatattcaactctcttatcaaaggctttctggatgtttcagatacagatggaattgatgaggtcggtttcaaactcacactttttttttccttctctttatacttgtcactgagaacttaagacacaatcacttaatataagcatatataaaatgaacaggcattgtcattgatggaagaatttggggtcaaaccagatgttataacatttagcaccatcatgaacgcatggagctccgtagggtgcatggacaaatgccaagcaatcttcaacgacatggttaaggccggcatagaacctgacatccatgcattcagcattcttgcaaaaggatatgtacgtgctggtgagcctgggaaggccgagtcccttatgtctttgatgagcaaatctggcgtgcatccaaatgttgtaatcttcacgacaatgataagcggttggtgcaatgcaggcagaatggatcgtgccatgagagtttacgagaaaatgtgtgaaatggatatttctcccaatctgataacttttgagactctgatatggggatatggagaagcaaaacagccctggaaagcagaagaattgctccaagctatggaagagaagggcgttcgcccaggaaagaacactgtccggcttgttgctgaggcttggcgctctattggtttactcgctgaagcccaaagaatgctaaatgaagcagaagaaggcagggaacttgtgccgaaaaatccaagtgaagatgtacctatggagagtatggaagcaatttataagaagcaacgactgagggcttctggctctagtattttgcaggttcctggactggc

SEQ ID NO: 28065 - DNA, 1483 bp, Cannabis sativa
taattataatttttttttaaaaaaatatattgtagtaacatttataatatatcaaatataataattatattttctatgtaacaatttaataaattacgactaaccaatttatgatacatatatagctggctttattatataatatagcaattcttaaattgctttaaattctaatcattaagaaggctcctctagatttctcaaatagttaattggtatataaaatgtgctacaaaaaaataattataaatgcaatattgttggtcggctaatagctagcctagctatacccctcgtaatatagctgatttattacattaattaatatattaaaagaaataatatattttaatttttgaaaagtaaaactcaaattataatataattagcaattaaatttaaaacttggatatttaatttctttattttttttattattttgtggtaaaattttattatgtttttttttgtaaatttaagatgctagttggatatcaccgttaaatactaactaataaattattattgtattagttttaaagttttattactttcacatatatacaatgatatttaactgatgctttaaatttgtaaaaaaaataaatttaagaaagttttgccaccaaaaaaatataaaagttaagtggataaaaattaaaatataagagaattttatggctaattgggatgtctttgtctaatttttattagaagatctttagttgattgtcattgataggtgtgatctgttatatgtttattcaggatgaaaatttagtatacattattcacattcttttgacgcttcacaactggcaacttatgagtattttagttgaattaaaaatattattcggttatttttcttccgatttatttgtaaataacttagttaatttattattgttaattttactcgataaacaatatatgcatgtaataaattatgttcaatttacatattaataaaaaaaattcatctaccttcaaaaaaaaaaaaatagtaagataacaaataataaaagaaaaagaaaatccaacaaattttgatatggcattgtgaatctcactttagataattatgattgggtataaatttggtgaaaataacaaattgacggcatcaaatcaatatatttattaaagaattttcaaagttgtttatattgtggccaaaaagtcatgcaataatggatttaattttgcaccccacaagtttgacaaaaaagtatccttaaatagtctaagaattaatgacaatctaaccaacactccttacattataaagtatatatatatatatattttaaaatttttattttaagtttgataagaaatcattaattaaaacccatttctttgttgttattattggtgtccttaattattctacaaaaattatgtgataattatataaggtactattttttttttgtaaaaaaattacatttttacgtttatataatttttttttttttgt

SEQ ID NO: 28066 - DNA, 1871 bp, Cannabis sativa
aaggagtagtcgagaaggcgtccgaaaacaataagtgcccgagaaccatcctctgtggcacactcccggcaagaattttaatgaatcaggcagcttgtcccatatgtcagaccttggaaaggcacgcaataaaaagaagatcatctttttcggccgacccccacttctatgacattccctcaacatactcacggctcatgccccaactgtcactgtcagtcgtgtacctccgcatacgaacgccgattgtccccaactatgggccttaccaaattggcccaaagtaaatatcttaatgtattttaccccatcaatgggctttttcagtttacaaactctaatgggtttgggtcagctcgacccatttgtcaataagcctatagatatggtattttcccttcaagcaaaggcttagaaatttttggcaaggcttgtaagaaaaatactctctagcttcaaattaagctaataatattgactcgcggactaaagtttattaacactccaatcacgtaaaaattttatcttgccatcttttatcttattttctataacttaatcatttctgaaaaactctgtaaatagtaaccttcatcatggttatagctggttatacaatgttagataatttttatttttttttatgaaacgaaccaaaactgaccaaatttcactattaccatggacatcgtccccgggcgcccaacacgagacctccccctccctatatcctccacctgctgcttttagctcacactttgcccctcagctcatagctcctaagttcctaacccctggtcttgaccaagatttagaccctggctctggcatgagaccctagtccctaactcccaattaaaacctagcccctagatcccaacccgaattcgactttcagcccgaccctcggcctttgagccttacacaagaggcctcatcaaccttctctaacctcactttctcactcctcacttaaataaaaaaaaattacaacacttttttatttttaaaataagaaaacaacaatagttatgaaaacactttttattttacaaaaataaaatttgtattttcataaagttgtttaatagtcttcaccaatagttaatagtctctactctttaccattgagctttagtttttgttggggaataaaatagtaggattgttcaattcattaaattgctcccaccagacgaaaacttataaaatcacacatctccaacctaactataaaatagacacgacaattattttttattttttttttaaaatgacttttttcaatatctataacagtataactttttaaatatagttttgatcatttgtaataatataacaatatgaaaatattatattttattagataatttattttcctttttgtataattttgagagttatcagtggaatgaaaaaaaaaatgacgataaaactacattatttttgtgttgaaccaacataatttgaaggtttatggttggagttggagttcctcttgctctttttggattaaaatattttgttatcatgttaagatattatcatatcacattttactatgcatttatataaataccaacaaattatgtaagtttgaaatacaccataaactataaaggcataaattttttcctttcattttgacgatatagtgttacaaatattaattgctccataaattgattgggtatatttttctttaatatgcttccacttatacatttataaaggaaaaaagaaagataaattcaaaagtacaatatagtttaggggcttttttatttttacacttcaaaataattttttttgcatttttacgaaattctacttagatcccttttgcaactagcgatgcaagcgaaatt

SEQ ID NO: 28067 - DNA, 1520 bp, Cannabis sativa
cttttccacgaaagacaaattatggtgaattactattttaccccttgacttcaccaagaaggaaacttaccatcaaagggcatttttgtcaaacttgcaatcctaaatattcttgatattctcaatgtctatctaaatcgccttgctatttttaatgtactaaaccataagagaaagtgactctaccggccaaccgtggcgttccactgctatcgggcataaaatacagaaaacacaaaattttatatatacatcatgaataacacactcaaattcaaatatatctccataaattcataaattataattaaaggtctaattttgaattaaaccctaattgtctgctaattctcatactaaaattaagcggcatttacaaatatgtacacatatccccacacaaaaataattattaaaacccaaaataattgataaaatatgtttaaagcaataaatagtgttctatacatgtaagacataaataatgtattttaaaaaaaactttaaaatgaaggagtttagagcatctgctgcagcgtgtttttagtacggtatcttaaaatttttaaagtatctctattttagagaagctattgtgagtgctctaatgtaaagtagtacatttgggttggggtttttgggatggcacgaaattggcatgagcacgtgtgacgcgagtacgacacgacacgtaaaaatatgtgcttggacccagcacgacacgaataaatatgggcccaaacatgacatgaaaaatatggacatgagcacgacaagacaggacaagtacgaaattacaacacaaaattacaagtttttagcacaaaaacacgacatgtaagcacgaaataaaacatgaattaaaattcataaagtaattttatttgaaaatttatctactcttttgtataaaaatactttacttaaatattttaagactatacatattttctaaagttaaattatgttaatatatatgatatatatttttaacatattctttcctagagaagattctaaattatgttggcacattttatgaatcagcgacaataatatgcacattttgatatattgaatttttttttttttttgctaaagagattctgttgaatattattaacagctttgtgtgaaaatttattaatggactatcattatagtgatattattttggctattaaacatgtaattgtagttatagtttttttttttttttttttgtgattttaaaactcattttaattgaaacaatttatttacgctttaaaattagaaattaatttgaaaagtataaaaatgataattttctatagacccgtttaagagtcatttgataagtatgggtcaactattttataaaaaaagagttggcgtgtttaggcctaacacaaatctgacctaatataaataatatgtgtttgtaagtccgacctacaaattttatcaatctcttttatagtactttgaggaagtatttgatacaatgtttagaagctatattttagaatagagttaag

SEQ ID NO: 28068 - DNA, 2308 bp, Cannabis sativa
gatatgagataatggatcctcctttcctgtgtacatcttcatagtgggcatcttgaacctggtcgaaagatcgagggaatcaatctgaggcgacaatggtgaacttcttgtatgatcgagctccagatcaatgaatttttggtcggtcaagccttaatgaggctcttaagttgattcaattgggcttccacccctagatcaactgaacctgcctgttgaccgatctgtgtcacctgttgacccctggagcttcaaagggtacgaagttatccatattttatagaatgtaattctccacatttattggttaattgttggtttaagggacaaagtttctgttctgatttcctctcctacaattctaatcatcccaaagatcagttttgggccccatctgttggaaaactgagtatcccggagctcttctgtggggttggctcatagaccaagctagcttaggtggattgttatcattcagagaattttcttgattttttccatgagtacgacgattatcacaacgacaatttttgtgtggtccactataaacttcgtcatcattcttgcttgtgtacgactttctactatcagaccttgtttggccttgctgaggatgttggacggtatattgagactatctacagacttggaccagtgcatcttggtaatatatacctacctaccctcgagatcctctagctggccgaggtgcatcatccttcctcccttcatcctggtgacggaagttgggttgatcatcctttccaaggtagttaccagacaagacttggtcgtctatcgggttgccaatagtttgattttagggcctggaattggaaggtttgtcaaaccgaggtgattgcacataattgggtcagtgttcctctagacagtactcttgtcctccagtggggatgtaaggtgcttttccccgattgagatctcttctaagtggagggttctctagtacctgctccctatctgttgggtgaaccgcatgatcaggtcagttgcctcccttgaatagcggtttatttcttcttgctgggctcacataaattgagcctgacagtccattctctcctagaatacacgtcgttgctacttgaatgcatgattcacatgagcatgtgtttcctcttggttatggtggagtgtattggtatatgtttggacttgtcctaatgcatccttcaggttctctagatcagagttttctcttaaatcaactcggggttctcctacagagggttgaccagtgtccgacccagtttccccaacgtatgcctagctggtattcccaacctcttggacatcaggcatgaccctagtaaagggtgttgtaatctcaatagccctggcattaacattggcatgaaatgtgtgagggttgccttgtgatggcagtcccccatatgggttgtcaacccctaagtcagtgggagcttggacattaggatctattgccattggattgtgtgcctctgttgatgaggatctccttatcaaaaccattatcagccaaatcaaagatgtagactgataagagcaacattgaatcgagctccaaataaaagcactaaaatattgaccttggttttagccaactacacaaactctttaaagcaatgataatgattgatcaaataataaaataaaacaataagaacatacaagatttatagaggttcgaccattgataatagtaatagcgtacttctctttttgttgtattacttatacagaattatcaagatcacaaggtccgaccaggtgagtttcttaataatctcgagaaagcttacaattattatttgcaaagtaactgctctttgagaatgcgaagaaaaggccccctaaatagtgatatggcctcactatttatagggcaagtacattacaactatcacgagttaataggagaaaaattagggaaacttaaatattaaatcccatgatcttcttaatcatataaaatcaatctcacaaagatatagattctaaatagactataattatggagatatttagagaaaatatctttgagaatctttactcgttacatgctttcatctggagaatggcactcactcggcgtgcccaaatatatacgacacgtgtcacctagccaagtacttgttgtggtaattttcaacactcaagtatacatatcgttgacaagttatatactcacagagagtgaggtcgatcccccaaagattgtagttaagtactttaaaattaaattcttacttctatttggctatataaaattttgagagaaaataaaaataaaaaaaataagaaa

SEQ ID NO: 28069 - DNA, 1397 bp, Cannabis sativa
gactgcccccctcgctacaatgtgggtccgcccctggatatatatatatatatatatatatatatacccaatggaagcatttatatccaaaatcttggtggtggagaaatgaatgtgattgttgaggtgcaatgagagcctgataaatcgaagtgttgtaatactaatttttgtcatctgtacaaagtacaaactaacatgttattataccattgttcttaaaaatggagtggtccattcgaactgtttacaaagagatcattcaccctttgaggatactacgatgaatgatagaattatatatatatatgtatgtataatgtcctatacatctcatacagaaaagattgatgggtttttcattttgcaaggagaactccattaccacctatataataaaaaacagagacaattggagacactcaaaaatgacagaaagtaatggttaaaaatgttgttgaagagaaagaaacttggttaatagaatctttgctgtaaataagcctttaattagtaatagtgttgtccactttctgtaaggacttccaaatgggaaattgaaattcatttatcagatatacttcctaaattcataacgacgttaagaagttgacgtgtgccttagaggatgtagctaagatgttgacgatagagttgagaaatagagagagagaaagagagcgagatttttgttaggatgagtccttcgggggactagtaacaaattcaaatatgatttaggaagctgtatatatttcttaataaaaatactattgggcactagtagtatattatatatttttgtatgcatgttatattgatacatcacttgtccaaatttaaaaagattaaaacctttaaagaatataataatctcataatatgatttatattttcagagatttcagttgtatatattggatatatgctagtgtatatttctttaagttccagacttaaagatattataggtgtagcaaaatgacacataaatcacaatatcacatacaaacatgacacacccttatgtggcaggtcacttgtttaaatgtgtgttgtatttataaaaaaaagatctatattatttttaaaataaaagtaatatttttgaatggaaatcgtaaaggtgatataaaatagaaaaattgattatttatgaaaacttaagaaaaatgaaaatccaaagcccaatatggttggttagtggcccaaatcagtagaagaatctgatcttggagccttaaaccctactaaagtcctacttttgttatgtgaaaggaaaatcactaaacccagaaaacaaaaagcttcttcttcttcttcttcttcttctctctctactgtctcgatcgctcacaccatttccgacctccactaatcagtgggctcatgtatcg

SEQ ID NO: 28070 - DNA, 2036 bp, Cannabis sativa
  modified_base (1955)..(1956): a, c, t, g, unknown or other
aatataatttcttactatgaaggagatggaatagaggatagtattatgagcagcacaagagaaagttggactctgtgcaatactttgatgatcactccaaacgacatgcgttttatccattccttctcctttcattattatgaatggcttattacctggaattactatcttctccctgcatttatataaatcattttatatttaataaaacaaaaatcaaactaaaatttaacaacaacataaatttaatctttctttctcgagttttttcctattagattttactcttgaaacttttaacgaaaccatctttaataaattttctcctacaataaatatataatgtatggtgtaatgtaaagcatataacaattcgattcataataactattgaaaatctctttctcgagttttttcttattgaattttgctcgtgcaaaatttaaaaaggctatctctaacaaatttttttcttacaataaatataaataatctctctcgtgtaatgtactaaaacatttagtagttcggttaataataattattgaaaatcgctcttgaaagttttgacgagacaatttctaataaattttctcctacaataaatttaaagaacttgatagatggtgtaaatttttctttcgacttttcttattgaattttgctcttgaaagttttatcgagaccatctctaataaattttctctcactacaataatatttgtaaatatatatttatataatatactcattaaaaaatgaaaaggatgaagaaaatatttaccaataaattccagccttgatgttgatataaaaccaataagcattgtttgaagggactgaatcaatggcagattgtatagttttgaaatttccatgaccagattggtcaactgtcactgattggaaattacctccatttgcaaactttaataaaaatattgaacaactcaaaaacaaaaattgaaaaaaatacaacataattttattttaattttctactaaaccttttttggctagaagaaaactatttttactattattattatatcgaataatggtgttttcagagaaatttataatggacataataaattaattggagggaactattgattatttcctttccaatttcatattaatttagtaaaaagaaggaaagatatgtatataaatattttgattgatatatgtacatattatgatatattatacattatatacaattactaatatggaagtttagtaaataccattacaacatatttcaagaatataagaaacgtttttttttttaagaaaatatatttggctataattaataaataattagaaatcttccatttaaaagtggataatttgggaaatttaaaataaagaaggaaataataaaaaacaatagtagtaatctgtgcaaaaattaattttctgaaaacggaaacttattataattgggaaactaattatagtttcttgtaaattataatcgtgacaaatattcatgagaaatataaatatacataataataaagaatgaaaacatacttaccttcatgaaatttgctcagtagtggagattgagatacaatggaacatgtccttattaattaattatatgagcattgttaggagagaacaaggtatttaatattattataaagtcacgtcctataattagttagtaatttttataattttaattaaaataaagtaagtgaaattcgattttaaattacacaaataacaatattacacctaacaaaaatactaaataaatactatatattacgcataaaatattgataagctttcactgttttagaatatctccaatatgatatttttatttttagccaagttttaacgaaaaaaaactaaaaaattagaaatagaatcattttattatttatgctctctattttatttagtacttaattattttaataatattttannatttaaatttgttaaatataaattaatttaatttgaaagagtttatagtcttgcaaatctattttgcttgggcatatgct

SEQ ID NO: 28071 - DNA, 2950 bp, Cannabis sativa
aaagattaaaggaacatttacatattaaaacgtaaagaagaaatctctagtcatatgatattgtccaaacatttttgtcacttaaacttgcaagaaaataacagttgaaggaaaaaaaaaacaatacatgcagtcagtgctgctgattgctttctagtaaaagttggctatcaaagttttgactcccccactcttgcctttctttgttttcattcacaattaaagaacaacacaagagatctcaatgtctcaaactatttttggcattaagaaaaagtgtgctccgttggagcatcagttatcgaaaaaaaaaaagaaagttcatacaaagtaacttcatttactttttagccgaagaaaaaaaaaagtaacttcatttccctgtctactataggctatatagctttacagaaaaccatcaaattctttcatttcttggaacaagatcagaagtagcaatggtatgaaaaacaccacggctgacttttttgcccctgcaacttcagtgtctagcttgtgtatatatccatggaattatgtttcagacagcagctgttcaagctccaggtcaaagttatcgccattttgaagcaatagttgttgctcctgttcatcatggtcttccggatgttgttgaagtatccctgtttgctggcgaaattgttccttctggacatcccattctccagtaattttctcaactatatttccaactgacttttcatcttctgcaatgtgctctatgttgcgaatgtccacgacctcactggcctctgtgataatatcatatcattccaaaaaaaaaaagagccagtgagcaagacagggtcagcaggacaggataaatttatgaaagaactccatgaaacaggtagcaggcactgagcgtgcagcatacgttcggtttattcaatatgccattaaagaatttcaagaaatactttggttgttgtatagctgctaaatcactagaggaaaacataccgctaatagctagcttcttagcttctgcgtattctgtagacattttattgagcacatttacatcaacttccttaccctgtcaatatagatagttgccacaagattgaatatcataagcaaatcaatcaaagatattatcataacaattaatttcagatattctaggtttacatctaaatcctataaactctctcaaactccctgaatcaacattggtcacttgaaagaaaaaaaaaagaaacccttacaagttacaatgttgccacaaaaatataaaaaaaaaaaaaaagaaaaaaaatggtcactagaatgaaaaatattccttccaagaagcgagaaaatgattgatgctagtttagaaagtcattagtgtacataccatgtccaaatggagtaagtcttgaagcctattatcagcaaataacctgtcagtaaaataaaaggaacagagaaattagaagacacgaagatatgaaataccgtcaccagcatgtgaatgttagagctaaagagtaagataatctgcaacataacatactccctgtatgcaacttgaacacgagcattctgtaattctgtgaggtggttaaccgtctctgcaacaggcccttcattcatgtcaagaaacccaaagaagaacatgttcttttctagcatttttttcaccacagaaggagcaacctttacaccattttctttggcagtaacaacaaggttcctaagttttttcagctcttctgtcaaggataagaaaagtagtaagtttcgccgacaaaaaaaaaaatggttccaaaagaatggccaaggtcccatgtatcatgtacttggcagtggtgttgtctgagtataaacgtggcaacgatactctaattgattgattgtttacatactgtcagtccaacaccagcttagcaatgagcttagattttcctgtaaatctatagaataaaatagggcaattatacaatttctggaaacaatgttcttgtagatgcagaagaatgatgttttacctacaatgcttgttgtttgtgaatacttatgaaaacttttagatctttataaacttgatcttgctattcaaggtttacattacatctatgtgatggctactccaggctacatatttctgatatagtggatttcaagattagggtggaggcttgattggactttaaatatttgaaacaatttcggctggactatcttttcatgtgtttatgccatgtaatatggaatagaagttcagaaaatatcacaaaaattgagcagtctatatttttcattttaaatttgtgtctgatcagttgatgtaaatgtcaaccttgaataacaagatcaagttatgaagatctaaaagttttcataaggattcacaaacaacaagcattgtaggtaaaacatcattcttctgcatctacaagaacattgttttcagatattgtataattgccctattttattctatagatttacaggaaaatctaagctcattgctaagctggtgttggactgacagtatgtaaacaatcgaatcaattagagtatcattgtcacgtttatactcagacaacacctgccaagttcatttttttccccaagataatcaaactaaagtgtattacccagccaaatcttgatatactagttgggactaaggttttattcgaaaaataaaaatgctaatgtgctattgaacaacaagcttcaagggagaaaaaaatcagataaatttgtttggaaagaaagaaagaaacaaccttaccaagcgaaagataaattttgaaaggaggtttgaaaggttgagtctcgtgaaggcagtaaagacaatagagccccccaagtctcctcgataaagaacttgtactgcttatataacctgcacataagcttattagagttattctttttgttcttagtaattcttgaaacaagaaattgtaagcaaaaggaacatgttattaaa

SEQ ID NO: 28072 - DNA, 1496 bp, Cannabis sativa
aaaacttacattgtaccctactcaggcaatccgacaacagggacaatttcaaatggctccactatagaaaaccttattttgttccttcgagttttaaaatctagcatagacaaataatacggcaggataacagagaaaggcttcaagcctccttcgtagctttatcaaacttacttgttttgagggagttgtacagaaagatgcagtgctcagatacattcaagctgtaatgaccgtaatttattatatggattagcaagggcaattagcattaattattagtatttttatagttattcatgaatttatttaattgtgggtcctattattagaaatgggcattagagttataatttcttaatttcaaagattttatgaaactctaggagtaatgtatattatatatgaattatgttattttacaatttgtgctcggggacaacagaaatgcgatggatggctattttaatcacatgggtaagtctagaaccttattttttagtgggatgtctattaaagaaaatagaatatcgagtttgagcggggttacagtttttgaccattttacccctaggcttgaatttgcttacgttataagctagaagggtatttggtaatttagaggaggctttggtggctgcatgagagagtggcagctggccatttagtttgttttcagccaaaggaattaagattaattaactaatttattcatttaggaaaaaaggaaaagaaattagaaaactcacttccttttctctttcttccttgctcgaccaccacatgaccagcttgcttgggattgttttctagtgtaattgaaggagagctagctgaattcaagtaggttttaggcaaaggtaaccctagaattcttaatctcttgtttttgaagctttgattttggttgaatatgcaattttgaaatatagggggtgttagtattaggttgtgttataattcgatttctaagttaaaattgagttgattttaagttcttgctgctgtatttgatgattgttgtggtggatgaccaagtttgagtttgaaaactcaaacttgggtcatcaatggcatgttttgtttcagagagtttttttgggtttattgcttggaatatattatgtaagcttattataggtgtttggaaggtttggtagcatttggacatattttgagcaagttatgcattatttggggaaacctggtgcaaaccggttaaccagtttgctaggacctgtaaaaccagttaaccagttttggcagattcttcaaacaactcatttcctcgattcgtgtccatcgcagtgcctcatttgggtgatttcctgtttcctagggtattgtggttccatttagtaataacagaaccttaagttggaggttcgggtttgcctgattagggttttaacgtgtgatttacccagttatgttatgtgattacggcatccatccagcacgagacttttcgatcaggttagccaactcacttgaat

SEQ ID NO: 28073 - DNA, 2129 bp, Cannabis sativa
tgttttgtcattttgtttgaccgtgtatcacatgggaaaatagtgaaaattggaatatgtgtttgtggggtataattttgttagtcttgagggtactgaatgaaacaaacagtatttttctagtttgtttattccaaagttgatcttcatattttctatttgatactgatttgcttgaagaagaaaatgaagacatgatgctcactaaaattttgggataaatgaacaacacaaagaaagcaatttttttttttagaaataaataagttgcagaataatagaaagaaattagggtttggagcatgaagaatgaagaagatgatgaaaaaggcaccacttatatgtcaagggtattaataatttcaacaaccatcagttttctcacctacatagaaactagtattgaaatcgttaatattttagacagaaccaaacagaaggaggacttctcattgtttatcatagatcgggggggatttttgccaaacaaaaaaattcggagggtatgagtctacacccgtaatagttaagggggcaaaaaagcattttgtcctcaaatttaagttatgacattttgtttgtgtaagttatgaccttccaactatgttggcatctccttatataaaagtgacaacttattaggtcattatagtaatttgagaataattattaaattaaaattaatgaaattcaatgattaattatattgatattttagcatggtgctaaatattcaaataatggagatgatgagatgggatgtttcaacacttaaagttgaagggatattttgctttctataattacaagttatatgttagaggttgcatttataacgaaattaaatatatattcaaaatgagaaaaataaatgaaaataaaaatcatagaaattagatattttcatttctttgggttgagactagatattttgacaaaattggtatttttcttttttgtttgtttgtttgcttggtttggaaactcaaaaaggaattgatacaggagcttagcttaggttcttttgtatttgtggtactcaaattgccaagattcaccaactttgcacacactaattattgtcttctttcccatagctatttattttaatgcaataatttatatatatatttttttttgagaaaataatttatatatatatatgtatatacagtaatattatttgtatgaaataatgatatagattaaatgagatgtgacttaacaaaatatgacaagattaaatgaagtttaacttaatcaaattttgtaacattttaaggagtgtataaaatttagttatagatttataggtattaagaatattataaaaagatgttacacattttaattttaaattcttaatgctattaagtttattatcaattaacatatgttttaaatactcatttgtactataaaaaactttacttttaattccaacaaaaaatcggtcgctaaaaatattagtcacaaaaatctaaatttattgtgacaaaatttatttttagtcacaatttttttttttttttttttatgaaaaccaacttttattgaaaccaaaaaggccctaaagagcaaagtttacgtgccacttccctacctaaaaattccttaaaacaaccattagaatcagcccatgcaactaagttatgtgctctaatattgaaccttcgggaaatccaacaaagccgcacccccggaagcctagaaagggtgttgagagttgcgtaaaaaaatccctcgagccatccacgttggagactcaccagccaaagaccatgtcccaccaattgacagtctgaaaaaatggagactcgcgaccatccttgctgcaaaattctacaacactcctgctgaatcactaatttcgcttcaaaggaggatgtaaccatcatcttaacaacctccaccaccgaacccgaactatcccaaatcacaacagcaaacaccctaaagttactctgaaaggctgcatagacgaaaatattatgatcactccatggtaaatttcggaaaaagttcatctcactaatctctggatgcacagtaattgctgtgactaaattatattagtgacaatttgtatttaaattttatgttttagtcacaagtaattctttgtaaag

SEQ ID NO: 28074 - DNA, 1382 bp, Cannabis sativa
  modified_base (92)..(93): a, c, t, g, unknown or other
taagtgccacagtggactgtccattgcacacacttctacacatggcaaatttttagtggtccacgtaatattaattttaaaaaaataattannaatatttaaaaaaaattaaaaaatgagatttttttttcttttttactttttttttaatttaaaaaaattaaaaaattaatttttttttacttttttctttttttcttcttcttctttcttcttctgcttggggatttagttaagttttggaaccgagactcataaggggtgactttgattgtaaaactgtaaaactgcccctaaaatctagttttttgtgtaaaatctcctaataaaaagtaacaaaaggagcacatttctacaactgtataatattgaggaatatttttcttatattataagagacatcatttagtagtgtcataaattcataggtaaaaatgttattatatatttttttaaaagaatgtatttctaatttaaaatatataattcgacaagtaatattggtatattttagtgtttttagatctttaataattatagtcttgagtttttcatcatatatattattgttattgaaatacaatatatttatataatttttaaaaacttattaataatttatagtgtcaccaatagcttggaattaacttcttaaaattttttgaaagctcaaacccaacaccatgtcgtctgtatttgataaagtattttttttttttaaagaaaaaaccagatgtaaaagagtgcaccaatatcaaatatacaatatatcttttctgtattgttaatggtccatttaactttcttatactatgaggtaaagataaaagagatcactttagatttctccaatatatatatatatatatatatatattatttcttgaagatgagattgtattaaatttggatcatatatatattatttcttgaagatgatagattgtattaaatttggatcatagatatatatatatatattatttgttgaagatgatagatcatattatttttttctgtcatggtttaagattttattttatttgaggttaattagagagtctcataggttgaaatgatgggagaggaagaagaagccggtggagtttgaggaggaacttgtgaaagaggcagatcactataatggatttatatgttcaaagagcatgatttatgtgatcaataggccaaattacgattaaaagtatgtgaccaatgtgtcttgcctccaattcatgtgttgtacagatacaatgtgttgataattaaatttgtggtgagatcggttctattttatttatgttctaatataattgaaattgattcttttttatttttttaattcaaattaattttttgagttattgtgtattatttatttt

SEQ ID NO: 28075 - DNA, 2498 bp, Cannabis sativa
  modified_base (879)..(879): a, c, t, g, unknown or other
tagaagatcttttcagtgtggtgcgagtgcaattttaacgagttaagtgccctcacccgcgttataattttttttaaagcagaaaagttcgtagaactggccatgtatctcaagaaatggctgggactttctcagtatcttatgggtcatgtcgctacatgaatattaagttacggagaaacacccaccattgcgagaatctagtcagctccaacaatgaataaaatgcgagaaaaatgaaaactcaccgtatgtcttaagaaatggctgggtgtttcacaatatcccaaggggaatgcaatgattacgtgcacattaagttaatgtgacacacccaccatttcgagaactcaagtagttttcataacaaacatacatataacctaaaacctaaaaaaaggcctaagggttaagaaactctagaaaacaaggtcaaaaagtttagctattggttagataaagttattttgtgcattcgaatattcgaaggaaaacttgcgggtattcaagtttttcttcttaaaactcacaaatattcgagatgttcttcatgaaactcgtgagtatttaagttttaggcatgtattttccaaaaaaatatagtaatttgcctaaactaagaaaaacaaatagtaaatcctattgtttcatgcattttctacccctaaaaacacagaacgcatgtagattgtcaagaaaaagaaaacggttacagagaagataaaatcactaaccttgaaatgcaattcttcctggatgaatttgttagtggtgaaacttcagaatcattctcacttgaaaggaattcaaaaaatttcagagaaattttgaggatttgatattctgaataatggaaggggagagacgaaaatgagaggnaaatgagtaaggattattttgtatcaaggggtttaaataatggtatcccttatttattgggatggagacacatggcaaagaaatgcctaaggtctctcaatctaacgattaccagttaacacgcctgcacgtaccctgaagggtcctgatgacatggcaccttaaaggaataaaataataattacaaccgtctttttgaaaccctcgacaagacaaccaagggtcaccatctcgtgacaaccactcgcctgcctccctctcatagtttccctcatggcatggctctcaattgcgagactaagggcatgtgttatagtgtgaatttttcacctagaaaactcgagatcaacctctcataagaatgacccatggactcacatccctcgagggttgctgagctgtcagaagagaacctctcgagaataaacctcgcctgaaccaagttcagcgagatgtgacagagtctagtcgcattattatgccttgcatgatgtaggaccaagaaggacgtgttcaagtctcgcatatagcaagatatatgcgatatatatgaagtcttctcctacgatctagtaaagattgactctttacttagtgagttgatccgaatgacctaacgtgctcgatgacccgataaggactctcacgtcctgagttgtcgatgccaacaaggtatccatatgcgcgactcaattaggacgcatataccttaatacgagactcattaatcttgtgttaacaagaacacaccctaagcttgcgagtttgtgcgagtatataaactgacaactcgcactatgaaagtcgcgtacgttgttgtatttagtaaaacaaattgaaactatttttcatttatttcattcacattttcttttatttaatgttgatattcaatgtaaaacggttcaataattaaactttgtgtaatcaaagggacacttgctttgtatataaaagagtgatccaatatgaatatgaacaagacagaaatccttgtaacagtggactaaacagaccgtgatctgactaaaccactatacttttttgtgctcattgtgtttatcaatttttctagtttgtctgtgtggtctcatttgaatactcgtcattctaagttgagtactcatgcctttaatttaatatttatatttttatttctatttagtattgtcaaaattccttcaacaacaactataaacccactacccaaaatagttttctaataaagagttgatgaaaaaattaatttgcggtgtaaatttatttaataaaaaaaattatatatggtatttgaatataacaaaaatatgacaaaaaatacaattgaaaaggtaaaattgatctagtcccataaaaaatgggcaaattaaaaacaacaatagtttttaaataatattttaaattagcatgtaaattatgtaaattattttttttcaaactaaacagcaaatgcaatttttgtaatttctcaaacttcaatcgcactgtgagattttaaaaccttaaaaaccacaccgcaaaaatagtgtgatgtagtgcgatttgaacaatacactatcactatcattgaacattataataaaaatttaaaaatgaatctataaatttttaacaataca

SEQ ID NO: 28076 - DNA, 1448 bp, Cannabis sativa
tttttttttgaatattctcttttgtcttctcctcgtctctcttcacttaatttcattattcaaatattctatctttttcttttaaagtctacatcaaaagatgttacatcatgatgcatataaacgtatacatggcataattaaaaattgtatccatgccttcataattcaaacataagtttaataatctaccacaaaaaatacaatcaagcacatatgaattactcttctttttagaaaaaaaataacaaattcaaaagtaacaaaaacttatgaaaaactaattaccagcagtacctccacaattaacggaactgacagatataattgcgttaggaggtaaaacattttgcctctggaacgtgtctacacggtgaggcgcccactcatccttctgctcctgatgtccattgtccaagtccgaaatcgtataaaaatccaaacaagagaaaataagagttttgacactttggtctaatttaaataatatatttttcaaaaaatggtcttcaatactctaacaacaaataattatcagaataagcctaattttaattatatattattcaaaaaattgatgtagaaaaaataaagcgtaataataaactgaaatatttaccctatgtatcgttgaagagaagctgatgacagaattaaatgagagctacgtcggagcagagagcttcaaaccaccactgttacgtcagaccagagagctttaaaccaccaccgtgaggaagaggaagatcgaaagggaaagggacttgagtggccggtttcaaagaagacgatcggaacggtcaagaggcttgtttaaaaatcgatgatcaagaggctagttttggagagtagtggctggattcgaatgggtcaagggctggttttgccagagcattcaagagttttagggctgaatgtgtatgaacagtaagcgcgcgtctgattatgttttaaagattttaatgtttatgcgtcagttgctatctctgactatttcattttgcatcatttttaaaacctcactaacacaatagtcgagtgttaataacaaacacaaaatggaaagcaattatttacattctcagctttattcttgtcggtttattttttactatcatttaattaaataacgcaaataacatattattagtgtcatttttaaagagtgagtccaattatttgggtactattcatgtcggtcaacgctatgaacagtagcgttgaccaacatgaatagtgtaatttatagtagtgaagtgtaggtcttcgggagaaaatatttctaagtctcatttcgggagaaagtgagcatatatctttgggagaaaatttgtcaaaaacattacttttgggaggaagcgagcacgcatcaataactgaaggtaggggtgttcaacaaaatttataaaccgctcaaaccaaactgaataaatcgacaaaaaatacaa

SEQ ID NO: 28077 - DNA, 2221 bp, Cannabis sativa
taaaataatttccaacaaacctaggcgcagggctagggtcccctcccaagtttactgctacgactcagttctactcaatttcgtgacgtatcctttatgccacgtgtcaaacattgatgtccacgtcactagagaaaatttttaagttaacataaaccgtcacatattatctttcataggcgacggttttaaaccgtcacatgtagtataataacccattttttcattattttaaaatttttattatataatcgtttatattataatcataatcgtcaaacaaatcaagtataaatataaatttattaataacacaaatataattacaatatatagtgtactagtttaggtttacaaaattttatacttaattccaattctattatcatcaactatgaagcaaaattttttttacaaaatgaaatacactctttaaatcttaagatttcaacttcaaatatcgtctagtattgctcgaaaggaagagctaacaatagacctgcatattctaaaaaataattgatgaacaagcacgttaaacttgtaaagaataatctaccatacacgttaacaaaaaaaattaaagcttttaactattccaatatcaataaactttgtaaaattaaaatttaaaattaaacattacctaaactatactaaagttataataaaatactagattttttttttctaaactattaaatttacactagctatttttttttttaactaaactacattacatatattttttctagtaacaaattagacattaacattaaaactaaaatactttaaaaaatatttatatatttttaccccaatctaatactttttttttctagtaacaaattagacattaacattaaaactaaaatactttaaaaaaatattcatatatttttaccccaatctaatactttttctctaatatttatgcatttttagtgaaatttatcctaattctattgaaatttcgacaacataacaattgtaatcagacattctcgaaaatttcaaacatgaaaaaaatgaaaaacaaaacttacacaaaacaaacaaaataacattaacaatataaaaattatacgcacatccgactgcaatacaatcactcataaaacctacttcactgcagatgaatatttaagatattcaaactccactaaataaagaattttaaaattgtagtgattatatctttctctaataaaactaactacttttgcgctcttcaatcaacaccaagaattcgaaacctaaaaaataataaaagtattaatattgattaaattttaaattttacaactatcatcaacttatatatatatttatgaactaaaaatacacacatatatatatatatatatatatattaccgataataaggagcctctctcgaaagatcgtcaaaaaaggaggaggagctaggcgaagtttggcaacgactagaaaagttaataatatatataaaagaattttaataataatttaaataaaaataaataatctaaacataaatttctataacgatttaataaaaacttaaagaaaaattaaactaatagctaaataattaataaaaattatttttcaatacctaaacaattaatatattcgaaactaaatattttttattgcctaacaacaaataatctaaataattttttttattacataacaacaaataatctatactaaatatttttcaaaatgcctaaatctaaaactaaataattaaacttaactaaatatttttattaatacctaaatctaaaataaattaaacaattaatttacattaaatttaaaactatgtattaaataaataagtatatatgtatataaaatagtatacataaaatatttataaattaattttaatcaataattaaatatatatctaaaggagatggtgggcgtcggtaaccacgaggaggacgacaactgtggttgagaatggtcggtggttgagcaaacagatcgagagagagaaagtatcaccggtggtggagctcgaatgggggtttcttggtggttgtccttcatcggtagtggatgccgctccgaatggggtttctcggtggaggatggccacctttagtggtatgactttcatctttggggcatcaaagggagatcaagagagagacgagaaagggaaatcatgggtgggtttcgtggggtatcagcgtcactggtgagagagagagagagagag

SEQ ID NO: 28078 - DNA, 3272 bp, Cannabis sativa
agcagcccaaacccacgaaaaaaccctcgccagccaccacctttctgtagcaagtcccttggtaatcagatcaaactttaaatctccccaaccttatgaacagaatcaagtatggttaaatttgtatctccgttaatgaacggtttaccttttaagagatggccatcatgagattccatgctatcttcaaattctctttactgtagtgacataaaatttaatactttttgcacctcatccttcagacagtcgaaaaaatattgttaaagaacacttaaacacacatctttctcaggtgatttttgtattttcactgcatgccttcttattctccttgattgttcatgaacattatttacttcatgtgcctcatttgttctcacaaaaaaaatcaagagaagttcatcgactgaatacaagtcaccatttgaatgtaccatgtttgaattgtcccttcacaaacaaatgaagtttggaactaatccctcctgaaaagtattattagagataatttaattttctacatcttaaattgttctcaaacacttacaaattctttgcataataccagaaaagtcatttcacaaaggttgttgttcaaaaatctccttgtcttttcctctgatagatcgatctctatcaatggagagcctgaattctgagagccatggtgagcttcaaattttgagctacacttgatgtaactcgatgttatgccttctattgcatgataagaatcaagggaaatattttcaaaaaaaaaaagttccactagcaagctggtttttatccagcttctgttggaatttttgaatcttgaatagaatcaattggagcgatgacactgggtttcctcatcatcttataagaaattcagttgacttcatctatacaacactcaccttctccaattttacagtgaatgtaggatctaagttctgcacaaatgcatttttttgagagttgtattcttggcttattaagcttgccacctcaagtccctaggtagtgaaatcaaactttaaaccaccctaaaacacttgaaaagaataaagtacgatttatatcttccataataaatagtttacatttaacaagatggctatcttaagatcaaattttttttctagaaattgtatttagaatagccaggaaaactttgatacgtattttagcatccttcaaacttccaaaaaatatcgctggggaatactcaaactcacaattttctctattgtaccagactttttttttgtgtttgccttcttgttaccattggttattcatggatattatattcttcacatgccttattttttcccctcaaacagcttaaaggaaactttattagattatacaatgacggaactctcatctggggaagatatgaagttttggactgattcttccaaaaatatcatgagaggcaattccaccttctacattttaaattgttctcaaattgttgtagattatttgcatagtatcaaagatgttgtttggcaaatgttgatgttcaagaagctcttggacttctccatccctttttgtatccatctcatcacccaataccttagaatttaaatttaaagagacatggtgggcattagaattctagaattttgaactgcgcttgttgtaacttgatattaagtcttctgttgcatgatataaatcaatgaaaatcttttcataaaaagccccagtactagctggttttgatccaactaatattgcaatattggagtctttagtaaaagtagttgtagtgatgatattgggcttctacatcttctatcaatttgaattgactccatccgtacaacactcacctccaccaatttgaaagtgattgtaggatcgaagttctacatagatgcttttttcttttgtgattcatattctttgattattgagcttgctgccacaagttccttggtagtcggatcaaacttcaaacctctacaaccttttgaacataatgaacgacttacctcttacgagatgaccattatgagattccatgttgtcttgaacttctttcaactgtagtagggaaaactctaatactctttatagcatccttcagaatgccaaaaaagtattattgaagaatacttaaacacacatctttctatgatgtatttcactttttatgagtctgccttcttgaactcttggatgttcatggacattacttgcttcatgtgcctcatttcctctctcctacaacttagagggaagtttatttgttgcattcaagtcataatttgattgtactatgtctaaactctaccctggtaaagacatgaagtttggaactaatccctcctaaaaagtaacatgtcagaaaattccaacttctacatctaaaactattctcaaactcttgcagattatttgcatagtaccaaagatgtgatataataaatgttgatgttcaagaagctccccgacttttccatcctcttttgcatctaactcatcacccataacatgagaattttgagttcagagaaacgcatggcaggcatccaaattttcaaattttgaaattcacttgctatgaatcaatatgaatcctttttttgcatgatataaatcaatggaaatcttttcagaaaaactttcactagctggttttgatccagcttctattatattcttgaagtcttaagtagaaatagttgaagtgataatattgggcttctacattttcttataacatttgaactgaagccatctttacaacactcacctcaccaatttgaaagtgaatataggatttgagttctatagagattcattttccttttgtaactcatattcttaaattatttagcttgctgtcataagtccctagtagtcgaattaaacttcaaacctctccaaccttttgagcaaaaacaagtatggtttgtatcttccttaatgagcaatttacctcttacgagatgatcgtcacgagattccatattgtcttcaaattctttcaactgtagtggggaaaactctaatattttttgcaacatccttcaaactgtcagaaaaatattattgaagaacacttaaacacacatattctattatgatttcactttttatgtgtcttccatcttgttccccttggttgttcatggattatctgtttgatcacgtgcttcgtatcttctttcaaacaaattaaagagaagtttattagttgctgttgcgaaaattattaaatactacgcaagtgcacgcaatcaagtagtatactcacgcaagtgagg

SEQ ID NO: 28079 - DNA, 1802 bp, Cannabis sativa
acacaaacttaacacacacatatgtgatggacactttaacaagtgaaacctaccttaaattaataaaaattattaattgaatttatttatcacataagtgtgcgtcaaattcatataatttatgtgttcccatatcatctcatattctatttaatgaataacgatgacttttgttaacaacaatttttatttattggaatgacatcaagtttatgtttacggttttaaaaatatggagaacaaaatatttgtttataattcgatccaagagaattattggaacaatttattttaagaaactataaattttgggttttttattgtaaaaatatgtttttttcttcacaaaagttattttgtggaaataatttaagaaaaatttaaaacaaattagggaagccaagtaaaagtaaccataacaagagtggtaaccagttaccttatactttttttttcctttcatatttttttaacttttttataaaattttccaaaaattaacttttaaaaatcataattttacaaacttataatttaaaattatgaaaattcccctattctgatttcaataatatgatattttataattacattattcaaacgcaataatcttaagatgcgtcgcaggagctaaattgcgctagagcttgcgacgcagctgtatcgcaccttacaattgtgaaatctgtgtcatttttaatttttattttttttaccatggtttcttcttcttcttctttaatgaatgcctttttttgtttgtttgttttggtctatcaatgagtaaatgtcaatgtaattgtgtattaattaacgtgtgtgcatagaactacctaaacattttgatattgaatattacaaattaaaaaaggattttgggaaataagtaaaaaattgtactactaaaatgaaaaatgtgtttgttattaaaaaatgtttaaaagaatgcaaataagttttcgttttgtatgcgaaacaaagtttaattttctatttgtaaaaaaaaaaaaagagtttaattttatatatatttatatacgtagaagttggtttaattttgtactaagaagtgtaattatattgtatatatttaaaaagagttgaagaaataacattagtaactagtaaataatatgaattataattttgaggttgatgtacaattttctaagaatatttgcaagttataaattttcaaagaagaattgtgctttttttttttttcttttttttgaataattagtaattttgcctcttaaatttttgataaaactgatttcacattttaaaatataccacttattaagaattttctctgaacttttacattaacataaatatagtcttctattaggttccgtctcattactccatttaaatgttgacgtacttttgttaattattaattttgtcccctaaattttgacaactatcaaagcgtacccctcaaaaataatgagaaagatttaacattttttttagtaaatcttaaaaaattaatttacatcttaaaaaaaattattctactgattaagaaaataaaaaaaaaaaagaaattaaaattttaaaactaattaaataatttaaaaaattatttatttattatgaaaaaatttatttagatgtaaaaaaaatattaaaattttaatttttgtaaaaactaaattttatgggaataagcttcaacttttttttttctttaaaaaatctagatttgtttaagtaaatataatatttttttttagtttaatttctaaattttttacaaaataattttatatttttatagaatttttaattat

SEQ ID NO: 28080 - DNA, 4667 bp, Cannabis sativa
  modified_base (4605)..(4613): a, c, t, g, unknown or other
gttatcaaggtgtataaaataaaagaattatactataataatgtatagttattttttgtacattgtatattgatataaaatatatataaaaaaaaaatttaaatttttaaaataatcatttgttctgtattccttaacatttttgtttaattatatataactaccagaatatttatgttaattttacttataaactttcaatagtgagtacccatctggataatacccgaatcctacctgaaaaaaataataagaacaggacaggattgtcaggatatatatggtatataaattattttatatggcaggatcaaaaaataagcatactttattaccataacctaccggttgtcatgtcactcttaaaatatcagtacatacaataaactagtaactaatcaatatatcttgcatatgaaagagttatttagttattagttttatcaaattaaaaacgcaaaaagaaaccagattactaaacttcaatccatcaagtgaatcagacaattattaaccgttattagcttactcaattaacttgtccccattgaaagggaccatcaaattttttgaccattaataagtttccatgcatcattgtatttcattctttaaagtaagtagagaaaaaaagttacattatgatatgaaatctcattattattcattatgtaaattctcatatacatagagaactaattgtgctattgaattcagcaaaaaagtaattgttctattgaaagaaaaatctatatgtatatatagggaaaaaggaaacagaaacacagctaataaaaagtgagttgaacataagtatctgtcaaaattacgtactgttattagtctgtaggtgtatcattacgaaacataccataaaaacatgtgtctcttatggtgtcccttatgaccatttatagtagtaggctataagcttgacacgtgtggaaaacatggctgtcgttttatgaaaatatatattttattatttctggtaaagctggattccatagtttacatatatagcactattattaaagcgatatatattataaatattttcctgtttcctcggcttttaccagagctagtacgtagtccaggaccagaaaagtcttgttacagtcttctgatatatatatatatttatagctataaagccccctctctctgcctagtactttttacgtttgaatagtaaactttttgtttttctttttcacacaaaagaaatagtatttgattattctaaagctttatgaatctcgttgaccatttgtctatcctttttcgattctctctctttctcaactcgaaatcggaagcccgtatttaggctaatatagcaatacttattctgctatgtattaacctttgatcatgcattttctttagatctcagcaagccttactcttcttggctattggcttaatcatgtgtctgcacacctgagatatacatatgatataatataatacatacatatatattagaagcatctcatctcatctcatcatcatgcatgagcatggcagttgtacgtactcgataatatagaatggttccatttactacctagtgaataatttcgcttcttcttccacatcctgtctactattgttttttggctgctttgtataatatttactattatatataatttacattcttttaataaggggtaacaaagacaggtataattcattaaataattaagatagtgtctttgtctaaccacctattttactactttttcaaatcagacacataatgacaatgtgcagctttttacaaacaattctcatcaccataacatattatatacaaatgggtagagattaattcatagtagatgatttgattccattagcacttttaaaattaataaagacataatgattgatatatatacacatataacatgccattgttctatgtgaatgtaatgtgtcctataattgaaactattattagtatagaagattaaatattaaaataataatatttgagaatcttattaacatttactaataattgactcaaaaacaacaatcccctatatatatagcaataggggcatcatgatgagtacgtaatactatatatatcttgtccaactatcacttcaactactattatatgttttaacagaaaatttgaagtcatgtccactccttgtggaagcccggtctagccctatctataatgtacgtatacctcttgtcgtttccacgatctcccactccactttattaataataataataataatatatcttgttcaccaaattttccagaaatcaaatattttgagagcttaaagaagataaacgataatagacaataaacagatagatttttacgtgattcaggtgttaatgatccttagtccacgagtttaaattattggcctctatgggtaagtgttttaagataccaagttattccaatgtaggtttctctgctgctttgtagtagaaggttttttctggagattttattagagtggcagtaagtgaaaaattgtcctccctgccttaagaagaatgagactgttataggcatactggggatctagggtttcatcttccacacgccactaaggcttgtactacgagaagacaatctagccctcaactggaggaaccttcttcatcgtgtggtgtacaacagctggcgaggacttttgtacgaccatgaacatgtatgtgtcacgcaaaggtcttttcttcgcgaaatagtctctacctaggccgttgggcaaaaagcatgctcgagggtgcgtacgcccactatcatgatctgacacaagggacacgatctgatcatgtgttcgaaaaaggtataaccatctatggagtgatattttgcaaggagatgacgtgtccaatgtctccgaaacccatactaccttctgggatccccatcgaaggatgttgctcccagaagccattgcctcttgttgccttctagatccggaagtcatttcttttagttaccctggatgccttatgtagagaccgtgttcccctctccgatcgtgccctgtgtctcattgatgaaaacttagataatatttacccctaagctttcgagatgagggcatttactacatttacttccttttgcgtggtaaccacgcatcacgttaggaggtgtttcttacccctcttcatgtgttgcaaggtgtgcttatagcaagaaaggaggagggcgactgagtgacgtggagaaaaggaccttgacatttatgtgggccccaggccaatcgcatgggacctctcacctccctattcgttggatttactctaaccattttgaaccattgatttcttgtggccctgtctcctttttgaaataaaagccgcgtatggcggtgccatcattttttattcttttttgttcaaaacttcatattttctctacaacttctttttcccttttcttgtcaccttatgcatgcaagaggcattggaggatctgatccagcgtttactctcacagaactcttcccagacgttgctccccttcaactgaaccggtaaagttcttcttcagggggaacatttgattttcagaatgactgcgaccgctacatcaattggctctggctctttcaagaaaactttctagatacacttactatcccctctgattcgtcaagtaagtgcagtaactccctatctgagtttgttggcatttatcatttagggcaagaaaggttcttgcttaggttagagctagaaccgcacttgtgtcgtgcagcgagatagtgtgtgtgaaaaacccatcttcacattcgtttatcattttaaagagttggcttttacctccatggataagaacaaagaccccctcacaagcgcaaccatgtccatcaaaggagaacctattcaaactgtcgaagggttttccgtgagataggaccaaactgaagtttccatggcaatgcctcagctaacaggtgccttagaaaccattccccaaagtgaacccattgctgagggagatcttcctgtagataacatgagtggtgaaaggggggaaattccttcaccggtgcaggtccgtcccgagtctgtatgggagatggatcagaaagccaattgcttttgatcttatgggatgtaacaagcttattctgaagtcgctggcccctttgacgttcctggactgatgtggcacaggctctccatcattggtgaatctgcatccaccagtgttgataggtttagtgcatgtagttggtcccatatttcctgtggcgctcacctccccttgggaacttatttcgtgagattgattgcaaaaattgggattgcaccctttcagttgattccttcattatacagactcttggctgggtggtacgtgttttgcaaaattaataaactggaggttccttcaccaaagtataattaatatctaaatgattttaataaataataaataatttttatatcgcttaattcgttttaaaattttaatttattttttaaatttttttgatcattcaacataatttttcttaagatctaaattaactttttaagatttattaaaaaatgttgattttttcttatttttattttgagggggtacgattnnnnnnnnntcaaagtttagggggcaaaattgctaattgataaagacacgtcatcatttaaac

SEQ ID NO: 28081 - DNA, 2077 bp, Cannabis sativa
tttaattatttatctttcgaaatttatttatttaaaattaaataaatcctacttcctactatccagctaaccttgttggaggagtatgtggttttagcttgtgtgtaagtttttctcttggctttacaagtcaaagaatgcacaggtgatgagagacatctgggtaacccattcatatttaagagaagaaagagagaagagtatctaagattgaaggaaagtttgcataagaaactcgaaggatggaaggtcaagcttttatcctttgcagggagggctaccttgatccagtctgttgccttgagtctccctctatataccatgtctactgccaaaattccattgtctacttgtagagaattggatgcccttattaggaaattttggtggacaggggatgtggataaggaaagattttgcgccatgctgagttgggataaactttgtagacttaaatatttaggggggatgggttttcggagactagaagatgccaataaggctatgctttctaaactggcgtggcaaatggcgaccaaatgtgataagttgtgggtgaagagcttggaagcaaaatactgcaatagaagctctttttggggagtagagggtcgaagtaatgactctgcattgtggaaggggattttatctactagaaatatattaagatcaggctctgttaccattcctggcaagggggatggcatagacatctggatgcaaccctggattccctggcttaccttctcggaattcagattgctgatggaagaggtcagaaccagattgccgaatctggcatatgtggccgatctttcaaggaatgggaatgaatgggatcctcacttacttgagcaagcttttggaagggaaatggggtggaaaatcagtaatatcaaaaggcttccccatgattgtgaagactctgttatgtggaaaaaggcaaatgatggattattcacgactaaaagagcctaccaagaatgttgccaattctaagattgcagagaccaagatgtttggaaagcgatctggaacccgaaaatacaccctagagttgcagttatgctctggagagtattagcgggatgtattccagtcaaggagaacattgcatttataaaggataagggttgtgttctgtgtgaagaaggcaaagagtccctaaagcatgtgttttgggattgtccttttgcaagggctctttggttttcaggtatgtttccagtagtaaatgcgagatcgacaggctcagatttgatggaacttatacatttctttctgcaagggattccaatgaatgataagtggcgatttctgacatttgttgattgtttgttcgaagaggtttggaggatgagaaatgcagtattattcaaaagtaacagaatggatatattgctgtcgagagtttctatttctaagagacttgaagagttctactctatacaggaagaacaaccagtatttgacactaacataaaaagagcagagacttacctttcttggaagatccctcaatcgacggcatttgtgtgcttcacggatgcgtcttggaaacaggggtcggcaggcttggcggtcggtatggtagatcgagcttccagtcggagttggtggtctgcgaaatggtctcgggctgcgtcggcgatagaagcggagtccttggcgattgtatgggctcttcaattggctgttgaggctgggattcaatcaattgcagtggcttcggatgcactgctggtggtcaaggcgatcgttcaagatagctttcctccgtgttggaaagccatagcagttttctttgaaattaggaagttggttaaattatttaattcttgcagctttgtttttattagaagggtagataatgaagctgatgatgtagtggcaaagacggctagaatcgatgggcactgtaatgactttattaatagggagggatccccttttgtgatacccaactacctcttttaatgcattgaacctttctctcaaaaaaaaaaacttgttgacagatccaatgatctgactcccttggtcaagttaataatttgtaataggtaaattttacaat

SEQ ID NO: 28082 - DNA, 2547 bp, Cannabis sativa
agtgggtgtaaatttccctactttctgttcttttcaaaggattaatgccattaatttataaatattatatatatatttttttgttttgacaaaaaataaaattgtcttttacatttactcaagtttcttttacataaaactagatttttatttttccttttctttagagttattacttattaggaataacatttcctttcaagaaaaaaatagtaataacaatacaaaattagtgtgctcaatcaggcttaatgattacaatgaagtttaacttcaataaattaataattttaattaaattatattttgtctgactctgactattaatttgtaattttttactggtatattacatattgttttcaattattacttcatatttttaaatgcatattatctgtattgtccaattgatcgtatctaaacctttttccatagtaaataaacaaagataaaaatgtggtcacatcaaatacattccagtattcttccacctcgtttgtttcttgtttttccttccaacaagcaaagcagtccaagttgtatgattctataggccatgtctcgatgcactttaaagtatcaccatattttattctttagccacaaaagaaaaaccactagagcttcatgttttatttttctttcaaaagaataataatataaaactagtgtgttcaataattgagctaatatggaccaccttaacattttatgatggatcaaatataaaggtggttgtgcctttttaatagtctctctttctctatatccatttatcaatccatcttggttaaatttgcttttatctaatgacaaaagaaccaattcaaaatttgcatttgcccaaattttaaaatttcaacctcaaaggagctaataataattctactttagttttccatgaactgaaaagatgaaactctcaaaaagctttctaactctaaaaataatatctacattaattctcggatctaatagggcacatagcccaataaaaaaaatcacctggttcaagataagagattacagattattactgactattttatagaatattaatgcatcagataagagaggacaggatactcctgataaaacaaaataatgaaaaaaaaatatctgctgtacttagaatctttctgtttctcatcactgattaccaagtttatatgactttgcatatcgtttgaattgtagagctacacatataataacatttgctacaaagattctaaagacataaatgccaatcagtatataaaggcagcaaagttttgatatggtataataatctgattctgggtttgtatttgaatatactaaaaaaagaagagaaaaaagaatcaaacaaaaaaagagactgaataaataataactatacatttaattaattatactattggaatgaacaattagagttacaacaaaagcatataattgtacaagagatctcagacaaaagcatataacacacaaacatacaatactactagtctactgcaacaacataaaaattcagagctaataacaaagagggtacttattaaagtggccacatgaacaaccatactttcctctgcagggacacgtggcataatagtagggcggtggcattggacaaggccttcgagtctcagcagatgagagccaatgcaccatggctaacagcaacaatggtgtgattattagagcccaattgatctggacttttggggtttcaacctctatcactggctcttgtgagaccacccatggtatagccaataaaattgccaccactgataagaataccacaactgggtataagggtgggctttcatttcttctacatgcacagtaacccattatagatcagagattttttcttgggacaattttcaaagaatagtttgatttatattatagataggaatatttattgttgaggatgatattgtatcaaagtctaccacaaactgttgtgtccacttttttcttactattattaatatttttttaaaaaattaattttagtgctattgtttggtttggtcatagagctatcaatcaaattcaaagccataatgtcatttatcaataaagttaagccattgatagcctttaggtgaggaggagacaaaagtggaggggacaaggccattagcttgaaagataatcaaccctatctatatatgatttttgtttgtcctgttatttaaaatttctttaagctttttattattatttttttttttactttttagagagtaatatgaatcacactatgataactgtcgatgcaaatgaactttgagtaaacaagttaattatctagtcaaagatatataaagtcagaatatgagttactacaaacaaaacgatttttataagactaaattatttcgaaaatttagacaaaataacttaagaccactttcaagagacattcgatgtacagagacaaaatttccccaatgtcgtatccagatagtttccctaattcccccacttgatatctcctaaacttgtcctccagctcgtttatctgcaattggattggatcct

SEQ ID NO: 28083 - DNA, 1968 bp, Cannabis sativa
taaattctgggtccgccactgtcggttggagtgaccaacgcaataactgaagacacaaatagtcatatttttggcttcattttagaatcaacgccaaattttttttgctaattagttttttaattcgattatgaattgaagtataaaaaaattgaacaaccaccacaccaccaccaccaccaccatgtttatacaagaaattaattttttaacggcaactctaactgcaataatacaaactgaaaacatctatttcaaatccagatatattaaaataataaaaatgatacaaatacatttcaaaaatcatatcctattgtatataaattttacatatacaaattactataaattatatataaggggagttgatataaatctgaggaggacgggaccaccaaagagattaaacctgtaaaaaaaataaaaatgagagaaaaagagacaacgtacgactgacgtgagagagaagcaactgacgagaagaacgtgagaacaaaaagaaagagagatagtcgtacttacaatcgtcgataacgtaacataatttttacttttctctttgctatcgtccttaggctatgcaactagcgatgttgtctcccctctagcgttaagctagggctagggcatggctaggcttcgtcgagaaagaaagaagagagaaagttgccatggtgtgactgggttcgagagagagagcgagaggttggtgcggttgtgtgtgatatttaggttaagttactaacttttaagttatggttttttaatagggcccgaagcccattgtatattatatatatacaaaaattaaatctttttacttcggtgaataacagtttaaaatttttaatctctatttacaactgaagccaaataaatttgcatcttgttttcaccgaagcaaaatgtaaagacaattataattttttttgcttttttttctcgattcctcttttagcgtcactgtagtagctgacactaattgtttttttagctttatttatccactgaagcataaaatctttgcctatttttttcctcgatcaaccattttggtgaaatgcgttgaccaacacaaattgggcattttatagtagtggttacttgcttttaggacataaatctcaatactagtaaatcattatagtatactaaataactaacaagtaactagtcctatttctaccaaaattttggtaacataacaactataattgaacgttcccaaaaaatttaaagttactactaacaataaaaaaataatcaaaaataagataaaataagataaaacaattacaacaacatttaacaataataaatttatcacccatccgaccgcagtatacttatttgcagaacctacttcattacggatgaatatttatgatattcaaactcatctaacatgcatattatttcacacatccgactacagtacaatatatatatcattgaacttactttactacgattaaaaatttaaaaattagtgaatgtaaacctcaagctagctagaaactgatcaacaccaaatgagttgaatccttgcaaattgaataaaataaaaattagtaattagtaattagttagtaattactaactagaaaccacttagtaactagttattagctactaaaaaaaataataactcatgaataaaaataaaaaaatagataaaaggaaaaaaaaaagaattaaattttatatgcacataaaaaaaatagctaaaaagagttaatttttttctcatcttatattgaaattataccttttacatctagttaaaaaaaataacttattaatatatatctcactaatatatttttttagaaactttctaaacttttatttaatacactcatatcttattctcaatctatattttcctcttttaatcacaatatttaacagatttattaagaaaaatatatatacatttataacaaaactaatagtttaacataa

SEQ ID NO: 28084 - DNA, 7069 bp, Cannabis sativa
  modified_base (1848)..(1854): a, c, t, g, unknown or other
aaataaaaccgtgagggcttaggcataaagcggacaatatcatactaatgtgggagtcaaggtgaggtagcgacccgacaaggtggaagagcggggcccaacacacctttatgttttattttttttctctgctcgcttccaccctcgctgcagtggcaacccacaggtttttgcacttcatggacttctgaaactctagaaaaatattgttttggcgcgtcaatccatctaccaatattccctagcataaaaaaacatcaaatccgtcactttttactcataaaaattaattttcttttaaaccccaaattattccaaaaatgactaaaaacactaatattactaagtaacaacatcttctaactataaagaaatcaaaaaatttagagcttaaaaggatcatattagacaccacgaaggatgagaagctggcaagtcaactagaacaaagaaaacgaaagacctagttcaaaagcttttcccaattccttgtgtagtttaattatcaaaaaaaaccttgtatagttattgttgtttacgagagtattctcaatcttttgctatttgtaattgattgtttgatttttcaaatctagctctataaatttgttgagtgtggaaatgtaagttgtaaaattgtatactaattttaagaagttatattataataatatataatagtttgtgttaattaacgtaacaatgaatgcttgtaaaatctagattgagtttgaagtttctagacttcgccaataaaatgtatatttgtatggtgtgtagtttgtggtaactggtaagtcatctttagtcacttaattatattttataaaccttgcgtgttttgccttttgttaatttatgaccatattgtatgaatatgattattaatgatcaagtaagagaaatgataaacttactcttactaactactaactaataattcatgttattatctgccatttacataattagaaataataatcaaagtagttcaaaatatatgattataaatatgacatttataattgccactggtatacataaatattttcaataggatagaccctcatatttgaggagcctatacatcatcttatgtataaaatagaaataaaattgaagcattttattattattattttaattttcttataaagataaattaatatattttttattgggaatcctgtattatttttgagaagtttagaaggtgaaaacaacatcagcaaccccaccagcctcttcaatccaagcaatgctcaaagccagtttcccattagtagaccactcaaaacctacttcagcaccattcaacacacacttctttggggcctcacttgagaaagccaagaaatttcctccacctttcactttgatatgggcactagagtatttgtagtccaactcttggatagtccctccactattgaacatgtttgtgagtccaactggggcaaacttgatactgccacccaatttttgaactggcacaaagctgaaaatctcaaacgtagatggttgaatagtgaactgaatagcatcagattttggagtcattaaactaatttcagcagcctcattgagatagaccacatattcctcagcttctcccatctgggaagcctctaatttttgatcccattcaatctcactcacatggattgaaccagacattggcttgtaacactcagaatatcctctaattctttgttcctttgggtcccaaccagctccttggcaattaaaagctccaaccacaccaccatactaatcaatcaagaaataacattaatttttagtgattttgacaatttaaacaccagtaataataataataataataannnnnnnaataataataataatatataaaaagtgatgattaattaccttgttgaggttccatatcttgagaatggtcttattgtcaaataaagggtttttgaaaagacagtctctggttgggagagcaaaatggtggcacttaggaatagtaccatcagggtaaacaagcttgtttaatagctgaaaattgtgaccaccaactgagtcactaacataaacaggtcctccacatatggctcttgatccagcatgaaatttggcacataaatggtcagattgaaacatgtcccaatcaggctgaatgatctggcccatccacatgctgttataggcacagtgaatcatgtgtactccttgtaaccaataaactcccattgggtctccatttggatcctgaaaccaaaaatcatctcctacaaaagataaaatatacaaaatagaataagaataaatgaaatatgtatatgttaaggcataattacatgcaagtatatctgagtcaaaaacgagctcatcttaagtttgaggactttttcctattagatgtttatgacaacactagcacaacaccaattatctaaacaaaaaaatacaataataaacaattttattacctactcttcccatagaaatttgctttgtcccaaggaagaaaaagtcattgcattgttgcatgctagatacaagtccagtcccattgaaattcttctgaagagaattggtcagtcccttgtaataagactttgcaagctctactctgcctccatagccttcagaaagatattcaagagtctgcaaattcatgaatatataaatgaatatatatgtgtaggtacgcagataataaaataataaaaaggagatgagtacatatattttacttacgtgaattacatcaactttaactcctgtgataccaactccagcgaggtaagagtgcatagaatcatagaaatcatcagcctggttaggattaacaagtccaatcccaccctctacgattttcaccacagcaagatcattcatagtcccatcaaggccaggagagagtttggatgaaactagctttgaatcaagatgagttaatgagccaggcctgacaccaccccaagcaccacaaagagcatgccacacataaatatcatctaggcctttaaacctggtcctcaaatctctagtgaaagccttcattccatagtttccattgttgcctgatgaacaccttcctccatgggcttcttcactttcttcttctccaaaaagctcatccaactcttgttttagtttctgaatcttagcttcaaactcagaaatatcagctgcttttgcttgaagactagccttatcaagctccttctcagcatgttctatctcaatagccttggagataagtagtttaggcttcttaggatcaaattttggagtctccaggcttgacaaagttcctcctttgtattttctgaacttcttacactcatgaaaactgtaaagccttgcagtcatttgagtcccaccaaggactagattcttggcatcttcattagggtcctccccatctttgttaatgctttgccaaccatcatcaatgatgagaaaccttggtgaaacaccaccttgagaaaactcattcaagccataaaagatgccaactggctcaacagtcaaataaaaggcatcccaagtgcaccagccgaatttgtcaactattttagggactttcttctcttccaagagcctgaaagtgttgagatgaactcttagagcactataagcctctttcatcaagctataggggttatcagagacatgaacataagctatggccttaaaactagacactttagcttgtgaagaaccgctctctgcacagatcatgagttgtccatcagaaccaggataaagagcagacctgaaacttccctcaatgatgggaatgattatcacataagacttaatctcaggaacatctaagagcacccattgtgtctccatttgcaagtcagaaccagaactccccacccacatggttgaccaccatgttttgaacctgaagatacttaagaaatctctgccattgaattttcccaaacaattggccaacctatcagacggttcctcgtgagtgaagccaagaaaaccacctttatgagaaagtgtccttacgcgttgaagcaaaggaattgaagcatctgaggattgagaagagatggaactacaaaatggttcgaaggttacatttttgggaacttgagagagtaaagggacacctttaacactaaacttttcatgagttaaatcaaagtagttttccagagtctttgattcagacacatggtggattggattagcagggtcattaggaggtgccatgacagagtagaacagagtggattaagaggtatactaaagggcttaatgaatgattacaaaaaacacagttcaaaatggaagtcaaatattaaattttaagctcaaaatggattaagtgttttgtttgtatgactgaaaagagaaagaataggactatgtttggttgaatgcgaaaataaattgggaagggaatgtacatatttatagactgaaaaagatggaataaataaacaataaatgatgagagagaatcaaagaagttatccagataaaaagttggattgaagaacatcattagatcaaaacaaacaaacaaaaccgactactagttgttccatgaaaagacactagttgaagtcattgtaaatttgtaacgtaccaaaaaagacttcaaaagataaaaagagaaagagaattaattagtagagtaattaatgtttaaaactatttaagacaaaagtttcagaatacatgagtgtgtagtgtatgtatacttgaaagtgaaactaaggcacgtgtttgatgatgtatgtatgcattgcatgcatggctgcctgtcacttgcaaatgccatcatcatatataatgcgttttgaccatttggacgagtatattacgactaggaaacagtgaccaaatttggactgttaaaataatggctaattaggatttttgtccctgaactttgacatacaccaaatcatgccccttgaacttttaaggtcattaaaaataccctattattgagattgttggatttaaggacttttttccaattttagtaaaaaaaatctaacatggatgaaacttcagatgtcataatttagtacatgtcaaagttcgagggacatgattcggtatatatcaaaatttgggagcataatttaatccataaacaatctttgaaacagtaaaagtaaatgaaatttgacaaaagtcattcaatccaataatttcaatagttcaggaggcatttttaacgatcttaaaagttcatggggcatgatttgatacatgtcaaagttcatgaggcaaaaatcttaattagcctaaaataataataaaaaaaaagaataattagtatcttttgaatttcggacaatatataattttgctccttaaaatatacgattggttaaattttctttttaaaatataataattgtataattatgctctttctgttaagttcaatttcttttaccgttaaaagttaatatttttactctttgaattttgatcaatacaaaattttctctttttctattaaaaaaaaaaaatttaaagttataatattttattaattttgagaaaattaataaaaattattttaaaaaaaaaactaataaaaatattaaattattaaaaaaagtaatgagtttacttaaaaaaaaataattattcttaaaaaatattttcaaactttattttatttataaatacgtattttataaaaattaaactaaaattattggaaatccaataaataattaaacaaattaagttttttaagaaaaaaattaaacttatttatattaataaactcatatcttaaaaaataattaaaaattcaataaaaatacaaaattattttataaaaaatttaaaaattaaactaaaaaaggttatatttacttaaacaaatctagattttgagaggaaaaaaatagactcaagcttatttcggtaaactttaatttttataaaaattaaaattttaatataattttttatgtctaaatgattttttttataataaataaataatttttttaaattgcttaattagtttataaattttagtttcttttttaattttcttaatcattaaaaatgatattttttaagatctaaattaattttttaaattaagaaaaattgttgaatctttcttatttttattatgaggatgtacgatttgatagttgtcaaagtttaggaggtaaaattgctaattaaaaaaatacttcaacatttaaacagaataatgatgaaacctaacagaatgactaaatttatgtaaatgtaaaagttcatgagaaattcttaacaagccgtatattttagggggaaaaatcagtattgtcgaaagttcagtgaacaaaattgctaattatttaatataaatgtaacaaaaagaaaataaaataaaattatataaattattactattatgattatcggttttgaattattttggtttcctcctaatcttaaaatctagatatgttatttgagaaaatttacaaaaagttttatatatgaaacctcacaaaaattcatgcttcaacaactgtaattagtgctaaaagcctaaaaccttataaataacatatcattatcaaaactcaccactcaaaaattatgactatatatacatgtattaattcaacccttagtattttgttaaaaaaaaatcctaatatatggtgtgtattcataaattactcgtagacaataaaaaaaattaattttttatattttttaatgtgcccaaaatcatttattcattatacacattttatataattgtatgtgcatatttaaacatgtaaagaatacaaacattaaaaagttatatagtaaccaaataattcagttgggttcaacttaaacttaagaataataacagagttaataaaaggatgaaagataaataattttaaaaaaaattagcatcttaatgttaaactatttgtcatttgtttctctcttttctacgataccaaatgaatattatatagagaaatttacgttgaaagaccaaaatttaaaataaatgtcataactaacgctaattatttaatttgtgaaatatactcttgtttttttttattttatttggacaagt

SEQ ID NO: 28085 - DNA, 3320 bp, Cannabis sativa
tatcacactttataatagtatatgcattatacatatatgcccacaattgaatttttaatccaataataacctattctgtgatgccaataaatagatgatacctactaattacaaatagtccgaggtggcacctttctgtgattgccatgtaataggcatcagggaatacagataacagggatcgaccgattctagtgtgaggttggtgtttgtggatggtctgttccatgatgattgtgatagtgtcccaaaatctatagtggtggtgttgtgtttttcttttaatgttcttctattttattatttttcttttttttttaagagggtttctaatttacttttttttaattttaataacagtgtatttacattcatatttgatcttcaatcttttttagattcggatgaacaagttattatggtttcttccgctatcttttgacaccgtattttatggttcatcgatatcaaatgtcaaaaattttgaacagggtgtcatgttattctccattattctagtttgaataattgggataatttaccaaatttttattggaagatctttagttgattgtccttgataatgtgatttgtcacatgctcattcgggatagaaatttagtaattttaacatggttttgatgcttcacaactgatggtttatggatcatttagttgaagttattgttagggtttttgtcctatttaatgtaaatggcttagttagcttatttttattgattctggtcgatgactaatgtctgcatgtaatggactatctttgatttacctattaataataaaaattctatttttcttaaaaaaaatgtaattcaattgtaaagtttgtatactagttcttattagaaagtaatgtataactgctatgaattatttagattcttgacaaactaatcatttagtaccgtatgagtagtgtattactctttgaattaagatttagagtagggcatacatgtacctaatgcaagtacaaagtagaataaggtataggggcaccctaacttattaatattataccttaattacttgattagatatatttatatttctaacaaaatatactactaagaaatttatagcataaactaagtaatattgtcgcctttcgtgcgatgattttaaatatttatttttatgagttattttagatattttattttttaattatttattaattatattttatatttatataagttattataaatgaacattatttttaaaatttaaaatgataaaatagaaatctaaatttaaaattttaaaatatttattatgaaatcacttagatatttttagttgatatttattatttaaatttatacatcataaatatttataataatatttattaaatctagttaatttgaataattttttgtttctttatgttaatttacaaaaacaaacacatcaaacaaataaaaaaaaccatttatttagttgattgatccaataaaaatatgatttcaaaatctgtgtaaatatttaaactaataatctttacaattaacaaaaaaaaacaaaatcaaaaataaattgaaaataaataacaaaaataaaataaataaaaataaaatttcaaaacaaaaactaaaaataaattgaaaaattatgattattggatatggtttattataacgtcttgaacaccacaaattacaaattttatgtcacgtgattaaaaagtattacaatataattaaggcaaactatattttagctataagataaaaatatttagaataaataagatattttacccaaattttgtagtcgccactatattcaaaattattatcattataatatcttacttgtactcaccactatattcaatgtcattatcatcactgaatcttacttcgtcattacattaaaacactttgtcatcagcgtgagaatattataataaataaaatattttacgaactattgattattgtgattcaccgtgtgccaaataaaaacaatatataaaactcatattcatttatttaaacatatatatgattaatttaaataaatatcaaatacagtagaacatttgtctaagaatactttattcaagaataatttataatttattatcaaaaaattaagtcccaagttgagctagttacaaataagaataacctccaaattgtaattaattatatattttttaagtcatgtattaagaaaatatacctctatataagaataattatattataataaaatttttacataatttatacatttatttatatataattaataatttatttcaaattgtaatacatgtataaatattatatattttttaaaaataaatttattataatatagtattaaagattgtttattgttattattgttacatttgatattttttatattttaatttttttagtgtacctctacttagttataaacttgttaattataatataatttgtttaatctcaaatatatttttaaataaaatttctactgtattatatatctatggccatcaatacattttttagaaaaaaaaaaaaaaacaaatatacgatttaaacaaacaccatacactgatttattatcgacattacattaaagaaaatgataaaccatattgttgagattctttgatatacaattatgatatatgtgagaaataaattaaagtataaatacatatataactatagatagatgtaaaaataaatgtggaggtaaacagaaaaggagaaaattggcacctcaatgataataatcatgaaataagaatagatttgaagttttctataattttaaggtataaacattaacattgataagtacatatataatacgaatatgctattaacaacatagatataagcctaaaatcaattctataatatgagatctcattttttgcattgtatctcacgtgtaattgtcactatagatattcaaagttgttgtcatcgtcgtatcttacttatagtcactaatatattaaaagctattatcatcatcatatatgacttatacttgtcactacattcaaaattgttttcaatatgcatctcacttgtatcactactaaattctgaaagtaaaaaaaaaatatataattaaataataagcagcaattttaaatatattggaaggtggcaaaaacaatgaaaatagtaaaactagagtaaaatattcttcatcagagaaaccagagagcatgattgtatttattgaatcacacctaactaaataataaataacactatgtttggattaagcaatgtattgtattaattattacgacgaaattttttaatgcaatg

SEQ ID NO: 28086 - DNA, 3070 bp, Cannabis sativa
  modified_base (2369)..(2386): a, c, t, g, unknown or other
taaatattaaaatacagaatttcaggactaaattataccttccaaacttttgttaggtttccgttagtaaaattgaacaaaaatccttgaatttaacaatctcaataaatcaagaagatttttaacggcctaaaaaattcaagctgtataatttagtacacgttaaagttcaatttcaaggacaaaaatcttaattaacttaaatattataattcaatattcttatataataaatataatattataattatataagtattttattaattattgagattttatgaatatttttcgatacaaaacataatttaaaatatagtcaattgcacaagtgtaaaaaaaaattacacatgtgcgcgtgtaagtttaatatttggcatgataacttatttaaaataattcaaaaattaataaaatatttactataactataatatatacagttaaataaaataatttgaattatagttttttaaagtaccaaaacaaaaataaatagatgctccctgaaaacaatgcatggtctccaaactgcaaaattttccaacaaacatatatatatccatatttatttggctatgtttatttattattatatacttttttggttataaaatatatagctcattatatatgtactaaagacttttatttaattgatgtatttaggcttttaataattataattattaataattaactttctattaatacattactcatcaatctaataatgaatgaaatatattattgacatgacaaaaccctaaccctatttatataaaatgtaagcatcaaaatgaactttggtcattatgtctataatatataatttataatgatatatatatatatatattatagtgtaataattgattggacttatagatacaaatatttatatatagtttagctaacttattaggcttgtagataagtacaaccgcaaatgatgtttaataatatttgataatttttattatatatgtgcttatatacacacacacaaaagaaacataaataaaatattaattttaaaggcttctagatctaatttaataaaaaaaatgagtatttttctattaaaaagaataaacactcaaatactctagctaacacttgtttgtaattataatttaatagttgttgtttttttcttcaattaatttatccacttataaccatcacatgtagaaggttaattttatattattgtaaataaatttataaattaaatagagatggtgatattttttttaatgaaaatatataattaataattgagaaattcataaaaagcagcatggatattcatcatgtcattattttatatatatataaatatattatatggttagtaataattaatgtacataaaagcaagaccatggtagggtccaattagtagggtacaaaattaattaaacaaataacttgcttccatgattgctctctctctctctcataataattacagttttcattttttatattttggaatacatttctcaaattaaagtaaattccttttccaatattaaaggattgtttttttttactaacctaaaaaaaagcatttaccaacacaaaagtttgtactttttgtttttggttattccacatcaatattaattttgcttgtatattaacaattatgaaaaatgaagttatttttaaaatatttgtataatcaataaaaaaaaatattttcacagcatatacatacattatgaaaagttgaaaactatagatttttttttttttaaaaaaaagaaaaatcaaaatgactattttttttttaaatttttttcctaatacttttttttttccataattttaaaattaaaattaccataaaaaaacatagacctatatatatttgtgtaacattatatatattcatatgacttcagcaacatattatatgctaactagttttgtttgggttttcctcatttgcttgttttgtgcatagtgtttattctctcacttgctcaaaaggccatattatacatcttattaattatataatatacttataataataaaattaaagaattgaagaagtgggtaataaatatttggaagtaatatatgtcatcacatgagatcttgatcatccaaaatagccttcactagttatttattatttattatttgaagttcatgactttcatatattcctttttaaaaaaaaatgaaacgtcataaacaaagaagtgctctaatatttgattttcttttagattaaaatataccctccataaaattttgaaaagaataataataacagcaaaaaagagtggattttttttatatatatagacacattaattcaataaaggtgagaaaataataataataataannnnnnnnnnnnnnnnnntaataataataataatattgtaatggagcactttttatggccaccaaaaacatgaaatcgacaaatgttcttatgcaaatgcaaatgaccataatgtgtcactctcatgctaattaacatttaatttcaattatagtgttcttaattataattaaaatctagctactttcctatagtttgactcttttttacttgaaaatatataccttagctcaccattaacaaattaaacaaattgatatatatatagaaaaacataaatggattttgtgctcttaatttcttaatatgtaaagttcaaaactttattgaatcatttgatcaaacctaatctagctaatagtcaagtacaatatatctttcttatattaaatgtgtacctattcagcagaatttattagtttaatgattttttttaattaaaattaactattaacaataaaacagttaaaccaattaattaattattttttaaatattttaatttaattttaaaatatcaacaaaattagataataattttttatacaaattttaatttaaatttgaattagacgttaatttaattaattaatcatactttataataaatttattagttatcttgttttaaatatataaacttatttacttattttattgtttaaaaaaattaattaaatatattttttaataaataaattt

SEQ ID NO: 28087 - DNA, 5034 bp, Cannabis sativa
  modified_base (4815)..(4816): a, c, t, g, unknown or other
tttatgatggtttaaaagatatgtcctatgccatatatagcaaaaggaatgcggtaaggtatgtgagatcttctccagctcggttgaagccgtttaaagaagcttgtaaggaagaaaatattgaatcaaaaggattgctatgtttagatgtagtgacaaaatagaactctacatacatgatggttgaagcagcattgaagtacaagtgtatttttaaatatataaaaagggatgcatactacactaattgttttgaagaagaaataattaatggggaaaaaattaatggcccaccagaagctagtgatttgagcaatgctaaagtatttattaaatttctcaactctttttatcaactcactttgaagttcagtgggtcgttatacataacatcaaattttttctttcaagagattatgtaagttaaagttgagttcaattatatgaaggctagtaaagatgagttgatttgtaaaacggtaaagagcatgcaattaaagtttaacaagtattcaacaatgttgaaaaggttaacttgttgcagtatattgcgtctattttggatccaagattcaaacttgatttggttgggaagagtttcaggtatttatatattgcgtctattttttctcttctatttgttttcacatatttaatattatgtaatcatattactatttatctttttctatatgcattgtttaatgtttattatttaattacttgttagctatctctatgatgcaattatagcagaactaattattcaaaaagttgaaaatatgatgactagattggatgttttttatgaaaagattgttgtgcttcctaattcctccaatgatcaacaagcaactaaaaatgccacttacaaattcaatgcaatatcaagtaggacatcattctttatcaagctcaagtttgtgtcaagtgaagtaccactaatgatttggatgattattttaacgaaagaaaggaaaatttgcttgataatgtagattttaacattctagattggtggaaagggaataggagtaagtatcctattgtctctcacattgttaaagatattttggcaattcaaatgtctagtgttgcttctaaatcagctttttctactagaggatattataatatttttatttatggaatgaaataaatgaattaatattgagataaatgagtatttcatatttattaaatttagacaatattaattgcgtgatactctatatatgatcagattttaatattcatcaccggatttgatttcctaaattaattgtcaaaatattctgaaaattaatgtgacatagatattgatggagtatctcatctatatggatctctttattattgtatttagaatattttatatttaaaaacatgcaatttggtcgtcataattcattttttcggtcaggtgcttgggtcgagtccatcgaacccacagggaaaaacgggtcaattttgacccgtctgactgaagaagaagctccaaaggatgtgtcattcttcatgtcttgggaaaccttcattgttgaaaaatgacgtgtcgttttgcatatatcaaaaacgacatgtcgttttgcatatatcaaaacgacatgtcgtttatggcaacggctttttcaaaaaaaaaaaaaataaaggaaaaattctgatttttttataaattttttatttatttggaatattaattatatatctaatttttgttaatttagtcaataaattaaatttattcaatttttctttttttatttaatacacatatttagaattaatatgttatttagtataacttaaaagtgaaaaaaattttaatttgataatttattagatgatttatttaggcatgtaataatagttcttatttttataattgtgcatttaattatatattaccaaatttatgtaacttattgtctaaattaataaattttgaaaaatctgtcattaattatatctttagaaatttacattttattaatttatgtttgtatgatttaaatgctatacataaattccatatatagtgcaaaatatttttagaaaaatattaaaacattaagataggttgaatattttatttaccacattaagtttcataaaacttcataaaataattattcataaaatattcttgaaatgaataaaatgtaggaattttgtggtttgacataagataatatgaacctgggacaaatactcatatctagaacagtttttaatgatcttctcacgaccacactaggagcactaatctcagtgattgtctattatgttaataacgaaattacttttaggtagaacccaatacctaattgctaacgcaaatttttgttaaccagatatgagcattaaaggtgataaacttgcacagaataataaaaacagtaaagaaaaaagtatgaacacaaaggcttttcatgtggttttgtagttaaaattctgcatagtccacgagtcaatcttataagaattctgatactgttctaggacttttttctcttatgaattttttgtcccttttttagtctaacttgcctctatttataattacatagtcaggcaattaattacagagttgactgtaatctttacaacaattataccccctaaaatcgtggggtttgattacatatcacgtaatagaaatgcggttaatatttgaatatcacacaattgtgattattttgcttttacttggtcaaggtaatcgtgtattaaacacgttttaaattatgacgctctgggatatctcgataggaactcagtgtcgatgaccttgatagcgagctggagtttttcccctatctttccaagtttgataatatacgcctcgttgcttcttcacttgaagatataacacttcattttgacaatcgcagttcttaatctcaaagagtacttcaaaagttaacatcatttgaatgtcagcttctgcttaagagaactgactcgtcaagactataaatctcactaaaagatgtgcctttttatagtgagatgggcacctcgctattagttgcttgggtttacccgatgattatacttagtttgtatattgtatattatacgctaagtgtctttataatcattatacctcgcttatgtctactcatgcttcacgaggttgatgtctcgccttgtgcatccaatgccgcatggtttctcattaatgtacaagacaaaattttgtatatctttattttgcgtaagacattatagtcaggaagttgtaaatatattctgtcacgtccgcatgtaatgagttattccattttcaaatataattactgtgtcatgcattgatccacattcttcccaatttgacacgtgttttccgttgaaatggtagccaaattttaggtatagcaattgccccttaaaaagttctttttaataagaagtggtttttaaatgatcacagagggtacatttgtcataatctctttcttcaaggccatgcatgcccttaaactttacggtttcacggttttaaggttcattattagcattaatgaaccgccctttcatcttctacttcactcccaactgttagattttccaacctttggccttaccgttactgggttataagtataaaatgatggctcaggctagccatattccataaactcctgctttttggtgaatttcatccaaaagttggattgccattttcctgcggagatgtcccatccaggcttagaaacttatccctcaaaacttgtaacaccggaatataccaactgcttttcctctccttatgttcccaaaaacttcaaacctttgattaaattggaaacgaaagattccaagactgatgatcacccgattaatccaaaccaaggagatactgccaactgttacaggcgattctaacaagggatttcaaaaagtaagcatcattctttgtaaatagtggactaatctgaattctttttttttttccactattgcttcattgatcttttatctttgtttctacagcaatggacgtagattttgagagcatgttcaaaggtcttccctgagccgataaaaaattcaggaagacggtaacccaagttaacgagggcatggatttcactaaagaagctgaacggctcaagaccaaagcttacacgaggaaatctttaagccagcaaatcactgtgttgagaaatttcctgaggctaggaagtctcagctgtagggaatgaggtctctgctgcaagaaatgggatcttctaatgcaaggaatgaaggccccttttgcatagaatgaggtctatgcaacgaggaccatagaaggaaatgttactgaatcagtacatcaggtcgagtccttttgcttggagctggtctttctcgagatctactctctcctttaaccttgtgttctttgtttaggaaaatggcctaatggtttgcccctagtgacatttttgtaaggacaagttcgtagaccaactttgtttttttcttatcttaaatgtattgtacttttacattcgaacttaatatatttgtgttttcttgcgttttcattcacaatgtaaacaactatattttgatcaaatatagagtacttttggtctttccattgctcgcaatttttctatttaagtagttagtaatctactatgtgtgcaggcagtttattatctaccagacttttgatttacgagcagttatcaattctgcctcgcaatgacggttataatctgtcttaaccaaacttgaatatacttctaatgattttattactttgtacatttttgattgcttatatgaatagttatgagttatgagttatatctcatnnataacttttgattttcctttcccataagataagtttttaatcaaaaaattataattgtttgatccctttctcgtcagataggtttgatcaggaagttttaacaattcgacgcctctctcgtcaaaaaggtttagtcaggaagtcataacagttcaaccactttctcatcataaaggtttggtcgagaaacaagaaacaatgctattgatatgtgtgct

SEQ ID NO: 28088 - DNA, 1208 bp, Cannabis sativa
ttgccacttgccacattgatactcgtgaaatcatagttatgtagtttggttattttcatgacataaatgctttcactactaaaaaaatgaatttttctaatgtttttaagagttgggtatgtcattgatctttatgatcgacgcctgttcggccgtcgcaaaaataaatagtataaacattggtagaaaatcacatgtatgtctatgtcctaattgtttaaaattatcggtaataactggcattatagttgacaatttagaacagccaacaaagaaattgtcaattgttcaaaatcatcacattaaaaaaattcagatatgagctacacgagcctaagatctatcaaaatcaaactaaataaatacagatctaaaacaaatcaaaatccatgaaatagatgcacaaaattaaaaattctaaacacataatttcaagtttcaaattaataaatttatagagttggtcgggttcgatctacagcttcgaccaactgggatcccaacttcgacgcaagtttggtcatttgcgagcccccaacatagaacaaccacaaatctgtagacaaataaaaaaaaggttaaagattcaatgaacagagagagaacccaagatccatacaataaataaaaatagagaagaaaaagatgaatctaaaaaacagaaaagaataaaaagttgaagaagagagaatgagatgaggtcgatagacatttacctcatgaaagtttttgggattgacgcatagcttgttgcgtcccttcaaaactgacgctaaatgtttaatatttttttgtgttttgcgtcggttataaaatgacgaaaatagttttttgtgtcattttaaaccgacgtaaaatctttattagtcacttgaaaaccgacgaaaatactcctttttgtagtagtggtatagataaataattttgatagattttgaaataatgataaacaagaaaattaaagaaagcaataaaggtgtttaatcaaggatgggaaatttggaaaaagaatcatgttgatttaattacccaattgttaatgctaattactattctctttcttaatgtgaatgacagattataaaaagtaacctaactcttttcagatcttttaggtcctaaatcacatgcatctaatcaactctgagatagattaacatataatcagtattaagcaataatctaaatgtcacaatggctatgaaaat

SEQ ID NO: 28089 - DNA, 1258 bp, Cannabis sativa
tagaaaggataatgttatttctttaacaaagactgcaagccttcgccactatcaagtcttggaagcttggggagtaaatattattcatgtttttggaagggtgacacatggcaatcgtgactgttaagttaatccgttatgggctggttaaaagctctaccactaggaaaggcccaacccatacaaaaggatgggtccaagcccatcctgggcccaaaggacacacttccgaggcaagatttatctagattcgaaaggacccctgccttcctaagaaggagtgattaaagctctccgaatgagcattaagatacattcagagagggcattccaagaggcgcctcagagttcttttacaagatggcgtagatgtcctctgaaactaaatcccacaagatcaggggtttgtcccctatgtcagagcctaagagtgcgtgcaccaccaaaagtaaaccacccttttatccaaggacacaaatctgacactacaacacatataaacggcacatgcaagatatctgttaaggatcgtgtgatccctagacgtacggaacgccttcgccccacgagctgggtttcagttagtgggccccatagtcatgaatttcatgtatagtgggccaagtttacatgcaaccctcgcgggtcacagatacaccctggttcatagcctataaatactactttataccctcatgtaaaggttgacaaattcatgataaaaacaatatagcaagaagttagggttcttaagcttgtaaaatctccattgtaatacatcaaggtcgtttgactaaatacaaatgactcgtggactagggttcattaacacccgacaacgtgaaaattcttgtctctactctttacaaatttaattagtctcttaactctgattataatctgtttttaaaaatctcaataaacataaaagtattacggttaaacttaaattataattatcgataaattttgaatattattatattttctttttttatataaatataacacgtaaaaattaaatatttttaattagaaataatttgtttaatgaataacataaaaacttaattatacaactaaaaatatacaattccaaaataaaaactaaaattataactaagtatacgtgcattgtacgtaatattaacccaatatattttaaattaataacaaaataaataaataaacatatataaaagacattaatttgaaacaaatccttatataataaaatacaataagaaagaaaaatatt

SEQ ID NO: 28090 - DNA, 1625 bp, Cannabis sativa
agaaattcacatttagggtgttaataaacatacttgttaataaatctagatcatggtaaaatattttccaacaaataggccttatccaataatcttgacaagatttttgcaacacagataaagatacaggaagatagtggatcaccctgtctcaagccacatccaggctaggggtgttcattgaatcacatctaatggatttggtcttaaccgatctaatctaattatttattggatgttggtttttttcaaccgatccaatccaattgaattgagacaaatgatacgattcgatccggtctaatagatgcattgaattggatcatttctaaccattggatgcatcaacaaattttctattgcattggatccatccaatctttattagttttagtatgttgaacttcattaatatatatatatataacataatttaaaatctaattctcatagtaataaaacacaaatataacatacataataagcactagtaatttagtctaacctaattttcatatgccataatcaaaatataacacaacacaaatccaatccaaccaaataagcatcactcttaacaaacaagttcactacataaaatgcaaatatcatataaattataaaataaatcacttaaatttaatcttttaggaaaatgatatgtgatattttatacttttgatgtgatctcatatgtgaaagtgcatattaagaatgaaattaattaatatattttttaaaacaaaataataagtatataataaatataattggatgactattagatgataattatatcatttcggttcgattgttcattagatcgtatgtcccatccaacaaccgatgtgataaaattggatttttcataatttacatatgattcgatctaattatgattagatatcctattctattagatcagttgtgaattgatctgttggttgtaattggagttgatgacgttctacacacccataatcctagcttaatgttactaactgacgcaccatttagacacacatttaaagaggtcgtagttaaacattgggagataagcttgtagttactattagagacatgaaaggctttcaacactaggtccataaagtcccaacttatcttaccttcaccatgtccatcttaatagcgaaaagagcttcttttccttgtttccgcttaaaggagtgtatgatctcttgaagtagcacattgttatcctgaatattcttccccaagacaaacattcattgggtaggactaatcagacgagggaggatcaactttatcctattagaaatgattttagaaataactttatgcatcacatttcataaggagataggtctgaattcagatactttttgggggttttgaacttttgggatcaattctacattgaaagaattgatacctttatgcatttttccagaggtgaaaaaattactaactccttggcagaagttctcttctgcagcttgaagaacaaaataggcatgccaattgggcctgacaccttaaggctactcatcttgaaaagtgttagatattagatatatattagctgtaaaagaattagatatttagtaaatatttagtagatatttagtctcctagctttgtat

SEQ ID NO: 28091 - DNA, 7893 bp, Cannabis sativa
  modified_base (5116)..(5116): a, c, t, g, unknown or other
  modified_base (7832)..(7861): a, c, t, g, unknown or other
agccctcttcaactatgtagtcccatacctacacagtctctgaatcaccccacttgaccttccccaggcggtgttggattgtacagcttactcggtctttccccttacagatcacgggactactgactgtcacaacttctgtcttccaagacttgatacccatgatctcataagtgaacaactctagggtgcatgggttagaactataagcaccctatggacccaataccaattaatttggtcaaatcaaattttatcttgtttccaacaactaacatttatttgtgaagtgaacaattcatcatatatttgtaacttaacttagctcacatttagtattatgattatcatctctaagtcctatattaagcaattttgtgtttttgggtcacaaatcttcacattaattcattcatggaaagtgagaaatcaacatataaagggcacaaaatgatttcccccaaaaaagaaaagtagagtgagccgaaagaaattgtaagaataatttataatataatcaactataagcattatagtttggaggttgtcgaccaattgttatcttagtcttctttggtcatcatattaattagacataattttcccattatagagttcaattgttgtaagaaacctcaagtatcaactaccaacgaccatggttcgtttctcactaaattcctaataaacttttgggttttgggggagtgtgggttcccatggccaataattggggacaaaaggtgttcccttgagggagggggggtcttatatattagtgttttttattactaaaatgtgtaagggataataatttgtattagacatgataatgtgacttgaaaatgacttgcacgctagcttcacaattgatacaattagttataaaatttagtaaatatgataaaaatttattaaaaagaaactttagtgtgtgtgagtttgtctcacattgctatgtgtaagtaagatttatgttacatttttttttttatttaaccgtttatatattataatcatgttttacctgggactcgaaccgaggacctccaacacacacccacccacctatggccacttgagctagcctcaagtgattagatttatgttacattcattagcttagttttaagataaaaattataattagcgtgtgattaaatttattaataaaaagataaatgaaaccaacacggggatagatatatttgagtaaaaacaaatgatataagttcacttctaaactataaaatattattattaaggttaattagaatatttgttctctcaactttgacatgtactaaaattatgtttcctgaatttttttggtcgttaaaaatttctttatgaattattaagattgttggatttaaggacttttatccaatttcattcaattttactaattcgtgattgtctatgtactaaattatgctctttgatatttaccaaatcatatccttcaaactttaacacatgtactaaatcatgcctctaaacttttattcttattagatttttcttactaaaattagacaaaagttcttaaatccaacaattttaataattcaagaaaaaatttaatagtcaaaaaaatttaaagtacatgatttaatatatgtcaaagttcaaaaaacaaaaatcttcattaacctattattaaacactaatagtatttagtacgagaagacgtcttacaaataatattagctataatttgattagattaaaatatacaaaattggatattttagtatttctccaaatgaaataatggcccaagagacaagattagtagggaagtagtgtgctcatcaccaaggtcacacaatccaaactcatgtcgacacgtgcctaagatattccaagtcagtcactctcaaatgcccttttccataaaaaggtattggggtcctttgaagggcactagttggatttgtcctattatatatattatgaagatgaaccataactcacatggggtcctatagaaaatgacccttttatttgttcttctcttctctctaatttctgatcatcaatttcattcatcacccttgagtttatttggacaccattgtactatcttcttcaccatcatttgtataatgggcccctttatctcaaccctaatttcttcataattatatatcatctaaaccgtctatttcattaaaaagcaaatgtatgtgacaacaattacactatttgatgatgtttttcaatagtgaaaaaaaaatgaagtctttctcttaattttgtaatgtactattttaattttcaatgactcaacggttcctaattccttaaggaaaatgacctttatatcttcacctactacaaatatgtacgtctaaatctccttaacattgttttggaactcagtaatatatatatatttatatatagctttctaagttggttacgcaagtgtatatctatatctatatatataatatatatgtatataactatataagctttacacatgtatgttttcattaatctgcaaaagtaggtatgattttttttttattccatatattttaattaaataaataatatgaaaaacctttaactacttacaaagtttcatgaaaatacaatattaaataccttaaatatctaattatatgaatgtttaaagaattaagaaatgaaaaccctttaaaagtccataaccaatttctgtctttttttgtatatgtattaagtaaacatactatgataatgacaagtattattcttaactataagtgcttatttcgtaatgcattattattatttgtagtaaatctcaaagaagaaaagatatcccacaaaaaggagtagcataaaaatcggttgcttcccaacaaattaacttttagaaagaaagaaaaagaaaattgttaagtgctaacccatttatgataagttaccaataatagttgtggtttaatgtagtccttccattattattggtaaaaaaacttttcctatcaacaaagaaagatcgatggttgacatatatacaatacagacgatcctatactcagaattaagtccttttcagtaacttataattaagtaaaatacattataatatatatggaatttactttatttatttgttttgttttggttgaattatttcaacttctgttttcttggagtgttatggtattgagcatcttagcttgaatgtggggtcgatggtgttgggctattttttagtatggactaatcatatcataatgagtcatataggtgtttgtattttttcaattttttttttgtaatttcttaaactgtagcgaaattttaaacactgcaaaaatacagtgttgtgcaatgtggtttgagcgatttataatatcatcattatcaaatattataattaaaattttaaaatcaatctaataaaattttaataatataaaaatcttattaaaattttaatatcataacatatatactaatcatcaaagtattatattaacttgtctctgaaaaaaataatgcaataacacatatattatatatatttgtcaataaaaatcatattttaaaaatttgtaactttctaatatatagtgtggtgcggtttgaactgtaattattatattcaaaaccacaaatcgtacatcgtgcaatttggcaaaaataaaaattacaatcgcactgtaaagaattttaaaccgcattttgttttatgagatgtgggcggtttgatgaacaccccttgagtaacatacatacatatatatatatattatattaaaaatatagaaaattatgttgtaggaactattagtttgcatgcaccatttatttttacgccttcaaaagttatactttcagtttttttatgtaatattacatattatagttataacaaatcttttacatgttttcaattttttttttttttgaataaattattatctaaaagtagtgtttaaacgtgtatcattcactataatatatttaaattctgattttgacataatgtatatataccgtcttctatataattaactataatacataatggaaagcgttatgatcaattcaatcatgacaatcaagattattagtttagctcaagaaagcttcaatcacagtaactatggaatgtgttttattgatgatgttcttaatcggattaaaaatgaattatttacaaatattgttggagagaataaaactcaaaatctaggctagaaaaattgtgttttatagttatgactaaagcatagtatttagatatggctaaaacataatttttatatataaattgttactaatttagttttatagtcacaacattatgtattgagactaaaaatatataactgtgatttttataacgaatacatttagctacagatcttttaatcacgaatgataatttatactaagcaacagttttttttaatcataaattttattgtgactaaaagtaaattcgttataataaatgtatactatcgtattataaaatatatataatttatttacatattaaaaatacattaactacatcaataatgcaaagccgcagttacctaccacaaaactctctataaaaactatatgggtctgtttgacatagcttttgaaaaagttaaaagttattttttgaaaaagccgtgataaaaatatgtttggtaaacagttcaaaaacagcttattgaacaatttatggagaagctacaactataaaagctaaaactggtacaattcaatttttttaaaaaagctattttgattaaaaactctataataaatttatttgtaataaaatatatctatttaatacttattattatatcttaaaaaatagttaaaataaataaatatcttattttttttttatttttcttaaaaatattttatattttatatttttaatattaacattccacatcaacttagcgttttttataaatttgagtttttgatatttttttacatgtgataaaaatactataatttatttttatggagtatatataaatttatacttgatggaagaaaataattaaaaatatataaaaaaaatgaaaatttcatataacaaatttttttttatatatatatttatgattataatgaaatagattataanaatattattattataataaaatctaaactactcacaatattttaaaatttataatttatcaatcactctgctcagtttttttacagtttagctacagctgctttttctaatatcacagctacaactgtttttttacaaactatgccaaactggccctatatatgtttgaaatactatatttataaaaaatatataaaaagtataataatatgtggataggttaaatatatatttatgtagtaattattttcaactatatttatctttggatctcattgattaaaagtaaacttgcagccaatcaataaataggtgttgttaaaattaaagtattattagtatttagtattttatttggtgttataatattattagtgtaataagtattgagtcaatattattaattaatagtgagatagtacctataaaaaaataatatcactaatactcaatgcttttaattttacgcttattttggttagatttataactatagggtaggggtagtaatatagtagtactagtactagcagagtaatattatagagtagtacaagtactagctagtagtatcactagaatcaagccaataattttatggaatattctttttttcaattccatatataataatgataaatatagtatttatcatttaactacgaatatatatgatctcatctgttgattattgtacttttgcttgtgtcttgtgagtatttaattaaagaaagagatatatgaaagaaaagaaggtatgaatgtaggcttgaattggctacacattattaatatcattacattacttggaaaagaaaaagagaggaaaataatgaaatgacacatatgtaatggaaatgtgtgagagctttcattttcttgttttatattttcagccaaaagttatgaatgaattggaatttttgaatagttagttgtgttgtgatcatagatgacaagtggcaacaaacgacacttgtcgatattcataaacctccaaaatggatcaaataatgcaaatctgacatcttatcgtccgacacatatgacaacatctcaccaagtggaatgcccacaaatgagtaaataagccatctataagaacaaaagatgattctagtttggagtgaacatcatttggtggtatttgtgttgtttacaaaattttttaaaaactgattaggaaataaatgaagtttcaaaaaaatattgaagattaataagataaactttttttatgtggtaggaagttattaagatttagttcgcgagttaatcttattgaattatagaatattttacacaagagtgtccttacttaatatctaaccagtgtttatagctaaaaattataactttttgcataaagggttagtgtcctatttataggctagagttgggttttaggtgaacctgaacttgctagggacgagttcgcatattgaaataagtctatcgacggggtaaaatatattataatattaactttgggccgagtaggtgaggcctaatttgagggacaatcgtcgtatgtatgggactgtaccacgtgatggtgacaggcgggcgggcgctgtcgatcgtgcttagtcaatgtcagagtagtggacgtttgtcaaaaggtagtttgctattttgttgtgagcctttctaaggcctgacacaggagacaaacccccgattttgtgggatttggcatcaaaagtgcgtcacgtcggattagtcctgggtggtcgaagttttgctatatcccttcgagtactactctttcgggatacccctgcatgtatccgtttatccctcttcagatgcacggtaatctggttaagtgttaatcttctagattcatcttttcgactttacccgtaacgaaattttggttgaatccggatcccattccaattctattcttggaccaggtcattggcttatttgggctttgtgaatgtgcccgcaagcggatttagaatataggaccttacacatgtcacattcccgaaaatgcagataacatgtgtaaattactattgtttactgatttttttgaaaactaatcaaaattaaatatttagagttttgaataaataaatagtaagaaaaaaattacaagatattttatgtggttggagcgttcacgagttaatattattaaatattaaggtttgttttttttttttgtttagcgtaatgacaaaacctattcactaataacttaggagtcttgggttcgaatccatgccctctcacttttgccatccttgcctcaccactgaactagccttagtggcttattaagtttttagctttgtcacaatgtcctctcacaattttcacagagtttcttttctctcgaaattcaaatccctttgagggaggttgaaggccctatttataggaagccatgcatcttaggccgacttaatacaggcctgaaagggagcctaattatgattactctctaaaagagtggtttacaaagcactaatattgatgagaagttgtatccaacccgttgggccgacccaattagtgatccacgtagctaaccttatgtcatgtatgatgtgacgggtgcaataggtagccatcgattaggcgcatgagcaaggaatgtgtcagagtactgggtgtgcaaagcccaatgtttgtaccctgagcccaaaggtgtaagggtcgttggtacgaagtgttggattatgttttaccaagatctagnnnnnnnnnnnnnnnnnnnnnnnnnnnnnntaaatatgaatttttaaaacaatataatttaa

SEQ ID NO: 28092 - DNA, 3847 bp, Cannabis sativa
gaactcattggttcaagtttgtgagccagaagattagttttctttcttgtagtcttttcctaagttatgttggattcttgttgaactatgtttgtttgttttttttaatctttggcccttatagataaataaaaaggagagtaatattttaattgtgtactaactggtgaccattttttcaggtagctttgagtttgatttatgtagtattaaacttttgttaaagttagcattttattttatgttaatgttgttttttaggagaatttgtttttgtgttttttgctaactttgttatacagtatttgaacataaaaaatattttgattatctaaaatgccaaaaggagaaataataaagtcattttttttttttttttgcaatttaattgtcaaaatattttttaatttattttatatgtattaactattgttttcttgtgtgtaatttcgatttttatagttatagtatatcctttaggaatcttttcataaaagagaaggaactttctttataaaatgtgtgaataaatggtttatacatgtataattgattctaattaatgggagttgatattttcagttttatacatggtatacatggtaaaatcgtgatcttggcttcatatggaaagtatgttgattctgtttgagttgtcactactgagtacaattttttcgatgcaaagcagggtttattttaagaaaattttgtatagctataaaatcgtgtttgtggcagtctctagagtttttatgtattataaataggacctagagaatagccaaatgaattcatctctccaagtcttttttatttcatattttcatatttgtgtgaagagtgttccttgtgagattgttctttcactattattcgaataggataaagagctccattgaacaagagaagaagtcttcaggagaaaacttgtacaagacttactttgggagaaagtaaacacgcactcatcaaaagttgaagggagtttgttgttggtggtgttcgaaaattagattggaaaagtacattacaaaagattgcgacaaatcattagagagagtctaaatttgcccaagtcaattatataccattattgttgcttcctcttcctctattgctattgtttcttggactatagttaccaccaccaaatccatctttgttacaagataagcagtgggtgaagagttattaaaggactcattgttaccaaaaagtgagctcaatctatctagcttattgtcaaagctcataagaatgtcatgtattatctgccaagttattttctctcttgcttcaatctgcagcactataggcaaatattccacaccgaaactagatagaacattcgtgacaagaagagattcagggtaaggatcacctgccaaggccaaaacatctacccattactttttttttttttgagataattaatcatattcatcgacccttttctttactgtttgaatttttgtcctgtattcatccattttagcctttgaatgagcatcaaatagtgcttctaaaccactcaatgactctgtagaggatgagaatattgagagttatactctaaaagtaagtaattaatagattaatgtataattttataaggttgtagaagagaattaaaattatacaatatgaataaaactagtcagtattgtattaaagtaaaaggatctttatatagaaatactaagtacaataatacactatactctagtgtgtgtgattttgattcgaatcacatatgtggatagacagtagtaaaggtggttaatttgattatacatgactagatcgatatgtaataacatttttcatcaacgtacgtgatgtttatcatgaaagagttattcatatcacatcgataatcaatagtagatcagtctgaatcctgaatatacatgaactcctatttgtgtttattaagttctttgattcactcattaaagttttctcagaaaagatgattcttataaatttggcttcgggagcttaatataacatgagcagctgggaacatgttatacaataatgaaattcaagctttttcaaaatgattgaatattagtttccttatagtattaattctaggagtgctaacagttggatccaaatctataattggattatagattaactgttcacattaaattaatggtacataaggaatcaagagataattagaaggaaaaagtggtctataagtcacctttatacaacactgtacaagagaagatttaatttgatgaagcaatttgagtgagaattcatttttatgagaaataattcttaacggtaaaatagtaattttgtagaaattattattttgaacaattacatcaattataaattgtgtaattaaatagtatttaatatttaattttatttgatgaaactatattaattagttaaatataatgttattcttaaataatattaacgagagaaatatattattttagtgaaaataatatttattttaatcttagtgaaataagagattaataaaattaatcaattattatttattagaaaaataaataataaatcttatttgtggaaaaattaaaaaaaataattttggaccttaaaatatagcctacatgtgtagggtgcatgtaaatgcctatgataattttgtttaattattttgttattaaaataactcaaatattaaattaaaaattatctttgaattattatattaaatatattattagataatgtatttaaaaataaaaggataataataaataaaaagatataactgatatctgctagtaagttatatgatatttatatttatatttgaattaaatttaaattaaaagttatcttttattttaaatgattaaataaatagtttggtttataacattatgtatatatttatatgatatatatcagaataacaaataagtgaaagataagtgactttataaagaacaaattaagattaaaaaatacaattatttttcactctctctaaacctcacgcctctctctctttctcctcacttaatctcacgccactctatatgtgtggtgtgtgagtttgtgtttttcactatctcatcacagtttctcatgagttgagaatatactgtgattaccaaaattatattcatccaactgaacctaatagctcactctattcctgagtgttgaggttggcttaaaagattgtggcgtaaactcttccaacaagttattgtattggatgttcattaaatttatacaaaaagatagcaagaaaacactgatatgctacaagaggtattattttcttttcatgtagtttagattgaatctgtatattattatgagtaaatccttagcaattgtggttcatattggatttaaattaatttttattaaaacccacttctggtttcacttttgatatggaccacaaaaactaacagagcatcccataacttttgtagtaatggtttcagtcattgatccatagagccaacctgtaatgaccgcatattggatttaaatcaatttttattaaaacccacttctagtttcacctttgatatggaccataaaaactaactgagcatcccataaattttgtaggaatggtttcagtcattgattcgtagagccaacctgtaatgaccgcataattaaatcatgagaattaacacataattaaggagtagattattagattgtgattctatgttcttaatagaaaattagggcttattgttagaaataggacctaggaaaataatttctcaattacagagatatatttaaattctaagtgtattatttatgttatatatgaagttttatatttttttatattttatgtccg

SEQ ID NO: 28093 - DNA, 4471 bp, Cannabis sativa
  modified_base (2221)..(2235): a, c, t, g, unknown or other
  modified_base (4393)..(4396): a, c, t, g, unknown or other
aatagttaaatctcaatattttctaaagaaagagaagatgctcgaaagaatgcctaagatactgtaatttaaattgcctaggtagataaaatagcaacctagatgcagggccagccccaggtgttaacctaggcactaggccttgtaatttgtgcccaggaattgttgtttttttcgcgaaaggacccatttcgccatttttgatgaaggtggatttgatgcaaaatttggatctctgattgaacactcaaaaggcacccagattgacacaatgttaacctgggcgctaggtgctcggggccctagggtcccaggtgctcaaaaatcaacttgctctgattttgattacgatgcctcaaatatgtctgttgtatgtatagttgatgtcccaatgaaatttttgaccactttgcactaagacggtcccgaaaactaaaaccctagttgaggttgtcaacttgggcactaggtgaaaccctaggtgcccaagttggcttccgggttacaagttcgtgtaatttcaacacccaagacttgaattaggttgcgccatgtcttcatggtatagaatattgaaagataatgggtttgattcgagttattggattccaaactttcatctcaaaaatctctaagtcaacctgggcacaaggcttgggtcccctcccaggtcaacttctatgactcgggtcttctcaatagcatgacattttccttcatgccacgtgtcaaacattaatgtacacgtcaccaaggaaagtttctaggttaacaaaataattaatcaagaagatgaacccaaggaaataaaagaataaataagcaaaatatacaagaatcaaattctgtatattattctaatgatgatgtggtggtctctgggatctgaaattatattatgtggagagtctcgttcacaagacttagcttgcatagtagaatgacaaatagcgtctataagagttatagaatgtgttggaattacttttagtgaaagtgagagattatttggatttatgccctaaaagcaagtatttaatggataatatattatagaatatatgaaatgcaattataagataaatgaatacattaattatataggtataattaataaatatctgaaaattccttatgcatatggagtttgtataatcttgtaaggttgtacaatatgaatgaaacaagttcgtagtgtattaaagtaagggatctttaatatggaattatcaagtacggtttactatacactatactctagtgtatgtgattttgattcggatcacatatttagatagacatgtagtaaaagtgttgtgtataatttgattatacatgactagaccgatatgtaataaaatctttcattaacatgtcatttaccataaaagagttactcatttcacaacgatgatcattagtagatcagtctgaatcttgagtatacatgaacacctatttatattcatgaagttctttgattcacttgttaaaatttctcagagaagataattcttacaacttctattttgggagcttaataacatgagtggctgggaacatgtcatacaataatggaatcaaagcttttcaagaggatcgaatattagttcccttatagtgttaattctgggagtgctagcagttggatccaaatctataattggattatagattaactgctcacattgaattaatggtacataaggaatcaagagataattagaaaggtaaaatggtaattttaaccaactctacttatgagctaattattagagaaaaactacttatattgattatattaatagactacaagtaagaattctgtaaatataagtctatattatcaaagagtacaattccatatttatagtggagtaataatggaattaatgaactgggttattctattgaagagttcaataataatcaagtatttattggagctttcaaatataggtccatagtccccagatcacctctatacaacactgtataggggaaagtttaatttaatgagtaaatttgagaaagaattaatttctatgagtactaattcttaagggcaacatagtaattttgtggaaattattattttgaataattatattaattatgaaatgtattaaagtggtaaataactatttagtttttttttattaaaactacattaattagttaaatataatattattcataaataatattaaagagagaaatnnnnnnnnnnnnnnnaaataatatttattttaatcctaataaaataagagattaatgagaattaattaattattatttattgacaaaacaaattataaatcttatttgtgaagaaaataagaaaactaattttgggctttaaaacatgcccacacgtgtaggccttgtcccacacttgtagggtgacatgtaaaagcctatgtgattttttttttttgattatttcctttataaaataaatcaaattaaatggataattatcttttaattattgtattaaatatattataagataatgtatttaaaattaaagataatataaaataataggatattattaatttttgttattcaatttatatgatattattttgaatttaaattaaaataaaatattatcttttttattttattggattaaataaagagtttatttattattatgtatatgatatatatataaataatatataattaatactatgtataggatacatgacaaataatacataacttttagacattagtattcaggattgaaaaatagtattatttttcaagctctctctctaaagcccttcacgcctactatctctctatacttctcttcacgctactctctctcgaggagtggtgtgtgtgtttttccaatctcaatcacagtgtctcatgagttgagaatacactgtgattagcaaattattttaatcttggtataaatttaaaagcccactcttttctgagtgttgaggctaatctgaaagaaactagtatgaagtcttcaacgagttctattactggatttgatgttcattttgattatagaaaaatttgcaaggaaaccctgataggcaacaagagataaatctctatactaattagttaggtttgtattatgtattattgtgttgagatctcgggtttaaggctcatatcagattcaacaaatatttttaattaaatttgattttattctcttccactgtgactctgtatgaaccctaaaaatgaacagatccttcattcttaaattcgtagggcaaatcactagataacaataaaccccctatatgttcaaaagcttgtgtgctcttggtcagctacatgcattttgatttagttttacccagagtaggaatccatgaaagacaagaacttgtattctgagatagtatcgatcatctattctatccttagaagagggaagcaatcactactacaaaattagcttttcccaacaatttataattgtcttttatactatttcccaacggttcctaaaaccgttggctatgtgggtgtcataaaaatatagaactttaaatgacggtttaaaactgttggaaaagttattttaattgacggtttacaactgtaagaaaaaatctttttaaatgactgtgtataactgttggcaaaaatattatgtagattaaaaaataaatttaaactaatttattatatatgaattattatgtaattacaataataatataaataaattttaataaaaataataatgtaaataaaaaataataaaataagaatcataaaacataaactcaaattattatgtttaaaatttttcaaaatcataaaaataatttgttttttcatttattctttcttttccttttatgctcttcctatatttgtatatccatatattattaccataagtaattaagaaggtcacttcaaattactgtaactggcttttcaaggctcaatgagacgccctttctaccccatcgatcgatcatctctgcaaaagcatcgtcttggtaacttgccataatattacactactaattgacattgttattattctccaaactttctgcaaacaacaaattgaatcacaatagaaggtctaaaaagagtatcatagaaaatgtaatacattatcaaacaagtaaaacaaaattatcttttcgaatattttacaacaaactgctattataaaaaattataataaaaagtataaagaatatttattctactcatctccacatgttttacataaatacactggcggacccaattaaggaccagtatgggcctaagcccatgttgaaaaaaaatatttcttttacttcttaactaaaaaaaaatctttaaattattttaattatcattcatcattttcaaaacatgaaaactcgtcgaggannnntctaaagatatgagctcaaaaattgatatatttgctaaaattttaggatatttagtatgttatatattttgaaca

SEQ ID NO: 28094 - DNA, 1789 bp, Cannabis sativa
  modified_base (176)..(178): a, c, t, g, unknown or other
attggtactacctatatcaacaaggtgcatcttgtttttcggtagtccatcacgaaagaactccacagttaagcatgcttagcctgggataatttcaggattggtgaactcctgaaaatttttctcaggaagtgtgcaagtgaggacaaaacatgctgaaaacactcgtgttggtnnntagggtcagtcatcagtccagaaagcagtcagagtgacatactcgtgtataagagtcattcattccgtaggtgtaagggtccagtaaaagcttgaagcagggacgttacataaatagatcgttatatttagttgtaacacaaaaaatgtaaccatactattatgctacaagaattattttctttgcaaatctcagactttgaacactgattgactttcacaacacctagggtactagtaaagattaattgcaacattcatgtaaacaaaatagagttagtttgaaagttcatgctcctgctgatcttttatctattgtaatggttgaaagttcattctaataaagtctaccatttttccttcaaaaaaaaaaaaaaaaaatagagttagtttggtagttaatagtaactaactttttttttttttgagggaaatagttaatagtaactaactttccattaaaaaaaatatttaattttgagtggaactctcaacttccacaaacggtttaataagaattcaatcttcatcgtatttgaaactttaacactcttattaaattgacattatatttaacattattcgaataataccaacaaaattaacttaacatcctcaaacaccctcctaataaaatccatgtcccaactaccattaccaagtttcaaatcaatgagataatatttctagaggtcgaacttatcgaaaattttaaaattattggcctataatgcttaaaaattattcatttctcccaatacttcttagttcacaccaaaaaggcattagacatttaagtgttaacttccaaaatgttgccattaaaaaagtaggcagccctaagaacttcaaaaaatttaccaactatgcctaaacaatacgattttgattttctttgttaacaattatgacatatttacttaagattaatgggaatagattgtatggtattaattctcatttattatattttgaaagtaagaaattagtagcgctggaataaattaggaaaaaaataaaaagaaagattatctcccatttttataagaaatacttttctgtttcctaacttacattatttttattttactttattaattaaaaataagaaaaacaaatatgtcctttaaaaatctataaataaaaaataattttctgttctaacaacaattttgtcaaataaaaaacattccaattacatttcttaattatataaacatgattccaattacagtctaagtttaattttctttggaacacataaaagacaaaggctattgtgaaattaagtaaacataaataaaattttatgcaatagtaattaaaagaaaaatcatttaacaatatctctctcttactctatttttcaaaaattgtacctgaacatccaaatctaagttgataccaacaaaaatctcttcctcatttttagagctattgctctttagaggaatttctggattttcttcttaaaaaataaataaataaacaaagctcatagaagagtgtttgaaattatattcatggtaacacccaatcaaacatgttttatgaacataaaaaaggtaataaaattgctcaaaaatgtttaatgaacaacttaggcttaaca

SEQ ID NO: 28095 - DNA, 4823 bp, Cannabis sativa
atgaaatttattgactacaaaatattcatattttgattaatatttgcttcaacaatttgattttgtagattaaaagcagaaaatgttctaattaataattaataagtacatgtcgtgtaattctgatagctcatattgtgtatttgtttatttactagctgtattttgattaacattttgtgctagtttaataagctttgatgttaaattttttgtgatttattttcttcagttttttacattattattcttctatagttctagagtatagtatatatttaggattaattattattcagttttgttagcagtcttattttttgggaacaaaaattatcataatttgcctacaactaaaaactctataataaatcactatagcaggcattgtcaacttattcaataactatattttgctttctagttttgcagtttttttttttttttttaagaatatgagtatgcaatttttaatgaaagtttacctttattcaaaaataaacaaattgatttagtggcaatttttaaaatataacagtttaaaaaatcatatttatttattatttattaataattaatacctatagttgaattataatttctccatctctatttctaagaaaaatatttgtaataaggtttcttattttgaaagaaaaattagcaagtttccattttcattgctcattaaaaaatgtagctttttttttttgaaaaaaaataacgttcctaaattatcttattaaataaaatataaattttaaaaacattaaggtttgttttaattcttgtccaagaaacattccctaaaacttatttcctaaaaatgatgatttccttttcttgtcctcgaagcaaaaggaggagagactggtggttcttttaagaggaacaacccaactgatcttcttctcaattcgatttcttcttctcaaatcgattagggtttatactcttccaactctctctctttctctctcagctcataatgtcgaagagtgatgtcacatccaaccccaagggtgggttcagttatgatctttgcagaagaaacgctatgctttcggagaaaggtttagagccaccgccttttcgaaagactggtactaccattgttggtctagtttttcaggtacacactcatttttaagactaattggttttgatttgtagcttagctagctagggtttatgcttgaacttccatgccattgttattttttttgaacaattttattgataataatcaaagttgagagaacatcaaaatggtggaaaaaaatttaaccaaactagtttatcattcatcctaagtgcacaacaaccatgaaatatgtagggatgtttcaggaaaactggagatcgagtaaacgttatttttgtgcttttgaatgttaataatttgacttgattttttgtttttttcttgatcaggatggtgtcattcttggtgcagatacaagagccactgaaggtcccatagtttgtgataagaactgtgaaaaaattcattatatggctcccgaaatttactgttgtggtgccggaattgctgctgatactgaggcggtaacaggtatatatgtggctctgtatgaagaacatcttacaatgtgatttagtatgttagagcatttttaatggatatacaaataagtaatgaaaaattaaaatattgctcatttaggaaaaaaaaaaaattctccaacaaaaatgatgtaaatttgacacaacatttgctatgatgcaatatttatattattataaatgtattatttttttatttacataatgtatttataaatatttttttattattttatatataaaaataataataaaattttgattataaaattattagtttttatatttttaataaaacatattaatttgacattaaaatttacatcaagttttataattgtgtattagagcacaatgcgaaaaatttgattcaaatctatcacaaagttttttttacaccaaatataacatagtttttatatattttctattagagatgatgttagtgtgtaataattttcacactattcctatgatttatgactttgattttgataataagaagattagtctttaatggtatgaaatattgaaggttgaaataattcagtttgggaatgattatttgttacattatatatgtttgtgttttaatttgtagatttggtcagttcccaactagtgcttcatgcctataacactggaagaaaatcaagggttattactgccctgaatctacttaggaaacatctaacggagttgagtatagtaattcttttaatttaatattttcaaaatacaaatattataatatgtttctaactaataataataacatgtttttttaggtataaaggtagtatctcagcaactttgatcctcggcggtgttgatgtcactgggcctcatttacatactgtaagttattatacttttcacactcttagaatccttaataataaagttatgaaattaaatgtttgcattatgctttggcagatcgatcctcatggtgctatgaatacattgccctttgatgcaaagggttctggttctcttgcagcaatctcagtatttgagactaaatacaaagaagggctcactgtaagtaattatgtgtgtttatatatatatatatatggcatgttccttcattaatttggttactaaacaatttgctgtattaataatggaatggaatggtgcagagggatgaaggagtgaagatggtaagtgaggcaatatgctctggcatttttaacgacttgggcagtggaagcaatgtcgatatttgcgtaataaccaaggtttaattctttttcattttcatttaaaatattaatgaaataagtatcatttatcaccatgcatgcatagtaatataatgacatgtttcagggacacacagagtatttgaggaaccatttgatgcccaatcatcctccaacctttgtcagtgaaaaaaataaggaacataaattctctgagaagtttggttagtcacacaaattaacttgaattgcctttaattaatttttaaagtccttgttagctaatattacaaattgattgaattttgcagaagttctttcaacaaaggttactccattgaaggagaaggctgaaataattgaagaaggaaattcaatggaagagtgaaaagtgtggagaaccaaatgagtatttcttctaataagttttaagaatggaataaatgtactcgtaatcatttccttttattttacatttacatttacatggtctttttgcttttgaaaaacttaatgacacaagaaattttcaccatttttattgatgcttaaattagcctataattttcgagtacaaagtttgcttgcttttgtttttgttgttgtggtgataaattacaagctatttaaaatgaagtgaaatgtgtttttatgatatttatttataatcgaaaaatacttaacttacaataattactcatataaaaatttataagtacattacaacaagtagctatcatggtaaataatattacttatgtttatgtatagaaaagagagtaaagccagctattttaagatgtaccactttctctttggtggtagtgttccttggttttttcttttctttgtaacaaccaagtgatgatgatgaagaagtttgaggaggtagtactcctaatggatcaacaaatgaaaatatatcttgaggttgtggactactattctttggatcaaaataagttttgttataataatcaatatgaagtgtagcacttggttttagttgagaagaaagagtacaagaacattgttgaccaacatcattcttataataataagtttccttattattattattattattataaaaattagcaagtgtttcttcacttcccttcaacatagtagatctagagagaggaacactactactactactactactactactaccttgtaatgatattgatgatgatgatgatgaattttgaggaggtactcctagtggatcaacaaatgatggaaatatatcatgatgttgtggaccactatttttgggataatttttattataataatcttcaagtgtagcacttggttttaattgagaagaaacatcacaacgttgctgatgatcaccataataataactatttatcattttattttccatgaatatatatagtagatttagaataggaggaatattataactactactactaccttgtaatgatgatgatcggcgagatttttactcggagtagaatattataaacctaaaaaaattcaagatgggtatttaggaacaagacaattatatcgtgatttggattgcgatgaaacaatagatcgatgatgatttggttgaagatgatgatattgatgatgatgatgttgaagatctcctaatgaaaagtaatggtaatttctgactcagtactacaataatgtggtttattgaaacactactagtactctcaaagtaataatcttcttctttttatttttatgatgataattatatgaataggcttaatgaattaagggtttatatgtttagattatataagttataaatttgaacaaacgtataaagcgtcaacgcttaaagtaggagagactaattaatcaattatatattaagactcgactaatatataattaatattatgattccgtgttcaaacttattacatataggaaattaaggaataatatttaagtagtttcatcttaatgtcagtcatcaaaatcatttttgacacagtacgtactacttttttaattattattattatt

SEQ ID NO: 28096 - DNA, 1947 bp, Cannabis sativa
  modified_base (1375)..(1389): a, c, t, g, unknown or other
tcaaaacactttggttagggtgtgttggcttgtgtaattggaatcatgtgtaattcagactaattaaaagatttgacatgttcatttaattaggtaattacacagtaaactatgtaatttgatgtaattgagaggtcttaattacactttctaattctcatgacatatgtataattacaaatttgggccaagtgccaaaaatatctattacatgtgtagcttttttttatcatataaattactacaagaaaaatcacttttaccaacacattttgcaaactgcgttggcaaaaaggttaaagttttaccagtgcacatttgtagtggctaaaatctaactttaaccagcgcatttacgcgttgggaaaagttatttttatcagtgcttttcattttatgctcgtaaaagttctaatactaacgttgatttgccaacatatcagaagtaaattccattttaccagtgcaatactaaacttttgccaacacaaaaatgtgctggcaaaagtgatatttcttgtagtaaattttatttttggacgagtattactattgggtacttcgtggttagtgtgatatttcttaaaaattattgctttatattagactcaatacttaattatactaatactaaacataataatttacaccaaatcgaaattcaaagagttatgcgattgcttaggtaagacgatcagcatatgtcgtcgccactccaccgtcgttggctatggtgaggaagagacaaaccatgaagaaatgttacattttattttaggttacaaagttaccagaaactataacttgaaaaacagaaaagagatgttacattttggttaccaaaaggttaccaacttgtaaccttaaaattagaggagaaaagttacacttaggtttctcagtttattggttatatattagaggaggatccaaataagtataaaagctaaattgatggcaacaataatgtttgatacaaaaaaaactatctggtcaaattatgtaaaactaaaatggtataaatctacaattctaaattttaatatgatatttctaaaattaactccactagaccattctataaaagttacttttttagaagagataattacacaagacactattttttgtaaaaaaattacattttaaagaattttttttttacatttttacgattttctatagaaataacatgaaaacaataagaaaccgtaaaaaataacatcaatataataacaaaaaataacatacatataacaaaaaatcaacaacaaattaacaagataacaacataaaaagaccgtattttttgtaaataaaattaaaaaaaccgtaaaaatgtttaaaattccgtgaaacagtatttttgtaattnnnnnnnnnnnnnnntgtatttgtgaaattatcccatttatagaatgaattttgtgtgacaaatcaaatttgtgccacatagtcgtttgactgtgggcttgtcaacttaggcccaactagctatgagggcccatttggttatgttgacttgatcttcaggatgggcctaaactgaagtgcggtgatgtatatttttctcaaaaaatttacaatattatttttttcagcaaattattttaaaaataataataatattatgaatgcttcaatgattttgagttgggcaattttatgataattagctacaggcccaaaatctacatgtaaacaactaagatttctccctctccacgagttactcattagtatgtcctattagattgttaaaattaagtgtgaatgttactatttgttgtgaaaataggtgggaaatttatatggtatactaatttttgtcatttttttataaaagtattgtcaggtggtattttttacttttttactgtattttttaataagtttcatattgcagtatactgtgttaagttttcactggtgttctactagtatttt

SEQ ID NO: 28097 - DNA, 2608 bp, Cannabis sativa
gtccccctcttcccgcgtccccctgtccttgatcccctctccctacgcacctcctcaccgcgtccccctctccctgtgcaccccctcctcgcgccccctcaccccctctcaacccttcaccccaactcactcaccccttcaatccctcatctcacctcgccccactcttccttctcttgcccacttcaatcccccaaggactaatacatatacaaccttagtatgaatttcttgagtgtattcatagcattgtggggcatgggaggataagagagaataacctagattaagactactggaacaagcatgccacagatgagatagaagcctcactaggaagtgaggacaaagcttacctcatttgaagtacacatggaagaaacaaggtttgtcctacttaaagtacaaggaacaccaaatcacctgacatgctaattcatggtacaaaagagactttgttcctacaaatttggggaccacatgtcattcaaaattatagaagcttcactataaatagcccattggagcatttgtaaaggatagttttcttgggagattaatggaacaatagtcttatattattattctgaaagattagaagaattttcttaatacatttttagtcttgagttcttgatattgttgttgacggtgagaactcatcaactaacttgttggttaaaaaatcaaactatgattcaagctcagatctacaaagaatagaaagataaaatatggattcaaaatgctatctcaaaatggagagaaaatgataaattttctattgttctcaaggtcaagttacaagaataattttccaatctccctcacatctgaaaggggcatttataggctctaattgtttgaagtacaaggtggtcccaaggggacaatgtgtcgcttttaggctacacgtcgcaggtgcaggaggtgaccttgcgcctcgtacctttgtctggtgtcaagtggtccctggatgtaagagtgtggctgcagtgtaccctaggtcgggtcctcagaccttgtaggtgtgttgcctccactactcatacctccttgctcttagagtttgcaggaggcatagttgtacgcttctcctttgcacgccttgtccatgactctcctataatggtattcttttttatgcgtattccaatttcacctccactcttcttcacacgaactactcatttggcatgacacaacacttccacgcttacgggcttgcatgccatacatataagcacgcttccatatgagccccttgtagcctcacagcctcacgtgcaagccccttgcggccttaagtgtgagcgcctcacacccttacatgtgagcccctcgcagcctcccgtgcgagcccccttgcaccctcacgtgcgagcccttgcaacctcgtgtgcaagtgcctcgcacccttaggtgcaagcccctcgtggcctcctatgtgaacgtctcacaccctcaaggcctctcgtgctagccccttgaagccttgtgtgcgagcgcctcctagattctcgtacaaggccctcgcactcttgcatacgagtccctcacacccttgcgtgtgagcacctcgcatccttatgtgtgagcacctcgtggcctttcgtgtgaaccttcattgtacactttgcacacaaattagtacttacgtgacaagcctagaattcgcttggatgccccaccacttgcataaaggctcaatggctcacacaaatgctccacgactcaccaaaatgctccccgacttgcctaacggctcatgttcttgtgcaatgtcacatgggcttgcataatagctcatggggttgcacaatggcacatgggctcacacactagcacatgggctcgcacacccagttgtcacaattcagcagtcttagtattttagccataactctctcgatatatgttagaagtggacgattcaaaatgtgttagagagatgaataagagatatgtggattttatggttatgacaagatctaattctgaatgcatcattaagaaaatccttccaacaattgcaacttagtgacttgatcttactaactctatcactgagttgttacagggtttacctccaagttgtatggatatatctcgagagtttcaagcattgattctcaagattaatgagccctaggccatacacattgattcattcattctttggtcgactcttaaagttgatgtctctcgatccccgagagtaagtgtttactaatctcaaaaatcaactctgtcaaattttggggttaacacttgcccctcccaatctacaaggattcttttgagtgttcttgttgactgagtgaattggggttttgctaggttggagtgcgagccttaccttctccatgtttcttaaggatgttcctactatacatagggtgccttccttgcttgagcccctcagagtagtgaaaaattcttcttactttgtctaacaagtctcaagtttgaacctcatctaacccttttgtctcttttttctttttggtggtcaactgacctaagtcgctcttggggccgagtgactctagtcactgcgagcctgagtgactttgagtcgctcttggggccgagtgactctagtcac

SEQ ID NO: 28098 - DNA, 1789 bp, Cannabis sativa
tagaagaataccctctattttcatttaagtatatttatcttcaaataaaatttaatttaagtatatttagtattatacttaaattatttttacgcactcacataataagatataatttcaaatataatagatttgtattctttatagatagatgtgtaggtttatgggaaagttaagacaaaattttgattagaaaaaaaactatcgtgaagttgatagggataaaataggtaaaataatttaaaaatgaggtaaacataataaattttgaaaaagagggtaaaaattaaagatatcaagttaaaagaggtatgtagtgtaatttcttcctgtaaatacgggcagaaccgggcctaaacataggcgggctaggcttgtacctaggacccacattttctgggggctcaaaataaaaactgaaagatttcattaggtttttatttaagttacattaaatgtattgtacacaacaaatattgatagtttggttagttggattgtatgacacattacacatggtgtgtgtgggtttgagtcacatgacactcttttttaatatatttttttggttgtatatttttgaaagtgaggaccccaaaatttaaatagctttaggcctatatattctcagggttggccttaaatacagatcgagctttctgacacgacacgaaactggtatgagcctagaaggcacgagcatgactaggcacaaaaaaatatgagcttgagcacgacacgacacgatactacaaattgacacgacacgacacgaaaaatatgtctgtaagcacgacacgacacgagaagcacaaaagacacaacatataagcacgaatagactagcctgaaaagtacaacatgtggcaagcccgaaaaagcacaatacgagatattaaaaaaccttataatttataataataatatataaatttatcaattataaataaattaaaataataataaaacttaaatataatattgaatattttaattatataattaaaactattaaaacataaaaaaatgttaggttatatattaatttatttataggatgtgatataaaaatttaaatatttataagtaaatatttaagttatgctaataattcttttatatgattatttataaaatattattaaaatgctatataaatataactaaagctataaaatatatatttattttaataattataaaaaaaaatatataaaaaaaactacgaatttaagcacaacataaaaatattggacttactagttgtgtcgggtttattctttaaaaatattgacacgatatgaaacaactcatattttgttgtgacagaacttattttctaaaaaatataaataaatatagatcagactaacacgacacgcacttagaatactctgcacgtgcagaccaatttttttgtcgtaaaataatcatggaacccaaataaacaactagaataagcattggaattatgacttttccttttctaggtgggattaggacatttacaaaaataaaatttgttcctaaaattacaattttacggatttacaatttttttgaatacatttttacgacattagacaaaatatcagtttctgtacaaaagaaaacaaagttgtataataacattggaggccgaaaattccacagcccaaaaaaaggcccaaaggaccggtccttcaagactatagcaataagtgaaaattacatgaaatatgggatttcataataaagttagaaaaatatggcatttttaggtttaccacttttctatggcattttttca

SEQ ID NO: 28099 - DNA, 5066 bp, Cannabis sativa
atgggcaatggtctccctctccgaattgcagaatttgcacaaaatgggtacgttaacatgcttggtctgcaattgagttgtagttggaagacagccagaaatggctctccaaccaaaatgaaggaccttgggaggtacttttatttgccaaaaacttttccagaaattgtcactggtttgagcaccactttcctcaccttgaagaagtcggtaagagcttttaacagagtagaaaccagcagcttctctattccaaaaccagcagtcaggtgcttcatgttgagaaagaggtatgcctacaatcagatctttatcacgctcattaaacagatcggatagcacgtccacatcccaacttcgatggttaatttgcatcagactggccacggttttcccttccagacctggatgaaaagaagtcacatacggctgctgtagatcaggtaaccaaggatctgtcaatatattagtgattgcaccagtaccaattcgaatcctagcacctgccttgatgatgtccttagtttcaatgatgctcttccatataaaacttgggttgttcccaacatttgcattgagaaaattatcattggggaaatatcgagccttatagatctttgtaaccaacgaggattgagctgttaaaagcctccacgcttgttttcccaataaagcaaggttgtagtttctgaagtctctgaatcctagtcctccaaaactcttatgtttacacattttcttccaactaacccaactcactccttgtttattcttagacgattgccaccaaaacttgctcataagactttcaaggccgtgacaagtttctaagggcaagagaaagacggacatagcatagctaggaaaggcttgtgctactgtctttaatagaatctcttttccagcttttgaaagaaaacgactctcccactggtttattctcttctgcactttattttttaggaaacccaagattgcatttttgtttctaccaactaggcaaggtagaccaagataagaactagactcattagcttcctttatccccataacattgcagatcaaacttctaacagtaggtaacgtattactactgaaaaataatgaggatttgtcaaagttaacagtttgtccagaggcattctcgaaaatactcagcaattggatgacattggaggcttcattctcattagctctacaatagacataactgtcatcagcgaacagcatgtgtgagataaccggagccctgtttgccactttacaacctctaatccttctactaagctcaaattgcttaattaacgaggagaaaccttcagcacaaatcaagaatagatatgaagacaaggggtccccttgacggatgcctctctttggaataataggacccatctctctaccactgttgagaattgtatagcgaaccgaagtcacacatttcagaatcaagtgaacccaatgagtatcaaatcccattttaagcatcatgtctttaaggaaactccactcaaccctatcatatgctttactgaaatccaagctaacagccatgtaaccctctttaccacgtctcttccgctttaaatagtgcattatttcataagaaatcatgatgttattcgtaataagtcttccgggaacaaatgcactttgattatccgagatcaactgaggcaacacttctttaagacgattagatagaaccttagacaatattttatataagacattacacaacgaaattggtctaagatcgctcatggaagtaggatttcgcacctttggaattaaaaccatatgtgtgtcattcaacccctgaggtaactcgccatttgagaaaaaattcctcaccatttggacggtatcgggtccaacagtactccagcaacgttgaaagaaacccggtgtcattccgtcggggcctggcgatttgtcagggtgcatttgaaataaggctttacgaacctcctcacttgaaactggggcaacaaggctttcattttgagtaactgttactgtagcagggatgttgttaataacttcagaagtatcaacaccagatgagcaaaatagatggtcaaaataagaagtgataacctcagcaagaccatcatgccacccaatccaatccccattcgaatttttaagtttggtgatagagttatgctttttacgagaggaagcatgagagtggaaatacttactgttatgatcgccatcccgtaaccaaagttgcttcgaccgctgccgccaaaaaacttctcgcttagcatatatctcaaacagttcattttgagcttcttgaaacttagttatggaggctgcgtctcgacccttcttccacaacttaatttccttcttacactgctgtattttactcttgaaattaccagtgtaacattgcccccaatccgcaagagctttaccacacgactcaatttttgcagtcacagaagaagagttactgaattcccaacagtcgctaactatctgcgtacataatggctccctcagccaggcgttttcgaacctgaatctcttcttagcaaaagtgacatcaggatcgtaaggggaaaggagaatgggagaatgatcgctgctggaaaactccaaattgaataacttagctgatatgaaagtatcaatccatttttgattgaccacagccctatcaagtctaacttcaacccaactcgccgtgcctcttcccttctcccacgtataagggtgtccaattagatcaagatcacacagattgcattcagaaagagcattattgaaaccttctataagccaactcggatagtgattgcctccctttttatcctcttgactcaccacattattcaagtcacctataacacaccaaggataatcatacttagtagcaagagttttcagtaagatccatgtcttgtgacggaggcttctattaggttctccataacatccagtgagacgccaatcacctttttttatcatcatgaatcttgacatctatatagttgttggagtagcctagtaattgaacttcttcttggaccttccaaagcaaggctataccaccactccttccacaaacatcaactgttataagaccctcaaagtctatagcagttctaattttttcaagagtatccttcctacttagagtctcacacaagaaaacaaatttgggcctcttttggatcacaaggtccttaaggaactgtaaagcccgtgggttcccaagcccacggcagttccaactaagaatactcataatcctaggtgggcctggaccccagaacccaccaaagacccattttttgaaagtccattcaggacaagacttgccacctcatctttgtcattttctaaagcttgttcctcatcaacggttcttcttcgttttgaatcagcaacaattaatgttggaggattcatagcaccttcattatctgtcaccataggttgaccattgtagatagaatctctgtcattattattttccaaatcaatgaccctagtttgaaggccattatttcttccttgattcactccgtaaggaatgcgattgacataatctccctaatttggtgcattgatcacatcatcggtagctccagcattcaatggttcgtcggaaaagtgatcgtccgtcgctgttcccgttcgtaaccaacgagatccaaatttctgcttctttctaatcggttcagccttcatccacaggccaaacggtttctcaatctcctccagaggtgtatcaaataaacgatggcagaatcgctccgagtggccaatgataccacaaataaaacaaaatgtgggaacagattcgtacttaaattggcaccacaaccattctccattagtcttctttaacttgattcttcttttcaaatgcttctctatgttgattgtcactcgtatgcgaaggtaatccctccaaattcctaagaagtttttaggatcagatttgatgaaagagcctatatagttaccaacatttcttgcatttgcttcagtcatgaaacccgttttgaggttatgaagttgaacccatatgtcaagacgatgtagagaaacactccttggatcctcacctcttttcaatctctcaaagactagttggaacctgttaaaagtccatgggctgccatccataaccctttgtatatcaatttcatgatagaattggaaaatatagagattaagatccaactctttcacaaacattccttttcccggttgccataaggacgccaatgtattttgcatagcatcgaaatcgatcaatcttttagttaagaattttcccaccaaacaccatctgtcatcaatgggctgaccaacatcagcaactatatcacacagtagtcccccatcttcttcttcttccaattggatttgatcatactgatcgttgatgtttgacatattgtggctacttaaggccataatcaccaataacaaaagacagaccaaaacaaaaactggattttcaaaagagcaacagacacaaacaacttcacaacaagactctcacaactaactcatgtcagatgacaagaccatatgtacactttacaaatatacatataatgtacaagtaatgcttccaaaaaacttcatttctattcttctaaaaataataaactagagctgcaatagtagcaacatatacaattctcctaaatttagttatttgaaagaatagtaatttagcaacatatacatttgagtaccttcatatttataaaattttattaatcacatttgaatacaaagtattgagtctctataaataaaacataaagtataactaattgttaatgttgggtagtgcgagattagagagaaagagaacttttgtacagattgttattgattgtattgaaatggtattatactaggatatttatatacacagagaaagtaatagcttctaatcattttctaacaaacacactaactgtcataactaacatagtgtaatagaaataacagaaatttaactaactctcttgacagctccctttaaacttagtgtaaagtctttttttggcaagttagttgac

SEQ ID NO: 28100 - DNA, 1685 bp, Cannabis sativa
aaacggtcacaaaattactttgaatttctgtagttacattattttttttttttttttgaatttctgtagttacactaatttatttaacaagaaatgaaaaatagttttggttgggagctgaatttgttgaccttttttattcaacagtaaatctagaagattttgtgtagtgaaaaatgactaatttacccttgaataatgaagctgctttttcctacacatcaacattaacatttttaatgagtctatgttactgtggatctcaaaatgttctttcttggttttagaactattcagcaaatttcttaatccgaggaatatattgggtttttcctttaatgtcttttttttttttctttgttatgatgatgatgatgatgatgatgatgataagtgtaactgtgtaagtataagcatgtgtcatgttcattgtttttgctctctttttcttcctttctttttgtcttgttttcttttccttcaatagggaagagagcatagacaaagtacctttatcttgtttggattacaataagcaaacgtccatttttcactaacctaaataattcttttgcttctcccttttattatcagtgatcttaaataagattaatctctccaaattaatctagatttccttatgagataacggatgaaagtgttctttctatataattatcctaatcacgatgagtatgatttatgaaagaaatctaagagcctgattttaaaaaaaaaaaaaaaaagagcctgattagttgttttttatataaaaataataataataataattcctttaagtatgtgtagcatttttagttgaaatatttcctctctcctctctttttctctaaccattatctttttttttttttttgtttctctcactaaaatataataaccattcatatttcatacatgcattgcatttttaggtagtgcacatatcataacttttctacaaatagaataaaagtttatttatttgaagggattctctaccatacaaaaccataaaagatagcctatttaatttttatattaaaaatatataaaaaaatctgttgcataccaattaggcagttttatttaatttattttatagaacaaattaggcagttttatttaatttatcttattgaacaaattaggcagttttacttgtatacccaaagataactcttatcaatttttttgtcaacgtcactaaaatttattaagtgtcaccattacaagaaatgatcattataaatagtaagtggaatctcttccatccgcaatgttgaagttacgacttacataaaactaaaaagaaattccttaaaaaaactagattataaaactttagtatttgaaaaaacaaaaaacacataactcattaagatataattgagaactaacaccaaaaacaaatactaaagctctgactcaaggtctaatatcccgaacccatcttaatcctaccaacaacacaaaaacttttgcttaaaaagttgatgaagtatctctaacttatgttttttcgccccactaataaaacatctacaaaataatgaaaaactatattagtaattaatatttgataaatataaaaatttaaataaatattgtaacataattatatgatgtaaatgctaaattttatctatggtcatctctattattaaaattgttatcattatatt

SEQ ID NO: 28101 - DNA, 1350 bp, Cannabis sativa
taatgaatttgtatataatattattactaattaactaatttagttacaattttttttatgatccgtttagctaattttctacttagaagcttggatttatttttaccgaacaattattatataatttttttaaaatgaaaattactttttaaatgttcaaatatcaataaaaaaaattaatttttgtgagtgaaaatatttgaaaatagcttctcatgtttcattttttttttttttttttatgtggaagaattggggctatgttcactgcagctgtattgggttttgaattctgatactcatggcagccatggaaggagtcatacccaaccaaaatcaacatcaccaatttcaacttcaaccccaacaattacaacaacaacaacaacaacagcaacctcaacctgttgttgtagagaggcttaacgacgccgttcagcaacagctcaacctcgagtctgtcaagactcgagcttccagtctcttcaaatccattactcgcattctcgaagactttgacctatatgctcgcaccaacacctctccaaaatggtctctctctctctctctcacgattcgcttttgttttttcaatttctgaatttcgacaaattcaattttggaataatttgtttaattttcctctgagattaggcaagatattatggggcagtattcgatggtgaatcttgagttattcaacattgttgatgaaattaagaaggtttccaaggcttttgtggtacatcccaagaatgtcaatgccgaaaatgctacaagtatgaacctttttcccagcttttattaatgaaattgttctttttagatcatattcttaagtgttaaactttctacttttggattttgtagttcttttcttctattttctcacgatttgccaatttcgaaaatatagttgaaaaaagttaatgcctttagcttctgtatagcttgaatgtagacttgtatattaagttccaagtgttgttatcatttagttaagctatcaaagttttgaattgatagactagatcatatgtgattacagtactgccggttatgctttcctccaaactgttgccggagatggaaaccgaggataatgccaagagagatcaattgcttcatgggatgcagaatttatctgtaacccaacaaattgagaagttaaaggtgatctgaaggaatttattgagtattcagttgttcgttttccatccatgtttctggtcaagatagacatctttggcttttacaggcaagaattgatatgattggagcagcttgtgaaagtgctgagaaagtattagctgacactcgtaaggcctattgttttggaactcggcaagg

SEQ ID NO: 28102 - DNA, 1675 bp, Cannabis sativa
agagagagagagagagagcagagacaatgaaggtgaatatgaaataataaaggaaaatgacataaaatagtgaaagttggcgataactgcgggtttctgttgaagcgtatcaagtgcatgtaccaaactaaaagaaaaatttccaaaaaaaaaaaaaacacacagtgggaccgacaaatcaacaacccgtcacaataatcacattacgtatttttccgccaacctctaatataattatggcttgaaaaaaagggagctttttatatatacggctataagtctttatttgtgcaaaaatacggtacctgaataatttaccctttctaacttttctttttgcaaaattacgatgataaagttgaatgcaatatagtctccgcctttggctccggcagctttttcgacagtcattttggagctactgacattaaaaaccagcaattcatcttttccaacaaatccaaatagaaaaaataaacaaaattatcaaccatttgaggatccattcaagtttgcaagtatttcaataacttggaaaaactatgaatctttgcaaaaagttatttacaggaattcaaatttcaattatgaccattaaatttcaaattcaatgtttattacaacattcaaatcacaacttcaggtaagttcaaaccccttgagcttgtaggtaaatctgaatttattctttattttgatcaactaggtgtttaagatgatctattcttatttatttttaccttgatgtcgggttccgtgtgttgctggatttgatttttttttttttgtataagattgttgttagagacttagagttgctgaaagggttgctctatttgattttctggttctgtttggatagagtttgtaaggttttctgttatgattgctaaaatagttgttctacttttaacatttctgttctttttctagagggtttctataagcgttgctgttggcttgtttaaagggttgctcaattttattcttattttatgcaaatggtagatgtaagtattgttgttaggattgttattatgggtgctttatttaattacttgtgattttacatgtgtttcccattggggttgttaggatttctattaggtttgtgaaatttctttgttgtatggttgatgctacgttttttttaggatttctcttagggttgtgaaatttctttattgtatgattgatgctatgtttttttttttttttatggatgaatgcattttattttttgttattttgcgaatggatattgtaaatagggtgtttattggatcatatttaatagatttagacccaacgaattcaatccaattatttattggatattgaatttgagaaaattagactttataccctttttatattgcctttttttatttttacttttttttttttaaagtttatcatttttacctctttttttaaaacactttaccgattttacccctgtcacctcaatatactttccatgtgactcccttatgtcagggtattttgggtacaataaatataaaaagaagtatatttgaattaaatataaaattagaggtagatttgtttaatttataaataaaagaggtattttcagtaaacccccattaaattttgtcatcccatccaatccaatcgaattaagtcatccgatccgatccaatggatgtat

SEQ ID NO: 28103 - DNA, 1136 bp, Cannabis sativa
cagtcttttgtcaactagtgctgtgcaagatacaaaaggctcttcaaagagtttccccaagcatgagacgaggcatctttcagagcacaaagtgagtataaatttaatacaagaaactgttttattgaatagaacctttagtttttattgacatgtttatttcttagaatgttgccagatgtgctaggtttagtcctgatgggaagtatattgcaaccggaagttctgatacatcaataaagctttttgaggtgatgattttttagttttacttcttgttttttttgcagtaactctttctaattcatttgcagccaattttctgatttaggtttcgaaaatcaagcaaatgatgttgccagatccaagagatggtcctgtgcgacccgtaataaggacattttatgatcacactcaggtgaacctacaattgcctctccattccttttgcgtgccgtgtttttttttttttttcttctgttcagtggttcaagttcttataaatatactttatagaacctgaaaagtgtgacctactctaatgcttttacttgtttcatctcttataaagttcagccaataaacgacttggatttccatccagaaagcaatattcttatttctgcatcgaaagatcatacaataaagtaagccctatccaatgatattttagttaaataaatttcaattcctgttgccttcttattgttttaattcatcgatatgttcagcatccatgggaaaattgaaaacctttaaataggaggtttacacatgatactgttctcctagtggtcataattttacttgatgactggtctcgattgcttgctaatattgaacaagatttaacttccagttattttaaaatacttgttctggtgtgttaggttctttgatatttccaagatgaccgcaaagagggcatttagagttattcaggtttgcatgtcttgtcatcagatgtaggagcgtgtcctttgaattcagctatagagttgtgactaagttatgtatgtcattccttttcactaatgtttttctgatttccaggatacacacaatgtgcgttcagtttctttccatccctctggggattttcttttggcaggtaaatttgtgtgttactcttattt

SEQ ID NO: 28104 - DNA, 2972 bp, Cannabis sativa
gtatccttgtctcgcctaagactatacagtcagtgagttatgaatatactctattaattttatatttaataagttattccattttgcatttaattttataatttttattatatctcttgattcatattccatgagattgacatgtgtcactttttaaagtaataacaattgccccttaaaaattcttttttaataataggtactttttaaatgattacaaagggtataatcgtcttaacccaattttgaaaaagtgagattatatttacacccccaaaagtataaatacaccccaaaactaagtttactccattttattttttaaaatattactttttataaccacaccccatttatttcccaaaataggtcttgtttgaaagaaaacacactccaagtttttttttttttttcatcccaccatttactttaacaaataactccacgtttctacttacggccatgccaataatgttcctttctaatttgtgttgtaagataagatgtgatattagatatgagatatagtatatatactctacatgtttcatatgtatataatgtgtggattatgtaattgattaaaagtttactgtaaaaatgctttcaaaatagaaaaattctgaattttgttgtcttagctagttttgtcttttttatttctttttcttcttgttattgttttatgtttttactttttctttctttcttcaatatcacctctatcatttttgtttgaagtggtagaagtttaaacaatataaaagaagtgagtttttaatagacaaaatgaatataaaaaactgtttattgatctttgcatttagtgtagaaggaagtttgttataaacaacatgaacagaaatttagatttacatgaagaactaaaactttaaaagggataatttagtcattttatattaggataaacaagtaattaaatttttttgactaaaaggggtgtgtttataaactttaggggtgtgaatataactcccctttgaaaaattgcatgcttttgaatttggcggttcatggtttcgaggcacatcattagcattaatgagccatcttttccaattctctcttgttcctatctgttggatctctgttattttaatctgacggtaatcaatctcaaactattaaactaaacaggaactatttttctaccatttctggcctttcaaaaaattcgagttttttcttgcaaaaaaccattctgatttctcgaagctttgcatgccctcgttgtcattgacatatttcttgcgcatccaccctagatatactgttcgacctcaagagttttaaaggttgtcgtgccattcatcccgtcttcagtttcggagcttttcgtcgtacaaaaacttaatttcgaacggtaagtgagccatcctcactcctctattcttttttattttcctgggttatgatccttatactgttaattgcatctttgttactccatttggaattttagtaatttcgatttaattttctgggtaattttttagggtttaggcaaagtaaaaatttaggtttatcatacttataagtctctggtttaataaatttcattcagaaattgggattgctctttttgtagaaatgtctcaatctggttctgaagtttattctccgaagtccttagaaacaaaaaatcctaaggaattagccctcccatacaaacccagaattttaaacctcagtccaaactagagataaacgatgcaaaaattagagacaatttaataaaaaccaatcaggatgaagttgccagtcgttataggcatttcctacaagaaataaccgagggtaaacgtcattacttgcgagatgcagcctggcctaaatttttgtcattatcttctattcttttggctaaacacttatttttacccagagtcacaattgctttttcaccaggtgacctagattttgaaattatgtcttccaagcctcataagtaaaagactccccaagatcacaatgtcacctttgaggctaagcttatcgagtcaaggataagagctataggagactacattggtggtgttttaaagacttgtggcatcaaccaaagcaaggatgttgggttagatccattgcaggtggagaatttaattgttatccaccagaacgaattattcgcgaggaaggcggggaggcaaatggtgaagccagtggtgaggctagtactagtagctcggctgggataggggcttagagcctcgagcatattatggctggagcaattctccccttgagagagtactttaaagagttcatcaaccatcttggaattgctcctttcaaattggttctgatttcctacagaatccttgcaagtctaaaggttatgtataagattttaggatgggagtgtcccaatccccaggaaattgtttatctttattctgttaaggcagttcctacgaggaagcattgtgcaggggggttttactatcttgggactcatacaaatgatcgtaggatcattgtaggattaccaaacaagactgcttttaaggaagatttcttctcgttaagtggcatttccccaatcaagacagccgcatttcgcataatacataagtaaagttttatctcaaacttggttttgaattactctatgtttataatggtagcctcgctgacttatcttatttattctgttgacagcggtctcaaaaagactaactccaactcctgagatggtcgagcggcttaaagttttgatgggccttctgtttggattgcgatcgaccgagtttcttctgaacaaagccaatttgagatctgttggccttctcgcttcaaactagtatacttgtgattacaagtttcccaagtatacatcgtgggataaggttccagttccaactgacaaggagagtcaagattatgttgctcgggcgcactatctccagaatgtaacccctcgggaagctgaagaagatgcatcccga

SEQ ID NO: 28105 - DNA, 3923 bp, Cannabis sativa
  modified_base (1691)..(1694): a, c, t, g, unknown or other
  modified_base (1759)..(1762): a, c, t, g, unknown or other
tgccaataataataatttatccatggccatttccacaatgctcctactagggttgctaatgtcaactttagacaaaacaggtcattttatcttctctttctttaagtaattgttatgttcatgattaccattgtattcagggacgaacgcacattgtgcataggctgcgccacctcttatttaccaaatctcgtttaatataaatatttgatattattttatcttttaattttaaatttcaatccctaaatatttttcattatttatggaatgtagtatacattaaattaattaacttttttttttttactaactttatcaaaatatttaatatacatatgcagttgcccaaattggagtttgctatggactattgggcaacaacttgccatctccacaagaagttatcaatctttacaaacaatacaacatacgaagaatgagattatacagtccaaacgacgccgtttcccgagctctaagtggaagcaacattgagattatgcttggtatcccaaatgatgctctcgaaggtatcgctaacagccaatctacagctgacacgtggatccaaaacaatgttagaaactacaacaatgtaaatttcaagtacattgctgtaggaaacgaaattaaaaccaatgacagagctgcacagtttcttgttcccgccatggaaaggattcaaaactcaatcaactccgcccgccttgcgaatcggatcaaggtctcaacatctgtcgatactggaatcctcggtgtgtcgtacccaccttctagtggttcttttacgtcaaattatgggcctataatcaatcctgtaattcgattcttggtgaacaacagatctccattgttagtaaatgtgtacccatactttagttacaaggaaaactccaacaccatttctcttgactatgctttatttaaatcccaatcagttgtggtgagagatggtcaaaatggatacaaaaatctttttgatgctattttggatgctgtttattctgctcttgagaaagctgggggaagttctttggaaattgttgtttcggagtcgggttggccttcggatgggggattagggacgtcgtttgcgaacgccgggacttatattgctaatttgattcaacatgtgaagggagggactcctaagagaccagggaaggctattgagacttatgtgtttgctatgttcaatgagaatctgaagagccctgaatatgagaaaaattggggacttttcttacctaacaaacagctgaaatacaatattattttgaattaaggtgtattattgcatggccaactcaaagatttggctctttatatgatccaataattatatgttgtaataatgaaagaagttggtgtgtatgtaataaacaattatgagttaaaaatctatgataatacaaggaattggctcttttagtaatataccatatatttgtaagagtaaggaaaaaaaattatggaataattacataaagcacaatattttgtaaaatatttatatttttacgtttgaaagaatattttttttttacatttttacggttttcaaaaaaataacacgaaaacaacataaaatcaataaaaaaattacataaaagtaacatgaaaataacaacgaaaaataacatacaaataacaaaaaattaataagattacaacataaaaagaccgtnnnntctgtaaataaaataaaaaaaatggtaaaaatatttaaaattctgtgaaacagtatttttgtaannnnttttgttatttttatgtttttgtgaaataatctcaaaaattactttatgtttttaattttatggtagattagatcttcaacttttaaaaattatatttttctatacgttataaataggctactaaatttggtaaaaaattaaaataaaatataactctgtaaaaattgatgctcaatcttttcaaaatacttgaatttatttttaaaattattgttctgtaacaatttaaatagcttttcttattttaaaaaaaaatcatctttttaattataaaaataaaaaaatattcccaaaaaatatgtttagtaaaattatttttatttttaaaataagaaacaaaattattaaaaaaattaaaataaaaataagttattttcaaaatttatttaaactgatatttttaatcataatctattttgtatttttcatcaatatttactttagcttctctaactactatctcttactttattttttctctcctcacttaaataaataaaaaacataaaaaaaaaagttaccaaacaaatgtttttttcttttgaaaaaaataaatcaaaatcaaaatttatattttcattttagtggttattattaaattttttttctcatattacttcgaaatttcatagtattgttattaaaatcaggtgtaaaatttactaactactattcaaggtggtccaaaattcattccaatatatatttatatattatgtaaggatcattccattattttaaaattgaaccaatgaaacttattcctttccattctattactttagttagtgtttggttagaagtaatgaaatggaatagaatagaaagaaaataattttcattctattcctttgtttgattgcatattaaagtatggaaatgtcattctaatagaatgactttttcactattttgctagaatgactatttcattttaaaatgtaaagaaagactattccaaaacatgatgagaaaaaatttaataattttttttcaatttttttatacattttaaattttatttcattccattcctattcctattctcattcttattcctatattttcaattctcctaacaaacctaaatttatattcatgttcatacaacaaaattgggtatttttgaaaaaacttttataaaagtgataattttgcaaaacaaaaagtaacaaaattgtatattgggctttcctagtccgtccgtacatcttctccgacaaaatccccaaattcaattcaatttcaatcatcaccattgtggcgaacacgtaccttttcttcaatctcaatctgtatagggaccaagtcaaaccatcaatttcacaactaagattttctctcaaaaagggccaagaaagctggatctttcacactccacatctctgaaaaatcctccaatggctgctgctactgctactacttcccaactctcgtgcttctccgccatcaaccgccagctttactcccattcccgctcctttcttcgtccccaggtaccccttttctctaaagttgacttttttatttcgaatgatcaagtgggcaattgcaatttctgaattttgagcttactgtgttaaaaagtcgtggattttgacgagcgttgagcgaagttgtgggagtataagcaagaacagtttgagttatgtgtctaatgagaggaagccccatgttgaaagagcagagaagtcttcgtatactgatgtggaggaagatcaagaagttgagaatttgaagacgactgagccgaccaaagcagcaaagatccatgatttttgttttggaattccatttggtgagtgttttctttcagggatttgagaattggatctccaaattgattgatatgacttcttctatggtgttttgttttttttacttgtatcaaattgtgctcccgaaattttcagtttattaaaagtttctctagaactattgagattgttagatttaagaaatttggtccgatttcgttcacttttactgatgcgtcaattgtctacgtttcaaattgtgccctctaactttaacttgtagcaaatcgggctccttgaactttcattcattaggcgttttttaataaaattagacggaaattcttgtatctaacgatcttaatagtttaggggaatttataacggcctgaaaagtttagaa

SEQ ID NO: 28106 - DNA, 2309 bp, Cannabis sativa
  modified_base (2129)..(2134): a, c, t, g, unknown or other
gatcagtttttaactgttaaataagagggttctgtgtcagataataagaaaaaatttataaggttattggcacctttgaagacagttgatccaaccatacaattgagcactttcttgaatggtttgttgccatctttacgagctgaattgtgaattcagagaccacaaaatgtggatgacaccatggacatcatttaagacatagaggacaacaacaaagcctcaagacaacgatactcatcttcccatagcatgctagtactggagtcacccacaagggtagagaaaacattagctcagactcatttggaaaattctaccactgaaaattttgaaggcttactaattctgaaatgaagcacaaatgccaaaagggattgtgttttcgttgtgacgacaaatggtctccaggcaaccgatgcaaaaaaccataattaaaagttattatgattccgaagaacatagacaacatcatctcagaccatgaatcagaggaagacaacaaagaaaaagtggaattagaatcaacaaaattgcaacacaatatgttagtttctttccaatcaattgttgggttatctaataattccaccatgcaactcaaaggacaccttagttcaacaacaatcgtcattttgatcgattcaagggctaccagtaactttatttccaaattattagtggcaacaatggccattccagtcacaaaaacaaaggagtatgtggttacaatgggcaacgatgactcgctgaaatgtgaaggggtttgtaaaaacttaaatattcatttccaaggtgtggaagtttgggacaatttcttacccttacaactgcgcagcgctgatgttatcttaggattacagtgtttcaccacacttgggaccaccaaaaccaattcgaagtcgcaaaccatggagttccaactgggaaaaaggattgtcactattaaaggggaaccatctcttaatcgatctttgatctccttaaaaactatgattaagactctccaagctgagaatcaaggtatcattttggagctgagtgctgatagcaaggaggacacacagttggacccaaatataccagaatttttggccgaaattatcaaggaaaacacagttgttttttatatgcaaaagagccttcccccatcacgatcgcatgaacatgccattacactccaacctgactctggccccataagcgttcgtccatgcagatacgctcattcacaaaaaatagagatagaaatattcatctctgatatcttgagagtaggcttcatacaacctagtaccagccctttttcaagtccaattcttcttgtcaagaagaaggatggctcttggcatttttgcgtcgactaccgtgccttaaatcaagtgaccataccaaataagtatctaatccctgttatcgatgagctgttagatgaactacatggtgctctcatcttttctaaattggatttgaaatcaggttacaatcagatacgagtaagaaaggaagatgtgcataagacgatatttcaaacacatgatgaccactacgaacttttggttacgcctttcggtctcacaaatgctccatccacctttcagtcactcatgaataatgtgttctgcccacatttacgtgattgtgtgcttgttttttatgacattttagtgtacaacaagacactagaactccatcagcaacatttttcttaagttttaactctcctacgtaagcaccagctctatgctaataggaaaaagtgctctttcgggcagaagcaagtagaatatcttggccatatcacttctcagctcgaagtcctctcccatttctttgacttcaatgtccggggcatgcctccagtgagtaagatactcttgggcagacactgtagactcactgccgcgaatctcaatcctccttggttcaacaagttcctaaaccatcctatatatctcatcagtagacagtgaacctagaggcacatccctgtcgacaggatcctcctcctcataaatcgaggtagtatgaaattttcgctcttatccagttcatcagcgaagaccacgcctccagagtcaagcatttggctatccgacatgttgctcatctgaaagatagaagatctnnnnnntgtggtgaaagtgcaagaataacaccagtgacctcacccgcataaaagaaatttagaaaatataaaggattaaccaaacatctcaagaaatggctgggtgtatctcaatagcctaatgatcatgtcgctacatgagtattaaggtattcagacacaccaaccatttcgagaattt

SEQ ID NO: 28107 - DNA, 3126 bp, Cannabis sativa
ctcttgtggacttgtattgggtcaatagctattgggcctgggctatcagttccctccccttcgaaactgaccttgtcctcaaggtcggaaagatcatacagcgtacaaaagtctcaaaaattctcccaagtggcatcttctggagcgctcaaagaccattgtacgagcacctgtggtgtacgctcgttgccaaacagccgtgtagctaaaatggcttgaggaatcatcaatggtttattgttaacgctgagttccggaagggcataggatatgagcggtgatggtccataaaatggtttgagttgagagacatggaaagtgggatgaatgcggctacgttcgggtaactcaagagtgtaagccaccggacctgctctggcaaggatagtaaacggcccaaaataccttctgcaaagcttggcattaagtctttttgccacagttgattgtctataaggttgcagcttaactaagaccaaatcacccacattaaagttgatgtccctccttcctttattagcatgttgcttcatcctgttctgcgcttgcaaaagattctgtttaagctgctgtaggacgacatcccgagctactaaatcctcatcaaccgcctgaatagtagtgttgccccgagtgtatgctggaatagtaggtggaggccgaccataaactgcttgaaatggtgtcatatcgattgccgaatgatggctggtattatagtgatattctgcccaccccagaaatttactccatttatgaggattgtcagcggagaaagccctcaaatactgctctaaataccgattggtaacttcggtttggccatccgtttgagggtggtaagaagaactcattcgcaatgtggtgcccatgaactcaaacaacgtgcgccaaaaagcactagtgaatatggggtccctgtcagacacaatcgatcctggtaatccatgtaaacgaataaccatatttgagaacaactcagcaactttagtggcagaatagtgtgatggcaacgctccaaagtgagcatacttcgtcagacgattgactaccaccaaaatattagtgactccacccaaattgggtaatccaactatgaaatccatggctagatcctcccacacgcgctcgggaatctgtaatggttggagtaacccgtgaggaggcgttggtgaatacttcacagtttgacagatgacacaagattgtacatactttttaacttctgccttcatgtgctgccaaaagaaattagcgctcaaccgcaaaaatgttcgttcgggtcccgcatgaccagccactggtgttgtgtggaattcctgtaaaagtcgttgcttcaaattagaatgagcactgatataaagtttctgtttgaagtataacagcccctcatgtacataatagtcttctgtgttcaattcttgctgctgtaactgagtatgaagttgtctcaaatcaggacaagtaatgttttcagctcgcaattcttccaaaaaatcgaaacagacagctgtaatggcagcgaggcgcactaaagtagcattgtcgtgttgacgagataaggtatcagcagctgagttctcccttcctgccttatattctattgaaaaattgaagccaattaattttcgtaaaaactgctgctgatctggagtttgaagaacttgagagagtaattctttaaggcttttatggtctgtacgaatgatgaagtgacgacccagtaaatattgacgccatttggttacagcttccactatcgcacgcatttctcgaaaataggctgatgtgccagcaaatttaggccctaatttcttgctgaaaaatgcaataggatgaccattctgcatgagtaccgctccaataccagtgctggacgcatctgtttcaagaataaatgtctgagaaaagtcgggtagagctagaactggcgtgttagtcattgctttcttgagctgctgaaaagctatttctgcttttgtattccacagaaatttatccttttttaacagatcagtaaggggggccgctatggatgcgtattgagcaacgaatcgacggtaataaccagttaatcccagaaaaccccgtagctgtttgattgtttcaggtttaggccagtcaagcatagctgatatcttggctggatcggcttggaccccttgagcggataccaagtggcctaaataatcgattgatgactgaaaaaatttgcatttcgaaactttggcataaaatctgtgtttgcgaagcagctgcaaaacgacccgtaggtgctgtccgtggtcctccaaggatttgctatataccaaaatgtcatcaaaaaagacaatgtcgcataagaggcttaaatacctgattcatagtagattggaaggtcgatggtgcgtttgttagtccaaacggcatcaccgtgaactcatagtggccctcatgcgttctaaacgctgtcttgtgaatatcttgttgtgccatacgaatctgatggtaccctgctctcaaatccagctttgaaaacacttgtgccccgcctaattcatccaacaactcgtcgatggtgggtatgggaaaacgatctttaattgttagagtctaaaattgatacgtattgtttgagtcaatacaaaactcccaacaaaaagctcaaaaaaagcttaagaacaatcaacatgcctttgtttgttccaatacaacagtaattatactcagaaagaaagataagaaatggcaaataacaacttagtttctattcccaaccattttgttagccgatcctacttaactcctctccagcctaacgaattcttggagccagcgaggtctcacgcgcttcctcatcccacgtgtcaccacctctttgccatggtcgattggtaccgagtcggcttcgtccctgctttctgcgacttcctgggtctattcgtgtggctgtttagccgctgcttccttcagccagtccccaactctcttgtgggcttgcattgggtcaatagctattgggcctgggctatcagttggagaaatggaagtgttaataagcagcagggagtaatgtactcccatatcctcaaccccattaatcttcctatccgccccatttctggggcgagtaatctttcatgggga

SEQ ID NO: 28108 - DNA, 2307 bp, Cannabis sativa
actcttcgctctttgttttcctttcacactcaaacccaaactattttcccatggtgaaaccatctccaagttccagatctcgaggctctggtgactcctcctcctcttccaactccggtcatcgtcccagtacccaccacaactgtcgcatcaaccttcatcctagagctcatctcgactagttccctcgccaacgctccaacacattaatggaattcttccaggtacacatccccacactataatatctaccctccatgtcaaatccacaactcacacctagtatttcattatgaaattacttttaatgggtgttttagcatttactttgtctgattgtataactatcctctgctaggtaacttagaaaccctccccctaatttttctaataattacatctatataattttcaaatggtatctggtttgtgaatgggactgttagtgttcttgtcactgaaattttttgatgggatgtgcagttaatccctcccaaattaattgctatggccaatgtttttaatatagaaggaattttaccatttctggctctaccacttgatccctagttttctagtacccaacctaaagtagcaataaccttttttctttcaccaccgtgcaaatactaatctctttcaatggatggcttagcttcttctttatctgtggcccttaatcttacagataccgagattgtccacaccctccacgaccccacaccctctgaagtcctagacccaaatgtcccaaccacaaatatttttctggttgcaaaacttcataccatgaagccctttaacatgaaaatttttatggaaaaaatgtcaagtgacttgaacaagatatcccggttccttgtcaccataactaaatgaacaaaaggactttttctggtagaattttgatgcgtaggagaccgacataaggttcttttgcagcaaccatggacctatctgaaccatgctatccttatggacatccctagctttgtggatgtcttaaatggagatagcttaatcaagctcccgctttgggtttaagtttttaacactccttttctcaaaagatttgagcaattagttgaactagtttcaacaagcttaggacaccttctggaaatctatcgaccctccctaagagaaacttggggaccctatttccgtgttagggttatggttgatgttgcccttcccctgcctaggggcatccctgtcaactttgttggaatcaacaaagtggtttggcttgaactcgagtatgaaaacttacccgacatttgcttcttctgtggacgcatggggcatagctacaacaatagttgcatggactacatgaaagcttgtgatgaggccccacttccaccgtatctcaagtaagatagcaaaaccatcaagggtaaagttaaagtttctactaatccttttttgccttggcctgagcagattaattttgcctgtccctttgtcaccactattatgacatccaacccagctagtaatgtttgtgttcgctccctgaaaccactccaacaactagctgaccaacaaactattttagatttgccaacttgctggcctttacaagtctaataaccaagaacaaccaacagaaaacacactttggatgaacaataacctccagaaccaagaaaccaaccaccaaacaccaatgaaatccccaccaactttcacaaccttactcaatgctaccatgagtagcatcagcaaccaataaactatcaaaacaactaactcgagcctatccaacacttcccaaagctccagcagttcgaaatccacaagctcaaaatattgccacattatcgtatcaaccaacatacccctcttagacacaagcaccgacccaaaggctttacccctcacctttcaactaggaactgccaccggaacaagctccaagagcacacaaagaaagtcatcttccaaaggtaaagagagcttcaaaagacaggcagaagtgattaatggtgaaactcggcaattgatcaagcgtactttatcagagaacctagctgaaacaaaaatcaccttcttagaggcgggccctgtgagcacagaggcctgcctaaaaccatgaagctgctgagttggaatgcacgtggcattgggagtgattgtgcattccataacctctcctgtctcacctatgtctgtaatcctaatattttatttctcatggagactagactttctaagggtactttggatctttttaaatttaaattgcattttgattttggtttggaagttcctaggcttggtagaggaggcagactcctttta

SEQ ID NO: 28109 - DNA, 1619 bp, Cannabis sativa
ggtccaaagacggatgtgcttagcggaattgaaatcagaattcgacaagtaagagttgctttctgagcaggtcgggatggttttgcaggcactcaatcagttggctccaacagcgacgataaccagtgaagatcgtctacagcaatagatgtcaagagagccctcttcgaccttttctctggcagtggtcacctttggtcctactccgatagcacatactctacctccactgttttcattccagcctcaaactcagaccggcaatcctcttcattacctagaggcatatttccatcgtgattatcgtcccccttgaatcgaacttcctttgttctcctacgataatcctgaggggtgagttttcaagattgagcaatactttctgttacattgtttatctgaagcacgtatgttggatggagacgcacttacatggtttcaatgggaaactcaaaggaggttgatagcttcctaggtcgccttgaagcactttttattgctgcgattccaagccattccagtgggctctacggcaaaggagttgctctccgttacacaagatgcaacggtgaatgagtaccaaattaagtcggaatcgatcgcatcccgtgttcccaaagttcttgagcatgttcttgaaggcagcttcgtgaagggcctcaaaaaagagatgcagtgctttgcatctccttcaagctttgggttttggcccaaattatgaatacagcccaacgtgttaagaagagtcatcagttactaatcatgaaccaacaatctatacttaccaactatccaaccctaagcccatacccagcccactatctattcccaaaaacatgtttactccattttcagccaaacactcaaactcgtagtctccaatatcctcttcttcatccacccaatcctttcccagcttcaacaaaccaatctcttaagtccagcaataaagcacatgactgaggccgagcataaagacaaagatctcgagatttttgcttcaaatgtgacaagaaatatcatagaggacatatttgtgagcaaaagactttgcaagtgttgttgctgatggatgaggacgacgaggatgttccaacgtagtcccctccaacctcccctaactccacctccgaggtaactgttgaagaaaccttggccactttgttgttaaactcgatggtaggggtgaattctatcaacacaatgaaattggcaggtaggataggagatcacgaggtcacggttttgattgatagcagggccactaataatttcatctccatggaagttgttacaggtactaatttgcccataactgctactttgttgtggcatccttctgggcactagcgacaaggttcatgctaaaggcatttgcgcttaggtggaattggatctcgactccgtacaatgtggagtggatacggtgttgagcattaagtggttagaaaccttggagaatatgcaagttaattggcgtacaatggtgctcaaatttgaactgggtggttcttggatcactcttcaagagtatcgcagcctttgtaagtcgcaaatatcattacagaccatgattcgcactgtggaacaagaaggtttcaataattgggttgagttga

SEQ ID NO: 28110 - DNA, 3160 bp, Cannabis sativa
tggctagagcctggccgaccatacattgggcgagggtatactcaaggccagccaactctcagtcttgtggttgtacatggctgactagccctaagctgtgtagggcttggttgcccacacttctctgtctggttggtggagtttgtgcgttgacatggagtagatcacaccgattgctggagtttggtggatccaactatctgaagagattaatttctcttctcaaaatgttattttgggtatttccacccgctcccatccgctggagtgctcttctctggccagccatgggtactacaagtggagtttggctggccatatatggggacttttagaggagtctggctgaccatcgggactgctactggtggttggccggccataggatagatagagggggctgttgttgagcttgatatccctggccgaccccccatgccgctggttgttgggatctacctgtttttgttgtttaacctttgaggaaaggtttgtcctccctctggcaagggaagatctgtcctagttcctaaggaactaggttgatcaacatgccaatagaccttccctgatctatcaataagtcttccttcaagtggatctctgatgagcaactggcctcttttattagttctttggtggaactgccttatcagatcactggcctctctattgcggcgatctaactctgcatggtgagatcaaaggatttcttcttggtcatccatcaatctcaggaatttgcatctctactgagcgagtacatcacaattagcagtgcgtggttttttgaggaattcgcgtctctactgagcaagtacatcgcagtaagtaacgcatggttcttcaattacgccagcttggcagacggcctctctaagtttagttaactcgagatcttctcctaagtccatgtggggctcgccaattcttagtctcatctctcttgcatagtacctagggcgaaactcaattgtgtttcttaggggatgccccccatggattcttcatttagttggaggcacttgtggaggtccttctattggagataggggctgactgttcagatccacccgggatgcctgtatcatcctagccaactatagtggctagaatcgtggtgcctgctatggggacaagattgaccacatttgttgtgttcatgggaagtccagttgtcgatggaccatgaacatcgggatctgaagtctgtgggtctcgagagagacccaaagacgtagatggtgcaactggtgttcttcttgtgttaacaatggtgtttgatcagatacgttagccacgctctcaatgaaagcaccaaactgttgatctcaaaaagtgatcaactgacagcggggtcgtataaatctaatgcttgccacatgttacacaaacaaaatgaaaaactataaacacaaagattttttatataggtttggcccccttttgatagcaggtaatgacctactcccctttcttgttgtattgatacctagagataatactatttagatcgttataggtgggatctaatatagctctctataaggatacaaaacataaatgagtaggcaaatctctaatgagagagctatattgctttacaggcgtgtgagagagatgaagagaggaggccctattgggagtgtaacagagagagaaaggagagacaatggtttctaacttagagtgattggaaggcttagtgacttaggttttctaggttagagttaaggcctttttagaggaagcctaaaaccctaatttacaatgaatcccttagatatttacatattaaattgattaaatacaaaagactaaactcgccctctaaaatagatagtttccatcagttgttgggctgttaaatggcctaatttgcaggtagcgtgttgtccacgttttgggctatacatagagtcttaccaggtaaatctcgaccgctcatagacctacaagggaggtctggccagccatgctatcaatcctggccgaccatggtcctgctaggacctgagtggtcatgtgcctacgaggatcctacaggtattatgactttaccaagagaaggccagcctttagatgtggaggccagccttttgaaagtagaggacagcttagtacactgtttctttgtcgaggacaggttcccttggtcgaactcccttggtctgaaagtcactttttgggtccgctagcttttccccagatcctggccggcctatatgctcaccctagccggcctatagactcctcttggctaattaggaatgttagaatagcccattgatggctcgctttactcctttcaattgttgcttgaaaattttggcatttattgcatggagaccatgttctactactggtagggatgtactccacatgtactctgtctttggcttacgtggacctaccacgtcaggtggataaaattcaagataacaatatggtttgaggttgttttattgacaaaaacattttaaaaaatagttattcaacaaaaaaaaataagataaaaaaagttaagtttcatttatatatttttatataaatatatttttgatatagtgtaaaaagagaattttttgatatttttttaattaaatagttaaattaagcataaaaacttaaatttattttctattaattttcattggatcaaaatctcaaagattcatctttttaaaattaatatttatagttaaattttttagtaactgttgatctcaaaaagtgatcaaccgacagcagggtcgtatggatctgatgcttgccatgtgttacacaaacagaacaagaaagtagtaaacacgcagattttttatagaggttcgaccccttaggttgcgggtgatgacctactccctttttcgttgtattaataccaagggttaatactattcagatcactatagatgggatctgatatagcacccttaaggataaaaagtatcaatcaaaaatggcaaatctcaagtgatgatattgcttgcatgggcgtgtgagagaaagtgaagaagagtagagttatcatacttaggcttcaagcttggagactagtatctggcttaaactaagcttggattttctagattagagttaaggcctttatataggaagcctaaaaccctaatttacacttgaaaccctaggatatttg

SEQ ID NO: 28111 - DNA, 5012 bp, Cannabis sativa
  modified_base (4849)..(4857): a, c, t, g, unknown or other
aactttaatttatactaaaatattatatatttagttgtccatacaagttaataatacgtatagttttacataaaaaaatattatataagatataattcaatacgatttaatacggctttctaaagctcttaaaaaattaacgtgcacactggtacattacaggtgtgatgatgactactgagctgtcttcaactttaattactacacataaatatacaaaacaacaaaataataaataatgatataaatatataataaatcttttgatacatatttagtttagtacatgtacacatccaaaacctactttctctaagagttaaactatagtacaaataataatataaaaaaattatcgaaattaaccccataatatataatgacaaaagagtttgccaatatatataacatatatcaaatgattggctggaatggaccagaattgcctggtatagcttctcatctaattattatttttattatcacgcatcaccaaaaatcttcaataataatttttgtccaaatgagtccaatgctagccgttcttcattgtcacttccacgtaagcattatgtgtacataagaaaacaaagttcattatcatcatcatcatcattaattatatatattccactctcagaaaaacaacattcaactacttgctccaaataataatcccatcttggacttaatttttagagatttttctattcctaacgttatatttttagtacaaattaaagcttttttactgcgttacttttcatgaccacgtcagtgacagctttatcccacatgcattatcacattaaaatttcattttctatgttttttttaaaaaaaattaaaaaattagtgatttcttttttaattagtttatgaatagttagaatcggacaagtcaaaaatatctagttgcacatattgcactgtcaagtacgtactctcctcgtgtgtatatatatacatatattttgagaaaaaggatttcatatcaaaccttgtgaagtggtgcaagagttttgggtttaattagaaaaagatggcaattggggaatgcatagatgttgagaatggtgagattataattaggaataataataacaataatattcttgaagatttggagcaaccattaatcataaataataagaaagtgaagaagattgttgcctatgaagatgaagatgaagataatagtacggtcgatgaaagtggctccattgggatggttttgttcagcacttttgttgctgtttgtggatctttcgagtttggatcatgtgtaagtatataacatttatatatatatatatatatatttatacttgatgtaagtagttttactgaaatgtatttctttttgtttgttttgttttctgaataggaagccacaaaattaaaaataaccaaaaaaaataatttaaggtaaaagaaaaggtttgttttagcttaaactattattttggcaggtgggtttttcagctcccactcaatctgctatcagggaaagtctaaatctctccttagctcaggtttgttgtttttgttcattaaaaaccagttcttaaaataagttaaaatatatacatttcttactaactcttatatactataataattcacattgcagtattccatgtttggttctatagtaacaattggtgcaatggttggagccataacaagtggccggatttcagatttccttggccgtaaaggggtaatatatatatatatatttatatatatgatcttttttttcattatgaagatatagttagtttttttttacttgtactaacaaatttataatgtaggcaatgagaatctcagctggtttttgcatcactggatggttagctgtttacttagccaaggtataaaattgaataattgttgaatattattgtcaattgggtcagtttatgatttgaaagaaaaaaatctggttcagggagcaatgtcacttgacatgggaagattattcacaggatatggcattggaattttctcttatgtggtaacttccttgaatattacaactgttaaattttttaagaataataatatatattcaaattaataagattggtaatgaatgaaaacatgaacaggtcccaatatatatagcagagatatcacccaagcatctccgtggaggtcttacaacactaaatcaggtacaacagaagattaatttcatcttaattctcttaatgagatgattatgtaaagttaaaaaattcttatatgtttggttaattatttgttcttcagctcatgattgttcttggagcatcatttgcattcataatagggacagctataagctggagatcattagctctaactggtaagatatataatgatagcattatattatgtgcttgaactgaatttaaggtactgatttctgagtttcttttaatctgaaggacttgttccatgcattgtgttattgattggtctacattttgttcctgagtccccaagatggctggtaagaatttggatcaaaaccaagcttagaaaacatagaaaaaaaagagacatataaagaatcttattaagtacttactttgatcatttttcaggctaaggctggtcatgaaaaagagtttcaagcttcactgcagagacttcgaggcaaaggagccgatatcacaagtgaagctgctgaaatccaagtaatttttttcacctatacagaacagaacatttttttttatcttatcatgaatacagaaaactaagattgttgtctgtttatataggtatatattgaaacacttcacagtcttccaaaagccagtgtagtagacttgtttcaaagcaagtatattcgttctgtcactgtaagaacttaatgtttcataccttgtcctcagatcttgttctaaaagactttcatttttaacttgtgatcttcatgacatcttagattggagttggactgatgattttccaacaatttggaggcattaatggaattggattctatgttagtgaaacctttacagaagctggtaaagtcatagctttcttctcacaagatttgatgtgtttttttgttagtcttcactggtatcaaacttacttgttttgtatcctatcatttcaactacaggactttcaggcaacacaggaaccattgcctatgcttgtgttcaagttccaataactgtaatgggagcaattttgatggacagaactggaagaagaccactcattatggtaaatcaactgagaatatcatcataacaatgctatatataattcatcatgtattcctctttttcatacttgttttttttccttctttttgtatgaaggtgtctgcaactggaacatttctaggctgctttatggcaggaacttctttcttactcaaggcgagtagtcgagactcgattcaaatgtctttttttccctcttagtgctaaaccagtggtgtctaaattaaacttgtaatcatttgaatgaacaggatcaaggattgctacttgaatgggcacccctaatagctgttgctggagtactggtaagataagacatttgttgccataactctacttgaagatcaaaatcttggactaatttcttttctttcaatctcttttggaatgatcagatttttatagcctctttctcaattggattgggggcagtcccttgggtgattatgtctgaggtaactaaaatccacaccattgataatccgaaaaagaaataatggttttgaatcatttttactaactttattttttatggtcccttttggcagatcttcccaattcatgtgaagggaatagctggaagtatggtggtgatggtgaactggttaggagcttgggcaatatcctatacatacaacttctttatgagctggagtgcctatggtaaaaaaaaaatcaacgaaataggaatgaatagagttagttgttgactctccatgattgtttgaccttatcatttttcatttgttttctcattttttcaggaacttatttcatctactctggattttctctattggctgttctgtttgtggccattttagtcccagagaccaaaggcaaaacacttgaagagattcaggcttgcattaatgcagacagaagaaaaaaccaagttttaaactgatcatgatgaaacccaaaaagcttggaaataattttgatatttgattcttgcccatgtaatctactcccattgatttggtggtgaaaaaatttgatgtgggcaattcatagtttatcttgttatatataaatatatatatattagaatgtgaagagattattaggcctaattaaagagaaagaatcaaatagttcattacttttgcaaaagagaggaagagtacttaaagttgttagtaatgattattatcattattttgttgtagagagtgatatgatgggtagtaaatttattcaatgtagagaagaagatttttcttcttttattgtgctattaaaagctcaatatgtatcattgttcaatatcatattcttcattttgttttctgttgtttaaatttcttgtagaagtagaaaaatcttaagaacataaaccaaacgacaataaatatcaaagcaataaacctatataatacgacaacgactaatgtaagtacatacagccgaccgatccaattcaatgacaatcgactgatctaattacaaccgaccgccaaacatcaatatccaattataatcggatcgaatgttggatggggtgtccaaaaatctaatacatcgaactaattagtattttcatttagttttaatgactaattagattttatacgattatacgtaaaaaaaaaatatatatgtatatnnnnnnnnnaacattaaaattttactcttttttcttttaaatttaatggatctaatccaatccaatatataacaggacctaaaatattgaatgaatccaatctgattcaaaaaatactaggtataaaatattgaataaatttaaattaaaccaataaatatata

SEQ ID NO: 28112 - DNA, 1663 bp, Cannabis sativa
cacagagttatctccactagtacggtacaggggtaaacccaatctggatattagaggtgccaatgggttctcgttgcaaactccatgcagcctgaaatgttaacaagtatataaattagttaccaaacttttaaatgataaaaagtatcttagcatcaacaaaatttgggaaagccaagtttaccaagatgcgcctaggtcaacaggaaaaccaaatgagtaatcagtatgaactcgaccaccaagacgatctcgagactccagtaccaccacctgaccaaaaaacaaaacacatgtacttaatagccttatctttttcttcctttgcctcaaacagttgagaacatatccagtaccaacacaaacaatttccataatgatacaatggatacaggaggaccagcagcaaaaatatacatgtacatcacctaacagattcacattgtacacatgattcacaaagataaaaagccaactctcttcaagttctaagtcacataagtatcaaacattacagcaaacaatcatttaaaaacttctagtcacaacaataagtccagcataaccatagttcaaaactttgaagactctgaaaaaacaggcctttaagcctcagcataactaccaatttttttaaaaaaatatattatcatttgtttagatgatagcttaggacatttttcaaaatatttaacaaacaataacataacaaaattgagatattccaaaatcaagtatgaaaaaaggatacacactatttccactagagatgttacaggctctatgtagtttctagttaaaaataatggtttatgtaacttctaattaacaaatagttcaaaacttacgcaagaaataaaaaaaaacacaaatattatgacatcgacttcgacagattccgttataaagcagacccacaattttgaatgtcctatatgcgtcatattttagttgcccatgaccaaattttctatttcatctttgtttaattcaacgccgacgcctcgcctcactttattaataaataataaatattgagcataaccagaacaggcagcagctaaatactagaatatgtcgtctgtcccctaataaaatatcaaaggtacctgaaacgatgcatcgtgaagagcacgcgccgccgcaagcccacccattccggctccgatgacgataaccgacggtgaccttgttttggttccccccatattcgagtcgcaaagatctacattaacacactagtattaaaacacaatccaaaatcggtagattaaattggaaccctcaaaatcaagccaaaaaaaaccaaattccattattacccccacactgacaaaatcattcaaaaagaaaatatctaacctctgcgtaattggtgattattcctatttttcgactccatggtttatacgattattattccgattaaaattataatcagaattaaaattacgattagataataagaaatctatggacaactgaggtgaataatggagaataaagatcaaaagacacgttataaaatgattagaattgggattcaatattattgtctgccccgatttcccaaaccagctcatacgattcacttttctttttcttcttttcttctacccaattttcttttctcacaaaatttactcttcttctcgtcgacttg

SEQ ID NO: 28113 - DNA, 4143 bp, Cannabis sativa
gcttggtctcctcttcccttacggctctataagactgaacccttttgttgcttagcagatgaagcacacaaatgctcttaatctgcctccagtactcgccatagggtgccgaagcaacgtctttgtagttgtagagtagcttcccgaaggcaatggacttgactcggttggaaaaggctgcgtcgtgagttttcaatatctcacgagcagccgaggcagaggagacgacgaggaccggtgagctgccgagcctgagcagcatgacagggccatagcgccggctccaagcctgcagctttcgatggctgtacaatccgagctggtggaggtttccaacgataggtagccttggcggagatggtggaaatttcagttttggggtagtaatatagaaacataatctatatatgaggactgacaatattaaggctgtaaacaagattgtgaagggagtagtgggatcattaacgatatagtttaacaacatggtcaataatttagaatacaaacaaaagtaatgttattagcttattcataatataagaatttgtgttagcttcttctcccattttatacgtttttttttacatgttttagcattgtgcctcaataacatttttataatatcaactatcaagtcatgatgatgtcatgggctagtaagacccccgggggtattgtatgtaaataaatcatttttaaagtttttctcactagtctctcaaaatgtcttgggagtgccaaaaatgtagggtactattgttatattttaaaaatagtgttctaaaaattttagtaggtaccaaatttaacaaaaaaatagatcattgtgccaatatctaattacatcatctttaaaggaaaaaaaaaaccactagtacaatcatagaagaatttctcatgtcactatataactaaatattgttgacgctactgtctgataagcagccaacgaaggtatgaacataaacagtaatccacttctcttatcacgaaagtaatgaaactacgtctacctaaaacttctattatcacaaaaaatcaattttcttacaagagaacgcaggaaaaaatgactaactctagcttcacttcacaatttatagagagagaagctctgatattctagaaggtatgtatagtgtgaaaaataagctaggtgagctttctttttatagggaatgagatccaattaaattacaataaaataataaaaaaatcacacaaaattcgttgagatatcctgcactatttcgcgagcaaattttgaggtttgaaactttaaaattgtgacaggggttgagacacacttagatgcgtcttgaaaagagctttaattttttacttgaatagtcttatttggataaaaattgagacaattatgaatatttagcaaagcggtgtgcactattgaaaagtgactttgagattggcctagcttttaggagcccaagttggcatacgtcaacatgggcgcccagatttcagtttcttgggccttaggcatattttttagattcttgaataacgtgatagatatccttagttcattctttgaccttggggaaattctcttagcaagtttactcgatatgcacgagtgatttctagtgatcccctagtgacgtataggtgactcgggtgatcactagtgcacatgggtgtcagtggacttgcacatcacatgtacatgagatattgacttccaaaagcatctaaatcttatttttagggaaaaataagattgatgcctagagccgaaatgttgtttgaatgacaaaacaacgagccccatgccaatgtcaacatgggcgcctagtgtgcttgcacactgacgcctagtgatgcctgaggtaactcactacttgaacaatattttctcctaattccaagtctcatatcttgtttttggagaaaaacaagaagaatggctgagatagaattgcaattggatcgacagaatcaccaacagggtggttatgggtgcccagtgacggggtggggtgatgtcaacctaggaatccaacttttcatcttgggcctagatggcttcattttcttcctaaaagcacttgtatctttatcgtggatgaaaataagggaaatgactaaaaaaacttctctagaaagaaatcttgagtgccctcggtcgagatacgtcaacttgggtgcccataattgccacgggacatgcattgggtgcccaggtgggcgtgatatcttcgaaatcggttttgttgatgcttaatcttctttttggtgaaaagtggtcaatgaatttcaattttatcaaaatttcacgggcataaattagcgaaacgaaatcggtgcccaggtgttgaaatgtcaacctgggcacccatagttatggatgggctcctctaggatattgttgatgaaatatcatgtccttgcattgttccttgatgtatttgaagaatcggggtccacgtatgtcactggaaacctagactctagccacggtgcgactagatcgactatatgtcaacttgggagcctgagtgacatttcaagtagactcatatccaatgtctaaaacttagctgaggcatgtctctcatgtattttcaaacagtggctaagcagattgctcatgagaagttgataggaaccaaaactgatgcgagatggcacacaaatgttaacctggacgcacaacactgatgctagacctaagttgagccctgggatttccacgtggcatcctcatcttcatggttcatcattttagggtcaccaggacttgttcacttaaactttgtcaaatgatggcaactagaaacgtctttactggatcttagtgcctacatgggcacccactactgtcaactggctgggaccaggattgttttcttcttgccacgtgtcaagattgttgttcatgtcatcaggtcacatttttgggcaaacaaatataattaatgtattttccatgcacgtacatattcatttcatatcaacaagtcaaaaataatgatatgttccattaaattatatgcttcttagtacttttattttaatccaactttgtcttgattaattttttttttatgaattagtcatgaaattcattactccaatcaaatatgaacaagctaaaagcacctaaagaatgggcctcaattccattatttaaatagataattattacttacaatgtatgttaactagataattattacttacaatgttccaaaccaaataatatctttttgtcgtattttttttggcattacacatgatattctagttctcactactgtttgttgtactaatctccctgggtttgctgcctcatcattccatattttcccatttctgttcaaccatatcatgtatacaagggctgcaatggcagctgagtatacatttttcttgaacgtgcttgcttttgacctttctatctctgcaaggaagaagttttagtcttccatccaagccattcttttatcaactgtaaacactgctgtgagaaaatgtagtcgaaaaaacaggtgctgagttctttcagccactgtaccacacagcacacagttcacatcaacagtaatattgaacttgtgtggagcctctcccttgttttcagcctgtctaacattcctatccacatcacaaagctatgttttggcacatttaatcatccccatacttctttactccaatagcatgccccttgatcttggtttagcaatatgcaatgttgtatgaatctagtgagaattgtactggatcaattaaaactttgactctctctttggtttctacaatttttctccaataccaactctcttaactaggtgctttgtaatcccatcaattttcttgttttatgtaaatattatggattcatttgacccataagttccttttttgtagcaattgtcctgtttaatgagagttgttgtattccaattctgtaacgaatattcactacaaaaattcttacttttagtcacaacaaaatttgcgacaaaaaataaaaaaattgtgactaattataaattatgaatcctatgttgtgatcaaattgtccgtggataaaagtatattagtcacaaaaattacaatttgttgtgactaaaaatgtatatttagtcacaatacttgttgtgactaaaacta

SEQ ID NO: 28114 - DNA, 2479 bp, Cannabis sativa
atgttataattggtatacatataaatgattgtgtatacattagataaattcatatatattgcttttattatttaattttggatgtagggttcatcagcatagattgcggagtgcctgctaatatgacttacacagacaaaacaaccggcttgacttacgtttcagattcaaatttcatcgaaaacaacataggtgaaagccatacaatatcacttgaataccattcgcccaatattgagaaccaattttcaactttaagaagttttcctcaaggatacaaaaattgctacaccctaaagccagcagatggaaaagggtacaaatatttgataagggcaagattcttgtacggaaattatgatgaaagaatgattgtgccggagtttgatttgtacattgggactaataaatgggggactgtgaaattggataatgcatcacatgttgggagcatggagatcgtatatatttcaacttcaacttatatatttgtgtgtatagtgaatacagaccatggcacaccctttatttcggctttggaacttaggcctttgaagaattctacgtacacccctactcgggcagctgttctatatcaacgcttggatttaggttccaccaccaataaatcggtcaggtattagatattaattatacataatatattacttattatttaatttttttgatatatccaatccatgtttatattattctatgaaaatgtatgtgttcttacttccgatcataatgtgtcattatattacttagggaaaaattatgtaattatctattttatatagtccaatatacatcacttttaccatatatatgagcattttctatcttcgttattttgaagaaattataacacaaattttttctatataatagtgtatgttgtagtaatagcaatatttcactagttttcaaaataattgaatcatttactataataaaatataattccaaaatagtaaattactcttgtataataataaaaaaaacaaggacaaatataattatttgtttgaatcttatttttttgttgattattgatgatgttgttgatttgttttgtttggtttgattaatttaaaagataaaataaaatacattgtggtgatgatttattttaataaaaagttctaaccatgtgctatgattttgtttaagataattatttttttttaatatcattcagatataagtaaaaatttagtataataatcttattagaataacataattgtaataaggtaacaacttatgcctaattatagacaatagtcgcaaaattaaataacatttgtcattagattagcaaaaagagtctccttaattagcacacctcttgttaataaatatttgtcaaaaaattaaatagaacatcctaatttcagctactttcatgatttttaatgcaactatataaacatataattatcatatttcacttttgaattaaatacaaatttatgaatgtatgacttattactaaatataatttatgtatttagatttcaagaggatgtatatgatcgtatatggcagccctataatatgggagatgccaaaattttaagcacatcgctgacagtagactctggtaccgtaatcaattacaccccaccatcaagtgttttggccaccgctatgatccgagaaaatgtgactattgagcctgaagatcccactgctaaatactacgtgtacatgcactttgctgacctagaaaagcttcaagcaaatgagtcaagagaatttttaatctatgaaaacgacaagttgtggaatggcaatgatcaaccttttgctcctgaatacttgtacaccactactagatttagcacttccccagtcagtggcaacagaataaactacttgttcaaacaatctaccacatctacacaccaacctatcctcaatgctcttgagatttttattgttcagaatttctcacaaccacaaacatatgaacaagacggtacgtaaatatatatatatatatatttaatttagtaccaaagtatacttgaattttacgatgtatatatatattaatactgtacatgtgcatgattgctccactctagtacacatatttaacaaacacacctaatcattgccatttttttggagggggtgttatgtaagttcgatatatattactcaaactgagtacaaagttacgttaggatttataaaacactaaatcataaatctatatatagtatttgctaaattaaagaagaagaggatgacaaaagatgagcggaagcactaacctgaagccattgttaaatattgcagataaggttttgatctttcatgaatacactattttctaaagtattttctctgattagggaatgagagaatacagaaattctagtgtttcttgggaccattacctatttataggctcattatataatgagttttgggtatttataatttggctcctcaacaaattata

SEQ ID NO: 28115 - DNA, 1965 bp, Cannabis sativa
ataagtttttctctttgatctcttagtgaaacatcgcacacggaaccagttaccttgaaacccttctttttccactcttccaaacacttctccaactcattttccttgccacaacacgtgtgaactatggctccaaattttgcaagttcctccactatggcatgcctagaaaaggaatttaaaaggtttttaatttcattttaaaataaatatccaagttaaaggtagagtacatatacagacagcattcacatttctcggtgtagtataaaagttgaataagaactccaaatccttgataccacatattcacaaaaaaaaaaaaatgtgtgtgaaaaaagaagttttcttctttctttttatgataatcgtactttgcataacataataataattaggattatttagataccctattcctcgagatccaccggtaaccagagctgtttttccctcaagactccacctcatttcatggctcgtataattctttggttcatgagccatattattattgttcataattccgatcgactttactttgcttattatgcataatgcatgtcttatttaatagctatagtttgaagcacagtaatggctagtagcgatgtgtcctctgaggtggttgagacgtccactctatatcttaatttctctcttgactctttatgacagtgtgcaaacgacgttgatctgtggccactataatacaaaacaaaatggcattttttctggtatagctttatttttgtaaaagttcttttttttttttttttttcatactctcatatagaaaattacaaaaaaaaggaaaaacttaagtgttttttttattttttttttcaaaaatacggtctctactctctacaataatcttcccaaaatagctttttcaaatatttcagatctaaaatcatcatgaactcacccaaacaattcaagatctactcaataatccacgtagcttctccaaacaatgtataccaccaacaatgtagaagttttttccgattactatgaatgccgacgagaaaacttttataccaatcaccatgaaatctggcaagaagcttttttcgataagccatgacagcacgaccaacgatagatatttccttgaaaagttgatgagagaagatcacgattgatgcagatttccatgaacgcttaataacttgccaaattttctatgtttttcttagtaaaaaaatttgatgttgattagcatatgtttgctttaattattattttcttaatcagttgttgttgtttagttgtttcacatatactggtggttattttagttcatatatttaagtgttttctggtatttttcacaaatctagaatgaaaaccagcgaatgaaagtttctgggtagtataatgagaacaatgagtgcttttaaaatttcaaaataaaactatatattgttttaacattattgtcatgcgttttgtttagatgtccatgatcctgaaataaaagatgtacaaaatttagaataataacccaaaaataataaggaattgatgtaactttattattcagaacaacatataatataatatgaaataaagaaataattgtgtggaccacaggagaaaaaaaatattgtatcataatattttgactcatctcatctaaatatgattaaattatttaatcagcagaattaatcttgaaatttttacaccaaaaatacaaaatacacactttattacatatataactttacacggttaaactaacattaataattatcaatttttttttattgcaattttaccacttgcaatttttgttgttcaagacgatgactctgatttttctcctcagttgtcgaaacgtcagcgatctcctcctaagaagaaataaaaggttgtttcccatgaatttttttttcatgatcctgctcaaaaaaaggattaggatggtgctcatcttcaattggaggtttgttt

SEQ ID NO: 28116 - DNA, 7299 bp, Cannabis sativa
tcttaaagagagcgacattgtccgcgactcagccagattattctatcggtaattcgttccaattttactgtatttaatttcggtataacaggttgtgaagattgattgtatggagagtggtttgcaatttgtgcaattacaacgggagaaggtttgagtgaagatgggattatcgttggtgatatccaacattttcttttattatgtaatgttggttcttgttattttattttttgtttgagagtattttaaggaaaaaaaacggtggttattagtatttaaaaaaagtaaagttagttgagttggcatattatggattgtattactcacttgattggtgagacaatgtaagaaataatgtttaaggtattttcaaagataaaaacatattaaacgtatgtaaaagagtcataaatatgatttgctataaacatgttaataaattaataagttaataaaaaataagtatgatcttttatataaataaatataaataggtttataaatgtgttgagttttagttttcaacttgattaattaatgggtcaggtttaagtttaacatttacttgtaatacttaaatttcaacacatataacacgacttataaatatgagttacgaccactaaaattggtatctcaagtccaattaaacccccaatttttttatacatggtcacacttgatatggaataaatatgtatgtattggtggtgttggtatgtgtcccttctcactgtgatgtctctaaaattttgctcaaggtggactgtggttgtgggattggagatttatgtgatatgtgatgtgctgtatttttttaaaaaaaaagaagataaaataattaataataaaaattcccacttgagagtttttaaaagaaaatgtctatgtgcacaaaagaagtgatataattccttttaaaagataaatgataaaaccgtatgcaacttttataaaataaacgaagttaataaattaaaaaacacttttaagatgaaaagtcatttaaatataaatatgcatatcactgtctataggccaaaacttccaatttttagattcatttcttctttgtattgcatttaaagaaaaagaaaggatttaatgtgtttgttttgtttgttagtttgaaaacaggatgtgtttgctttgatttcaaaaactctggtgtactgtacacctcagagtacacagcacatcactcaatttcttccaattttttctggggtcccctttctcctattaattgtgcaacttgttgaatctagtatggtcaatcctatccttatcccctattaattgttctcatttatccagttttacaaaatactaaatttacaatcaacccttatcctctaaattatgaataacaatccattcaattaccaaatccccaaatcggattccaattggtcaaatttgggttaattgttatcgatttagtgttttaccataattttgcacatgaaagtgaaactccaataaaagtgaatgcataaaccaataagcatccaaagccaaatattgaaggaaaaatctacaaaaatttgagatctttctgattcattcatttcaaatgtacaaaatatttacataaaacacaacattccctttatcatattcatccaagattttcctttacacgcattccatccactcctcctgagctaactcaactcgttcgttccaactcggtcaagccccgagtcaactcaaccttctttacaattcagttgagtcatcgagtcaacaagcttctctatatttacatatcatatacatcagccgatttatatcgattcgatctcgcttctaaagccatcgattcagctctgtccccaacagttcaagtacataactttctggattgactcatcggcttgcctgattcgatcttcacagttcccaatcaagccaaacagacctaatcccgccactccagcgagcgatagcattccggtggattctccggcggaagaggatgaggcggtagaggaggaagaaaacaacctctgccggttcagttgcagagatcgaaggcacggtttcaattttgcttggtccttccggccttgtacggcaaccacgcttccggcgatcaaaaccttgtttaggtaattcatttttaggttggttgaagaagaagagagaagtttggaaagtctctggttttgtttttgtgtaagtgagattagtgattagaggtagagaagagtagtgtatttatagacttgttaaagcgagtggttttgttctaaaccggaaatggttttggggataagattggtgggtgaaagtgaaacgaccttagtcctttgtcgttttgtacttttttggttttgtttttgggtgttgatgtggatggatggattggatcaattgaaatccaaaatttgtgagattaccgtctcgagagaaattgggtttttatgtaattattattattattatttttttttgagggaaggtttttatgtaattattattactttattaaagtaggtgtggaaaaattatgatatgggaccactcacttattaaaatgttataatttggagaagaaaatgaatgattttatgattaagattgggataaaaataaaagtgtggtgcagtgtcactaggataagatgggtttttttaacaaagatgaaaaataaatgggaaaatagataagtacttagtttatttatttttgactattgttaagttcttaattattaattgtgaattaaagagaactaatttgtcttaaagttatacaacccaatacataataaatttgaataaaccatctgtgttattattattattttgcttagttattttttttacttagttattttttctcattctaaatgttaattcttaaacgatactactactttctagtttacttaaccaagaattttaagatttagcaaaatcaactatcccaccaataaatttataaggtttattataattgaaaactaattacaaccagctatttcttaagtctattggctggataataattgttagaacttctgttgtttagacacacacggaaaaagatgcaatggggtatgcatttttaactactaaggaagcctaaggaaagcctgaagaaatacatccaacgcatgatggatgttgctgttaaaactaaggttactaatgatatgaagatagtgaatttgacatcaggattaaccacatgatctcgttgtggggagatctccaacgcaaaagagcaaatactttgactgatttcttgataagagcttaaggattcataaacttagaagaaccttacgctgaagcttatggagtatttctagcaccttccacagacatagtagcagcccaaactttgtagatgactactccatcaattttcccttcgacaactgcctttacgactcttaccgtttacggaccaagtgcttttgcacagccagctgcatagcctagttttcccaaatttagagtggtaaaaattggatttagtgttgctcctagacaaatgaactaaaagtggaagttctagagtccaatgtaagccaatcacagagcaagaggagttcaaagggtccaaaccgaaatgattctgcgaagaaataaaagactcaagaatcaagatactaggagtacacaagccttgtggatacttaagagaatggttataatgtagcttgtaacatggtccattacaagaaggctccgccaatgtacaagggcagaagaaaagaaaagagatccaaacaagaggtgtgaataccgcagagatatagggcacaccaccaatgaatgtgactatctaagggatgaaattgaaggattggttaaaaatggacatctgtccaattaagtaagaataccagtcatttatcctggacagggggttgcacatggataacttttgattcctgggcaacatggagccattaatcctcctcagggagtaggacatccacaagctcctggaattcaagctcttaatgcacaagcccttcaggggatacaaaatgctccagtagtagggcttgttgtagctctcggtgctggaaatccatatcctcctggagtagcccagtctccactagatggtcatgtagcaaccatttttggtggaccacatattgctggaagcacccaaatgcacataaaaggtacttgaatgagttggatcaagacgaaacttccaatttggtacaatcacctgctcattgtccttagatgatgaatttgccaatgactttcacagaagatgacgcaaagcatgtgaattttccccacaacgaccctttggtgatagaagtccatattgtgaataaaagagtttctagaattcttatagataatggaatctctgtcaatatcattttcaaagatgccttcaaagccatcggtcttgtggaagccaacttgttaccttgtcctattcaactgcaaggcttcaatggagacacactaatcccaatgggaaaaatacaacttccaatgacaataaatggagaagtctttggaagcaatgtggtgtcctctttcaattacaacacccttgtagtagttgattgccctgacaatgttattattctaggaggaccatttctggttgattttggagctgtgacattcatctaccatttatgcctaaattcccaagcaatactggaagcattaaaacaattagaggcaactagaagagtgttagaagctgctacaatgtttcaactaagattgttctcatggtccaggaagaaaatgtagcactggagcagacaataaaaccaatggaagaggtaaaagaaatatgcattaatgatgaagatcctactaaagtcatcagagtgggaaagaatctacctctggtagttagagaaaagattatctccatagttaaggcaaacaatgacgcattggcttggagtcattctgatatgactattatcagtccccgagtaatttgtcatgcactaaacatagatcctaaggttgatccagtttgacagaagcaaagacccttacatctcatgagatcagaagcagtaaaggcagaagtagataagttgaccaacattaatttctgtagggaagctctatatcccacatggctagccaattcggttttggttccaaatcctgatgggacaaggaggatgtgcatagatttcacatatctaaacaaagcttgttcaaacttggggtacaaacttttaagcttcatggatgcatactccaattacaatcaaatcaaaatgcacgtggttgatcaagagcatacaagctttcaaactaacaaaggcatttattgctacaaggtcagagactatgccaaggacaaacctaatgaaagactaatccatagagcaattgattaataacaatctaaggatcctctagatttggccactgggcagagaaatgttactcagaataaaaactactaatcccattgaaaaataggatagtagcaaacacccattattaaaagcataaataagtgaaataaacaaccattaaaaaataaaatagggaaataaaaacgcaaaagaaaagtaatggaacaaccaaacaccaacacatcagactttggggcaccaaaactaccaccaagtggagaagcaccccagacccagaggacaatgccatgacacacaagagacgcgccaaagaagaactcgactaaggatgaacctccccctagatttccaccgtgaagcccaaccatggcatccatctatgaacgtctctgttagaccacccattggaagcaaaaatgaattccccaatggatgaaaaccaaacacgatagccaaacagtaatgcacaaatcctcaagcgttgatcatccaacaaaaaacttcttcaaacacacaaacaacagtctctccccccagaggacaatgccacgacccacaagaaatgcgccaaagacgaactcgactaaggacgaacctccccctcccccctcagatctccaccatgaagcacaaccctagcatccatatgagaacgcctatgttagaccacccatcgaaagcgaaaatgacttccccaatggacgaaaaccaaacacgatagccaaataataatgggcagatcctcgaaaccccttgtcctagatcgggaccctcccccacaccagatatagctaaagctgatatcctacgatcaccaagcaaaaactccaaaaaaataatgacaaaaggcgttgatcctccattagaaaacttcttgaaatgcacaaaaataataacaaatgacaaaataatgatagtgtatgaatttttaaaaaataatacatttaatctaaattatattatttttttttaaaaaaaatctaaattatatgttaattggactttatcgcatttacgatttattatttaatataagaattatattaattcaaatatcattattttttttatttttgctgaaccattcaaatatcattattaaatcacaaaatatccatatttttaatcattgaacaagaatagtgaaaagaaaatatctcattgacactttatcacgaaggaggagaatggaatttggaaataatataatcttttatttcattaaccattaatagaaatccaaaaattttgataaacaaagtcacgaacctgttgtttggtagtctaatacatttgatttgactttgttagtaatgttcacaaaacgtcaaatataaaagagcattgatattgcttgtcaaaggaaaagcattaatatttattatttagcaccttaagattttaaatactacactaatataattttttataatgaagaaataatatcacaaaaaaaaaatatataaaaatatgctttgtaccaaattttttaatatttttataatttttaaattttattttcataatatactttttttttttatgttttagtcttattattttgttgttgatttttaattatttatatattgttttttatgttgttttgatattgttttcctattacttttatatgttattttattgttttttgtgtttttataaaatatcgtaaaaatatacataaaaaaaaattgaacgtaaaaatgtaatttttttttcaaaaattagtgttttatgtaattattcttataattaattagtaatttttcatataaattattatattaaaatatgttggatccaaaattaaaatatactaataatagtatgttattatttgtggtacctgttatcttaaagagtctcttaatatttctcagtataataagaaagacaaaactaattaagtttccagaattttaagtttgtaaacagtataaatttat

SEQ ID NO: 28117 - DNA, 1512 bp, Cannabis sativa
  modified_base (1180)..(1186): a, c, t, g, unknown or other
ttactaaattaataattaaaaacttaagaaaacttaagaaaacttaagaacttaagaactaaactaatttttagttaaaaaaatgtgaaaaataactctactttctagagttatcaatacgttattgacatattatctatagctcaagtattgcaaaaaccaatttgccatttggttatcagcaatgtgaacaagccacatgtgcatgtctattcaattaggttcacattgttagaaatatttcaccagaatctagatttactaatatgtatattggattataattctataatctaacatcctaaatataaatttcataaaaacaaagaattaaacacataaatgtataaaaattcttacattgatggtagcggtataactcattccgttcagatttctaactcttgatcctttctgttgtagagtatgatcaagatttgaacttggatttttcttcaggtaacaaaacgactgcacaatcttccacactattttgactcttgagtattgccttgaaatatgtggacaattactcaatcactcaaggtttaaaaatttaagaagaagaagaagagaattcaaaaattatgaaaactttctttgattttctatttgtctaacaaagtgaattaatagtgttatgaaaaataagagctatcatattctatttatattgtaactttagggctaaatttaaaatttaatatagaatataaaaaagataaaaatggctttatttaaacccttgtgggcgaaaatacataggtgggcccatgagttttaatttttccattttattgaaacttatatttcttttcaaaaatactctttttcattctaactatataaatgctaattttatgtatttaataattataatcaattatcaaattaaattttcatttaccttatttattaattagaccttttatagtctcttaattaataaataaactctaaacctctttttcttctcaaaattgcccttctttagtgaaactcataaataagacatagtcttatttagaattttaatcgattaataaaatcaattaattgagtctacaagacaatattatctcaagtagtgtggggaccatgagcctatttaatcaagcttccaacaagtagttctagaatttaccgagtaatttttctatcttattaattcctcctgacnnnnnnntagattcagaattgcactcttgattacaaagaacactctataccaagtatagatacgctataaattatccattatgtcaatttaaataatcaatggatgatttacatcgagtagggagaaatataccatttacccttcaatgtattgtatccttaaaatacttagctacttgtaaataatattcttgtaaactaatataattattaaaataagtactctaccatttaaactccgttagccaagctctaaggaaacaatctgttgaccgaggttttcggcaaccaatataataataataattaagagagctataaaggattaagaga

SEQ ID NO: 28118 - DNA, 1909 bp, Cannabis sativa
  modified_base (550)..(562): a, c, t, g, unknown or other
  modified_base (1320)..(1329): a, c, t, g, unknown or other
atccaatctaatccaattgtaattggatatccaactttttataattaaattagattggattagttcggttcaattggattggattagttctggattggatgatgtctactcatacttcaagaattctagaaatataacttaggcattattatcgccaaaaattaaacttcgatatttatttacaactgaaagttaaaattaaatattaaaaccgtaattttatctaaaaaaaaaatattccatatatgtttaacttgtgaatgagggtacggagcatatcatatgcataatataagttctcccattcatgtactatgcttgttgtcgtaattatggtcctaaatattaaatatttatataaatagcatttctcttatttctcacctaagtaaataataatatacttttttgtggcatggaaataatactaattaaatgaaagaaggtgactgagctttacattttaaggaaaaaaaacaaggagccaaagacttttgagtgttttaatttttgatatttcaaggtcaagtactattattattattattannnnnnnnnnnnntattattattattattatagagccatttcaaaaatcagctccgatcgtttcactttattaaacaagtataactttatccacgttaagagcacgtgctgtgtagtaccaaaacttctcgatgtggaaaatggtataatgaataattgggaaacacaacctatattatatctaaccattgagcctttaaaaaaaatataaagtgagagtggtaacaaaacgaaaacccattgatactaagatgatgagactgtattgtatgatgatgatggtgatggaagcactatttggaagaattgaataagctttttatttaaccccatcatatataaaagatgatgcaataataatgggccacaaatcatgtgaatcaacaatttcatcatcaaatatgcacctcatcattttcaggctatatacataatgtaaatatatattattgattactcataagactattaatttgtgatcatcatcatattcatattatatatatgtcaatgtgcatgttgatgttcatatgcatatttttgtttggtgcccattattaattattgcaaggggtacaaaattgtgtataatattagtaatttcctgttctggtaactgtgttcctcatgtgtgcatgatctgatatttattatctattatatataaaagagtacttttaattatactattaggtacattggattcttttagggaaattaatgaaacccctttttaattttgtgtatgacatatatatatagagagagagnnnnnnnnnnagagagagagagagagactatgtgtcattaactaactaggaacattattaattataattttttaaaaattacaattctaaaatactacatatataatatatatatatatactcttgttagaaattttatatgaataatattaagtatatatgatcatgaaatgtgaaattaattaaatatatatacactatgaataacgaattgaaatttgaaataccttaagttattgagtttttgagctttaatctaacacgagctttggatctgcaaaataagtaatgagcttaaagaccgataccatatatttatatagccatcaaggtctttagcacaaccaattatcaaaatattttgacaattaattaaagaattaaattgggaaaataactgtcttcgtaggtgataattttttcaattttaataatattcatacatctaaaaatcaattaaatgattttatacttaatataaaaatatttaatattctcccactagatcagcatttagatttaccacgtaaactcaatattcttcattacacaataaacatatgaatcatagcgataggtcctcattatat

SEQ ID NO: 28119 - DNA, 4064 bp, Cannabis sativa
aaatttaaattgtataaaaaaaattaataaaaaattattaaatttttctttatcttacattagaattttccattttaaatataatagtcattccattaaaataatattccaatactttaaaccaaataaaaaaatgaaataaaaattattttatttcttattctatcatatttcattacctctaaccaaacgtcaccttaattagtctatgaatgctgataacttcgatgtatttgagtgtgtgcgtccacactccatagattcattcatagttgtgaaaactataattgcagttccaaaattagcttgataaaaatatctactactaatctaccataagaaaacagctcagactcataaccaattctaaaaggctataaattactcttccaaaagaagagcatgaattaagttacagaatgccatgaaaaaagaaacccagcccttttattaagcactttaacaagataacatacacgaaggtcagaagctattatcaataactaagactcactacaccagacacaagttttcatctcaggaaacaaaatgtatcgcccaaagccacagttatgggcaattattatgagataatcatttcatcctgataactccaaaaagtgcaggacaagaaaactcactttgaagcaggaggcagtgagccctcggaaatcgtccttccagctgcaaaaaatctcatgctacaacggatagagcttccgagcagcttctcttaatctcatgtcagatgtagtgtgcacagaatatgtacagatataaggaatcccataacacaggatgattcaaaggttttgcatctacagtttgtttaacaaacacctacggattgatattgcgaattcgctgaccttctgaggatggaacagaaccgaacaaatccctacgcaaacagctgcggtggcaataacaagcagagttgggcggaagcccaagaatactctgcgcctagaacttaagacttgtccataagaaactcggcaaacagaatcacttggccattccttagcttttaagatggtttctctatccagaagtgaactagtttcaattctcttgttataagtggaatcttccatgaatcccgacttaccattaaccattatttccatatcctgcagaaggttacttgatttgttattaaacatattataaaataaaataattggttgacaaaagcaacattacaaaatacatatgaacataaattcatatttataaatatatatataaatagggtgggcaaccattgtgcacacttcttgtgtaccaccatggtgtcctgtatgttttgttattcttttcagtaaaaaataaataaactaaatagtttaggatgcggaaactagtctaaaataataaataaaggcgtgactaataaaaggttgaaatcctgtttcggcattcaaaactgttgatgtttttctaagaacatgcagaaggttcaatgtataaaacaatattgcgggcgtgactaataaaaggttgaaatcctgcttcggtatccaaaactgttcatgtttttctaagaacatacacagagggttcgatgtaactacaattaacactatcatgtaaaaaattgggtgataatatagtcacgtatgtaaaaaaatgattcaccatggtatgtgcaccattgtagtcgtgccatatatctatataatatctatacatagatagatatagatgccactagaaaaccaaaatgaaactaaatttatgaaaatatacaaagactttttagtttagaataaatatatttcattatcagcactcgcacctggccagggaaagaaccaatcgagcatggatcattttgggagcagctttgagagccatgatccacctgaagcattgaatttctggagttcaaatctaaatttgcagcttcctgtggcttctgagaaggaagttgatgagcatagtccatatatttctgtaacagctttaaatcagcctcattgataccattacatgaagcatttgattccattttatttaccacagttcttaaattttgcaatactttctccaaaattgtaaatgactcgatagatatcagaaaatttaataagtaattcagtctttggatctgagaggttgtcacgatcggctgagaattttctgaccctggcttcttaagtaaccatgctatctccaacataatttcagaaaatgctgcgtgtctttgacaagaaacttcgcacaagtttgacggagaaccaacggaagttaagtatggcctctctgaaaagtgagattcattgtgtctttgttgaatgacattcatttctgaacaagtttctttgtctccaatgagtaatggtataaaattagataagccaccctcattctcaacctgaaatataaaattaaaggaagatacatcaagttcatatataactaacagcaatagctctaataatataatctaacaaatgaaagtttggtacttcgcggggagaaatttgaaattaactaatcttgaatctaataaatacgactagatattgttggttgtgttaatagttattctttataggttaatattgttcacaaaagactcgtattatgctggataacttgctgtaggtaagttataccacttcccatatcaatattgtctgtattaaataaaaaagcacaagttgccaaaaaaaaaaaaatcataataagaaacagaaaagagcaccaattgtcaaattttaagtactgcatttattactactcaagcaataacgggcactcattcacgaagggtgtactaattacgaaagcatttcagaaaatgttataataatcttaagaatggatcagctgaataaattataaaagaaaactaaaaagatgcaaagaaagtaaatgtaacaaattaccaacctcaatgaatactggaccaaaacagttggcttcagtacgagggacttgtatcctgtacaattgatggtcaaagctactagtagtgttcccatcagtaacagaatgagaagatgcaggactataagcacatgccaaatacttcccagagaaggataaaagaaacctgccaacacgatgatctttctttagcgctcattagactacctccaatgcaagatgcaaaaacagtgctaaatttaaaacaaaaaattaataaacatattttgcacaacttttacaattttactccaaagtgcccatagatatatatacaaagagatgtgaaaaagtaaacatttataccaataataaataagatgtcaaataataataataaaaagataaataatggcaaaaaaaagtaaataaaaaagtgacatttaatgttaataataaataagatatcaacattaataaattaataagtaaagacaacaaagtattgcaaaaaagagcatttcttgttgatgcaaatttggatagtgttatattcttatccaaatttggatgaacttttagcacatgctaaatttagaatagaagcttttctttgaagtgtgttatattttagcaatgcatcatagattcacatctctaatggagatgctcatagtgagacagctacgcaacaatcgaaataactagacccagttatccatctataagcaaatgctattgaagcaagaagtttatttttaactaagaggaggaaaactattaaatcatcggggatatgtaagaagccatacctaagtttaggtagtagcaagttgctcccgcaagcaacaaactccataggcttgcctgcctcaaaacaagtaggatgaacatagtggagctttggagcctgcacatccaccttggcttttattacagaagtcccgtctacgcatattgaaaaaggtaagaacatgtcaaagttttaacaaaattttttatccaaggatgcaatggacaaagatatttaaaaacaaaaaaaaaatagacatcataaaattttccaataaatgacaacacaaagttcttgcaatgacgacatttaagaacactgtcagtttatcaaaaactaaaattaaaaaaaaaaacactgtcaggaaattaatctcaatctccccatttgttcc

SEQ ID NO: 28120 - DNA, 1699 bp, Cannabis sativa
tgcctttactaattcataatctaaaatgcagtcattagagagagagagagatgatcggagatggagccttgtggaccactaaaaatatggagaaagctaaaatattttttggagatggagtttggtttaggttagcttgtggaggtctagaccttgtctcgaagatggagtttgatttgggttgaatgtgttggaagaataagaaattacagaaaagaaaatgaaaaagaaaagaagggaaaaaagttttaattttttaatttttctaaattatttttttgtatattttttataatattttaataattaatattacgtgaactattaagaatttatcacttgtacatttagtagtttactgtgttatttaactgaagtttttagacaaaagggtaatgggcaaaatataacttccactcaataggttttactattaaaattttaattgtaatgattaagtgttaaaagatataaaattcaactgatattaagttaatatacttattttaaagtatttaacatcatataaatataagatgatcaacccttaaaattggttaccatatttttatattattgttaaataaattaaaatattttatgaacagttggtgtttgaattatactataattaaaatataagactaactaaaaataaataaataatagaaacgtgaatatttatatatgtatagtaaattaaattcagtctttatgggacttatttgcacatgtgctgaattttctactcacttattgttagtcaaaaatttaaaataataaaattgatatccttccaaattgacagtactggatattattaatttttgcgttgaagtttcctatatgctatgttccaaagaagagacttttcctatgtactatttcagcataataatataatcccactacagcagtcggcaggtctataaataagccagtttatagaacaagaaataaccataaaaacgaaactactatagctagcttattattattattaataactagctctatagttttgtttcttcagccaaaataaacatatatatatatataaccatgatgattccatttccaacccatatctttctcagttcaattaagttttgttttgtgataattcccacaaccatgtggaattacatggttttgtgtttagatcatttgacatgtgcatttgagattcttctttacaaccagttctctttcccagaacctaatattgataaatattactctgctaattataataataacaatagtactactattccaaataagccagtgggttcagaaatgagagtaaccaggttcgaatgctccgaaggtaaagatgtaaatgatggtgatgaagtagtagagtgtgctgtgtgcctttgtgaggttaaagaaggagatgagatcggagagctgagatgctgccacgtgctccacttccgttgcttggagaaatgggtcgtacgatccaagcagatgacttgtcctgtatgccgtggcactaccctaccggcgaataataataataataatggagtccaactcttgtatttttacaagttttgctctttcactaccaataatacttcttcacaacatcacgaacgtgactcttggtggctacgttaattttataattataaatagtatacacaataattattattttttctctaaattttttatactataaagttgt

SEQ ID NO: 28121 - DNA, 2072 bp, Cannabis sativa
ataatcatgattatttttcattgtacaaacaatactataaacatgagtaactatgtgttcggaatttaatataatttatagattaaatatataattatgaaagtaacatgtgaaccaagcattataaggtaatttctgatcttttattaactagtaaataatagaacataaaaccccaacatggcagacattcaaccttgaatctaagaaaatgacgtatcaactttcttagcaaagctcgaagaaacctaaacatgttttggaaagtttaatggtgggttctcgggaataaccttaatttgagtgttaacaatttccaatgaatgtcatcgaccatctttaacactaaaaggtgtttcaaatttttaaagcttgctaagtgatttttttggtttgaaggttcgaaaaaggtaaaaatggtaaattgatttctaaatttttatttataagaaaccacaatccgttccatcttaatcctacgtctcttataagatgggccagagaaagcaaaaacttgatctaatgatctggaaatacaaacaggttcattattatcataatctttgttacaacagagttaaaatgaaaattaaaagatttattattcctagctattttcatcataagcaaaagtaaaatgttagccaaacagaacttaagcctaaaactcaaataatacataaaacgattatgctgtagttttcaaagaataaataaaataaactaaatcttaaaacaataattttatgtatatatatatatatatatataaaaatatttaaaagaactataattatatttcaaaggacaacattctacccttccaaaaaatattggacaacattttaatgacgcaataataaaccttcaaaccgtaatatctataaacgacatctcaatcatgaatcaattcataaacaaacatatgatatcatttgattaatttccataaacaacagaatatccatctctatagtctcttacttacaaggcatgcacataacaatatatataagaactcccacacatacaaaaatgtgagcaagaaaacactcaaataagaacaagtgaaatcctgaacaaagcagcagccacagacaagaacatcatcatcttgagttgagaaagctaaatgctaaaatcatcacagaaccatcttagacattatcttaactccaaaaatcataaacgatttgatccacagagattgtggtgtatcagttgggatgccttgaaatggcaccttgcagagtatgacactgtggcaagtgaatgacatagccgctatatcagctcgatggtttacaaagatggttcctcaaaccgtgttagaatttagaataagatgcataggattccatctcaaaactataatggaagtaatctattcattttatatatggtaatttattttcacacattaactatgtagaactaactctaataaactgaaagagcgaggaatgtgaagtgtactacccaatccccttttgtgattaaaacgaacacaccaaaaaaaagtaaaaaaacagtttgtgatttaaacttgaaatactaattcatagtgaagctgacagaatagtagcatcatcagttatttaattatgagcagaaatgtcataaggtgtgtacttgtgaaagaaaagacatggaaatggatttcctgaggaattcatttatatatttcaagaaatacaataattattgttctattactactttaatttggcatggaaaggtgatatgaagcggtaccatttaaagagcattgtgagttgagtggtttggggtctaatttaaaggagagatttttgtttttttcagcttatttttcagaaactaatcctcaatttctcttatctcaaaagcaaaagaagtgctgcagcataaactggtaataataaggagtgccattgagaccagcttcgagctcgaatatcctgtaaatcgaaaaagacataaaaacgcctaattagcaaatgaagcaaattaaggttccaagcagatcatgaataaaccaaaaaacaaaaatgaaaattttcctgaatcccaacccaactcgagtgaaaaaa

SEQ ID NO: 28122 - DNA, 2028 bp, Cannabis sativa
tgttgattggtttcactatacctgtgaaattggttaatcaattttcgtgcagaaaatggaaagctctggttttgcatcaagaatttaacaaaaatgcatccaacccttctcaaacttcccataatagctcaataccataaatataatgtattcagagcaccaattcacaacaattcatcaatttgaacaaaataaaataaccaagtgaaataaagctcattaaaatccatctaacccaaatttagtctaatagcccctatctttagctgattcaaggtgaaacgaactttaaatcaaacctaaaattaggttctaacctcagtttatacgttagcaccttgaaatcctacaaacctacccaaaaacctaaattacaccataaaaatcaatagagaagaggaagaacacaccctacaacccgaacagcacctacggtagataggttcagcttataattcgtgagtttgatgaactaaatccctttgttgcagcaggtttctagggcacgaaggaaagagagagagagagagaagatgagtttggttggtattttcttgagtttttgaagcttttctaacctttcactattttgtttcttcttttatactcgataataataaataaaaatcagcccatattattagaaactcataaaagacaaaataaggtaaaatgaccattttacccctcccttaaaacataggctatggaataaccgagggcattttggtcatttataggtttccccaatttaatctatttccaaaattttaacctagtccgatataattttaatacaacacaacttaattgtcatgactcttctgaccactccgtcgagtttccacaaccgcaaaacatgaaaaatattttattttgaaagtgctcacttaatcacatatttaataaaatatgtctaattaaatatcattatattttttgggatattacagaaccacacaaagattgttttcctactttagtttaaacatgacaattttgtggaaagaatgtttgtccaccaataacttgtgggtgtaaagtggttcgaatctctaactcgttgacattaaggcgtgattagattccatctttgctccaccaaagaataataaaccatgtattaggcaagctgtctgacacatatttctaaatgtgcatcacatccagattgttatcccaaattttgtccacctgacgtggcatgtccacataagccaacacaaagtataggtggaacacaaccttgctaatattaagacaagatctccttacaaggtatgtcaaaaccgttaagtagcaagaaaaagtagttaagcgagccgtcaaagagctgcaccaacatgtttggctgaccaagggatgtctataggccagctaggataaccttgtattccgactaagatctcggcccaagataactgcctaaaaggtgactttcaaacaaaggtagcttctgttcgactaagaaaacctgacctccactgggaaaaagtgtacaaagttggcctccatttgccaaaggctaatctacacaaacaaaggctagcctcatctcagtaaagctgacaggaacatgacatgcatgatcctggcaagcacattacctgccaggtcctggcaggagcatggctggcaagacctcaacttgcagaccttgcatggccagccagaccttatcctacagctatatggttggcaagtctctccgtggaaggacaaagatgtgtagccttcatccctagacagcaaggcaagctctgagttgggccttcacaacccactaagatgcaacgaaaatatctacttacagtggataatttggtcatttgtattagttaattacatatgttaatatctatgattttatctgctaaatagggtttatgctctcctatataaagagccttaactcaaacctagaaaccttagtcactttaagtctcatttaggccataaatctccaagtctaaaaccctagctctctctttctctctctctctctctctctctcagatcggaagagcg

SEQ ID NO: 28123 - DNA, 1461 bp, Cannabis sativa
  modified_base (63)..(64): a, c, t, g, unknown or other
ggtcctatgtttgaggggaggattcttgggaatgcaaccaaagtcccacattggctaggaatnngaagaattatgggtatataaagatagacactactccattaatatgaggccttttgggaaggtgcccaaaaataaaaccgtgagggcttaggcccaaagcagacaatatcatactagtgaaagaacgagacccaacaatactggctctctactaaacctaggtaatgaaagttttgatttttgttatcatggattgaatttttttgttctcttttatgtaaacattgattgatcagaaccaacaacaagttagacaaatcatcatttacaattacttcttaccaaagctcttattcaggtttgtaataatgatttttttttttttttttttggagttttcttgagaaaagaattgaactttagtgaaatttgaaggactttttgttaattgagaagttaattgcaattagggcttaattttatttttaacattagtgtatgattttgtaagtcttcaatatatagttatgtcatgtaatggaaattagcatttttagttatgaaattcaacaatgtagtttcaatgaatttagctatatggttatctggtctatacaattatatgacagactctctactggggcatcatattagaatattgtgagaaactgtgagaaaaatgattatgataatgaataacactgatataggaaatgatttacttgtctgtttaagagaattataattgtttgtgcccaatggcgaacgattaccaagtttcaaactattatgtgctttactttgttgttatttgataattctaaattcagtatatatataaatgggtatatgacaatcattattaaaaattatatataaatgttggtatataaaattatttagttttatcaaatgtagactttgtgaagaaaaattttataggtaagcttttaatgttctaattttgattatagacccaatctatatgcagtattatgatattggtgtggaagaaaaatttctagttgattgaagattttttttagggaagttttttgtgagttgtggtagatcgtgtatgagttgtctatgatctgtatattgattataaatatacgttatagtggctaggttttgtatctttttcacatctttgtatttctctcatatttttaaggaagagtctttgttgtgtggagagggtgttcgtctcttcttttgtgtttatgtattttgtattatttcgagtctgaaatcaagtctacaaaagaagaataacaatgctacctttgggagaaggttctacaaacttttgggagatagatttctaagtcattccttgagaggaagcaatctctcttcaaggagatcgaagggggtccgagcacttgcattttcaataagattcagttaagtggaatacatcaagcttgcgacatataataagagggagtctat

SEQ ID NO: 28124 - DNA, 1633 bp, Cannabis sativa
gaagaaacttactctccacaccaaaatataccatcatcgggtaaacccaaggtatcgcctcctccggcaaagcctactctttcttcttcaaattcattcaaaaaccctaatttccatctctaccgccgccccaattgcctcatccggcaaacccacttacctggttgtctccccttcctccaacgctgcaaaggtatctcttttctttcttatatgttcgttagtcgttactctatttttgatttctattatgtttgttttgattataaattttagacatgttggaatttcgagctttaattcctatacatagtaatgttggaatcctgggtagcattctctatccgaaaactcaagtcaaatttttgaagagttgatttcctaaattaatttataagattgtcgatttgaaaattaaatttgtgcttcaaagactatgaaattttgcttcttttgttttgggaaattatttatatgcatttataatatgaatggcaacatacacccattcttttcatgtattatcagcacaatttagacaaaatccagcggttatagtattgggatgttttgcttgtattgatatttctatttttcaaatgaatattgaatagtttcagtcaatggattgatatttcttgtatgggtgtgttgtccatggtaaaaagcaaattgcttttcacaatttaagaaccacactattattgggttcactagaatcttattacgttgttttcaatcagtggattcagattttgtttgtaggtgtgcattttcatgtatatgtatatatataataatttatatgaatctaatgatgaactattttggttgagcaattgggtttttgttgtttcttggggttgtgatactattatttgggtgtaatcataaatggactagtatctatgtcattgaatgattgttcttggatcttcatagctgatgcaaaatttgattgtaaaaaacttggtccgctctactcttatccttgaaattaaacgtaacatcaatttatttatctgtttgttttgtccaagatttgtttgtcctctttccttttgagtgttgttttaccagattattgtgaagcagtacatattgaattccaattattatgttcatgaaacgaacaacgaacagtgtgcttgttaatcacattcataagtttgttgtttctgtttagtgtggtctcttatatattttcagcttgtgtctttgctggttggttgcaccaaatttttgttgaaaagaatcaatttttccttaatactacattgcaattcaatgcacatcttttaatggattcaaatccgattgatatatttccgtcatcatagtgtatctataattaaaaatgaccaaagggaactttgtctagttagcttattaaatgagtgtttccttgctaaacccccttttgaatcgactctttctccgattcttactcatattcctcaaaccatcttctaacatgatgttcgtgaatactgaatagcataactggcatgaccagcttgatactttagtgatggttagatggttacattggaattgagtttgtttgttcatgggaaaagcacatttcacatttgagctcagtttatatcaaacaaaagtacctcatgattgg

SEQ ID NO: 28125 - DNA, 3690 bp, Cannabis sativa
gtctaaaatagtatttaccctacattatatatacacataaatatttttttaaaataaaaataaataataaaagatatatataaatataaatatgagatgactcaaaaatatataaaaggtgaatttaagtgaaggacataattaaggctagtgaggccccccattgatgtgtgtgtgactccacccatatatgaaaatgacatatggggcttcctaaaagaacactacataatcatcatcatcatggagaaaattcacataaaaatggcatttatttataacttataataataataatgtcaatggctatgaataacctccatatacattccaccatatatacttctaattgctattattgttatagcttattaattgcatgtccattaactaattaataataataccattaattaaatatagacatattattcataattcatttaaagcttcataatctatatcatccacaagataaatatcttggtggtgtcaactacttttaattttctttgaaaaatttggtagatttttttttttttttttgagaaatggtagctttaattcttattatcttaatttgtatataatatatattttatggatatatatatatatatatgagagtgtccaagtgatctcatatagtgctctacaaattatcaatggtatttatgtcccccaaacatataaatatatatattggtcacggtatgtctaacctcttcttcaatactcattctttgaaaatttgttatttatgatgttagggatttaaatgtatcaatattggtattttatgtgttgtaaattagagcagacccatatagaagcgagaaggtaattacttttgaaaataattgaaaaaaaatgtatatatattttaattaattacaacatgtatttataataaaagataatatttataggtataatattaattttgatataatggttaagctagatatcatttaagataaaatctttcaaatcttactaaaagttttttttttctttttaaatttacttttatatttgtcaaaaattataaataaaaaaagatagtcaattttataataaaaatgttgtaaatataaacatggagggagtttttattaagattttgaaaggggtatgtccatgttaggcatttggaaagggattcctttttatatttgtttttttattatttattttttttttatgcaaaaaggttagattacattttagtcaaacatatagatataaataatatataatataaaataaaaaacaaaaaaacaaaaaatgtagaataataactcaatgacatttatgacaaagagagagttataccattgttgcttcatttacacgacatactataaatattcaaggttggactcactcaagtgtaactatagatttgagattcaatttattttttttattataataatatataaatttaataaataaataaagagcatatgagatttatatcattttttgatttcatgttatttaaattaaactttgttgaaccttctgttttttttttctttttttaaaaaatgatgttttgaatcttaattatattttgtttattggaaattaatttttttttaattaaatttagttaaaataattttaaatttgaccaaataattaactttatgaattaatcaattaattacaatgatttttttttttttttatatttgagaaatagtttaaccatattataatattattttatttttttaaagggacttagattatgattctttttttaaaaaaatatatatataaatttatgttggtaatgcataacattaagaattttaataaaatcagaatttagccacaaattaaaggaaggaaataggaaaataatcataacaaaaatataaaatagtaacaattaaatgaataaaattatgattaataattgatggggaaagagaataaacaaattaaacaaaaagaaaaaataaataaaaaaggcatttattatcatgtgtaggattgaagaggacagctaattttctcatgaaagtacacttggcctgctgcacatggccagcttggtccaccacccattcttccaatttaccaaattacccctctctccctcccaccctaaaatatcttctttctcattttgttttatttcacacctcttaagtttatttaaatattagttttaacctaatcttcttggaaattctaaaatatatgtttcactatacatttgattttgaaggcatttttgtcatttaaaagtgaatctcactagcttgtactcaattttttattttaaataaagccttttatagattgaaaaaattagaaattattgtcataatatagccagattacgaaccttaaaattacataattaaaaaatcttaaatattataacatgataaatctcgaggagttaaatttattattctggagagtgattcgagggtggtgatcaacgctcttaatgggaaggaggcacattgggaggttgataactacgtctctttttgtaaaagcatctcccctttctttatcggttgtatgtttcaatatgttagtagacaatgtaattttatggcccataatgtggccaagtgggcgttttcctgtcagaggtttggcatcatgcctctttcctctatgcctgaaactatattttgtaatgaccgcgaggtctaacggttttattctaatgcatgcacgcttttcttcaaaaaaaaaaaaagacaactactgatatagcaattaagattctattttgaagaccgaccttctctaagagtgttgatgataacttttaagtcacttttcctaccacaaaattttaactcgtggttactataatttttaacattagcaaacatgcagcatcttcactaaagagaaatttgaaaataaaaaaatgttgataatcacccacacaatcgaatcaagataattatgagccacaattaacacatacaaaatctccttactatttcttggttttgaaattttttgaatgatgtgatattaaaaataaaatacaaatagtttattacatacatatgtaaaaatagattgatttatgtttaacttaatatagcaaattattcaataatttttttaaaaaagaataacaaattacttattataacaacaatgtagattattcttttttttattattataatctacatttattatttagcaaaacaagcaattacccataatatttccaaatgtgtgagagttaaaaacgataatttttttgttaaatgtacatttaataataagagtattgctattagatactactattgtttagtactttatgtaagtggtattttacgattgattagcgatattccttaaaaattattttattaaattatgcaaaactcaatatttaattacaacaataacaatataacaccaaaaaccgaaaaaaaaaaaaaatactaaatacaaataatgtaacttctggcaattccctaataataattatcaacttttaagtgattctcatcctaaactattttctatttttttaaatatatataaacaaataaaaaaaggtaaattaagaagggtaaaaaaggaaagacagaacaaattgggcggttgggacccaatagtgggctgtcgccaaatggcaggtggggagagaagatgacttgtctatctgtaattttcattttt

SEQ ID NO: 28126 - DNA, 2068 bp, Cannabis sativa
tgcacctagaattttggccaaatcactgttaaaaatcaacatttcaccaagtttaaaagaactaaaattctatgaagcatgtaaaatgggaaaaagccataaattgccttattctttgtccaactctagagcatctcagccacttaagttgccgcacacagacctttggggaccctcccgcataacatcccttgaaggtcataggtactacatcattttcattgatgattttagcaggtacacttggattttcccactaaatataaagtcccaagcctttcccattatcttagaattcaaaaatcttgtagaaaaacagtttgatctaccaatcaaaactgtctaatctgattggggaggagaatacaagtcattctctaagtttcttaccaaaaatgggatttagttccaacacccatgtccccatgatcatgaataaaataaaagggttgagaggaagcatagacacattacagaaattggcctaacattgcttgctgcatctggtctcgatctgacatattggtggttagcttttcagcacactgtctatgttattaacaggttgcctacacctgttcttgatgatttatcaccatatgaatacctctttcacaaaatactagactacaacttcctaaaaccttttggttgctcttgctttccacatttgagaccttactagtctcacaagctggacatcaaatcagaaaaatgcacctttgttggctactccttacaacacaaaggctatctttatagaagcaacaaagggagaatctatatagctcaaaatgtcatgttcaatgagctagactttcctgcaaaatcttcaccacaacctcaacaggtaactatctcgccatctactttactcctacaacaagtttcttcaccatacctttggaaagtagtttcaataactcaccatatggttttctgcaacacctgctgctgatggtgctagtccaagtacattacctgatatggctcttagaccaactgagaatgcacaattacctgctgcacctgtgctcaattcatccaatcatcctccagtctaaactgctactcctcaagaaaatgaattagtcactgttgctctccacaactgtgatagccaacatgttgtatccataatagtgtcactagttgtaacttctaataagcctcaaccatccactatgactgaaccccccattcatacgcaaaccttaccaactcagctcccaaataccgatgtggtgccccaaactaccaatgttgaagtacatgaaagcacagcagctcccaactctgctccaggctcatcttcctcatttattccatgtacctctacctttaaaacaattggcaacactcatcctataaaaaccagatcaaaaaatggtgtgtataaaccaaaggcatatcatgctaccactcaccctctacctgaatctctcacaccaactaaaccaaaaatacttaaacaagctcttgctgatcctaaatggttcaaagctatgcatgatgtatacctagctcttaaaagaaatggaacttggatattggttccatatgattcaaacatgacattagttgacaacaaatgggtgcatagaataaaactcaactcagatggttctgttaacaagctcaaatcaaggtttgtagccaaagggtatctccaaactctagggattgatttcacagatacttctagtccagttgttaaacagcaacagttcgaatccttctcacaatagctgtgtttaacaactagacaataaatcaactatatgtctcaaatgcttttctaaatggatgtctacaagagacagtctatatgcctaaacccccaagaattgtggatgccgagaaaccaactcatgtgtgcaaactccataaagctttgtatggactcaagcaagctccaagagcttagaatgacaaattataatagatattgtttcataaaggcttctcagcttcaaggtgaaacacctccctctttataaaaggttctggacatgttttgatagtacttcttatatatgttgatggcataataataacagggcctaat

SEQ ID NO: 28127 - DNA, 2273 bp, Cannabis sativa
aacttaatctaaaattaatactaaaaataacctaacaatattacatatctgccacgacctagggctcggatcgtgacggtgtgtgtgtggagaaaaatagtatgttgtgaaaagagaagtgattagtgtgagtttgttgtgtggtgagagtgagaaagaagtaaagggtgtattgtgatttgggtggagagattgagatagagaatgtatataattttgaagtgataagtgaaatatatctctctttgtgggtttggtaactttaccaaactaagtaaaatttcgttgcttcatttctctattattttgttgcgcgtgaagtttattattttttcttaacaagtggtatcaagagtcaatgttcagatctacactaaaaatatcaaagatgatatcttccacaaaatttgagatcagactttttgatagaagaacaattttagtttatggtagagcacggtgaaagatatattagtacaacaaaggctcctaaaggcactctagggaaagaagcatgagagtatgactgatgaagtttgggagaagctgcaagaaaaagcaataagcactatttgcttacatttggctcctaaattgaagtatagtgtacagaaccgtatgagttatggaaaaagttaaaaaaaaaaaaaactttatatgtcaaaatccctagattatttttgaagaaacaattatatgagttgaagagacaattatatgagttgaagaaacacttttgttttctgtttaatttaaaaatgaaaattaaaaatggttacaaaacgtattttgtttttcaaaagcaaaagttttaaaaacaaaaattttactttcattttgagattaaaaaattagaaaataaaagtgttaccaaacggcaccttagttttactcacttcgtttttttattattttgttggtgaagtttattattttttccaaaagaaaaccaaaactattaagaatttagtattatcacttccaaatgcttaccacgactataatatatttcttcttagcaaaaaaatcaataacgtccacacggtcatatagaattaattaagctataatattttcaaatattagaatgagagacacccctactagaaagcacttctaatataattttagaaaattctataatgtaaatcttttaaaaagaatgtactgatatatttttatctgttttagtatttgaaataatttttttgttaaattttttcacatggtcatgtaaattatatttatttaagatatcttgcaaaattttaagaaatttgaaaaaatttaacacgccagaaactaggttcaaacaatatgttgcacgtgtaactattttattttatacgcgtgtaaaatagacggtttaaatatcattttatacattataaattattccgaatttctcaaaattttgtaagatatcttaaatagctataacatgaatatataaaaaaaaattctaaaaatttttgtattgatacgcatacattctttttaagagagtgcattgtaaaataattttataatttttcctataatataattttctaacttatacaataatattatttgacaaagcattgactcaatatggtaacatagttcataaaagagaaccaattttgttattttaggctggaaagtggaaacacataatgttattatttttaagttcatcactttgtacagctaagggtcccacataagatctgctttaacagaatgctcaaatcttcacttcatcactaacgcgagctaatagaatttagaagaactatacataaacacgtttctccattcttatttggaatctacataagagtcccaccatgagtatacgtacctttgtttatattgttctaacgtctctgtcttttgttgatattttttatattatactgtttgattatgtgagatatttaggttgaattaaataagagtgcaaacaaaatttataaaaatcgacttccaaaaatgaaaaccacagcatatatatcttaattaaactcaacaaataagattacagtctatatatatatgctcccaatttatatatatatagacccttctcccatcttcatcttaaacttacataatatatataatcaaaatagacatttcacacaccaaatctcaaatttgagttattaattattaataacttagggccagcactatcgatatcatacgactccagattcattactattaataacactgacaatagcaatagttgtggtggtggcctcttcttctgtcgttctctcccg

SEQ ID NO: 28128 - DNA, 1690 bp, Cannabis sativa
tgtagatcctagtaaaatattcccaagagggagcgctatgcttagacaatctgtcacaagcccaaaattgttatcttagctttcaaagaccagagctctaagcaacaaaagcttgtagagcccatggatctccttcaccaaaaaagatgctacccagttcaatttctcgcacaatgaccacctagtcaatactgtacgaatcgagaacatgaccatagcaagatgtatggttgacgatggagcctcctccaacattttttttccaaatcaacatatgaaaagatggggctccaactcactgacttggcgccttgcaaccaagtgatgcatggcttctggccaaggcatcgcacctatcaggaatatttgattacccctcatagttggaaaaaatcaaaccaccataacagtgatggtgcagttcgtcgtgattgatgttccatcagatttcaaggccatgataggtcgactgaccctcaaggacctgaaggcggtggcgtctatctaccaactatgcctcaaatttctaaaaaggcatggagtggaatgtgtgaggggagaccagcattctgcctctcattactacaactaggccccgtccaaggcaaaaaaagagaagaagcctgccaaaatcctagagaatgagcctagcaaggggcaatgaagtctagcccaaggtagggacacagacatatatccttgctttggggatcctacagaaagcttcagacctgtagaagagttggaagaagtggaggtcagtcccacttccccaacaagaagactaaagattcagaaaggtttggctctagaaataaaatcaatattgatagaatttataagggcaaacctagaccttttctcatggtcacttggagatatggtcggaattgagccctccatgaggacccatgcactcaacattgatccaagcatccagcatgttcagcaaaaaaggcagttgttggataaagagtgtggccaagcacctaaagatgaagtcgaaaggctgagagccaatgacttcataatagaggcattctaccctcagtgggtatccaaccaagtactggtgccaaaacccaacaagaagtggagagtatgcatcaacttcaccaacctgaataaagcatgttcaaaagactactttttactccccaaatcgatcaactaatagatgccacgactagccatgaagtcatgaatttcatggacgcgtatttaggttacaattagataaatatgcatccaccatatcaggagcacactagcttcatgatggacctaggcctttactgctactaagtcatgccctttgggctaaagaattcaggggccacatatcaaaggctagtgaacatgatgttcacagatcttattggccgcaacatggaggcgtatgtggacaacatgatttttaagtccataaaggttaggggcacatggaggacctatgcgagtgcttcaaaatcctttaccgctacaagaggaagctcaaccccctcatatgctcttttggcgtaagctttggaaaattccctggcttcatagttaacgccaggggaatagaagcaaatccagataaaatccaagcccttttagacatgaagtcacccataactgtcaaggaagtacaaagcctaataggatgcattgctgtattaagcagacttgtgtccaacactataga

SEQ ID NO: 28129 - DNA, 1862 bp, Cannabis sativa
atgattgtttaataaatagatcaagaactacaattgttaactcttataagcaaatgtaacaggtcataaagggttctctgcaacattaagcaacgagaacccaaaaactagtatcatagaagagaagaaaaaactcaagccattgttttctattaacttaaacttaaactttctaggttgatcctcatctttataagacatggtttgattttcttttaaattttttgataaaaaatgaaaaacataaaaaatgaggtgcctctttcaaaagataatgtaaacgaacaaccgaaactcaagttcattttcattcaattccccctcaacatatccctgaacaataattatataataattaaaaaaaaaacccagttcttcaaatttacaggaagacagccaaaaatttgaactttgctcaaaaaattcataagaacgaactgaagttcaacaattacaacagcatttacagacaaaacatatagagaaagggattgcgaaagtgaaagccataagcttggagttaccattggtatgtggtgaccttcaactcatccaaacacgaaagctgctgaccagaaacagacccgagaatcgctacaaaaaaaatatatctaacaaaaaattaaaaagaaattagttcaaagtacacttttaatcaaaataccaatcatatcccaatattcataaagccatgaaacactttctacctttcaaatatttcccaccctcactctaaagtttcgagctttggtagggactctttctctctctcactataaaaataataataaatatatatttttctctctcttccgaaactcactgaaaagatttcaaagtgaggactaagaaagagaaaagagacagtggtggggactaaactcaaactgaagaatgggcgccgcttgcaatacaacaacatcaacaaaatatttttttatttataggaaaagaaaatggaaaaaaaaaaaattgaggtgacaaattgtggttttaagggcacatttacacaactgtcctttcctttttgtgaaaataagataatgatttgtgaaaaataacatgacattattgtcaattaattactacataaaggtgccctaattcaaactcctatagtggaaaaaatatactagattgatcctgtcaatctcctgttacaatttcttaatcaacttctatgtccaaaaatacatgtcggaatattttttttaaaattttttttcacggggtgttcgttatgcttacaacattatccatgtaaatttttgaaaattttcgaatagtttactataccgaaaatacgtttgaagttttttgaacgcgagtggtaaactggaatatcaagaactctgttttcggtatcgtaaactattcgaaatttttcaaaaatttacacggatgatactgtaactataacgaatactgctatgaaaaaaaaaataaaaaaaaatattccggcatgtgatttcgaacatataagttgattaaaaaattgtactataaagttgtaattagcattccttaaaaataaattacaaattgtttgttgggttggtgtgaaatgaaccgattattctaccttaattttgcttaaatggaaagaaaatgaagagtccttttatgtcatttcgcaaaagtattttgttttatattatataaaacgttagagaatatttaataagtgtcgtaaccttttacgacaagacaaaggtttatccgttgaaagaaatatataaatataagatagggacaaatattttattttattttatttttgttattatatattattggcaataaatattttattttaagaaaagacattgatggttacacttacacctctctatttatttata

SEQ ID NO: 28130 - DNA, 3016 bp, Cannabis sativa
taatttatttgaagaattttactctaattagatatatttttaatttttcaataaagtattattgtcgagcttttctgtatgggttcagtaaaaatttgaggcaattaataaacattaatcaattgcgtcacttataaatagacactccatttttattattttggttgattttaaattatcacaaaactgacaccaatgatatagcctattatcgtcaattcacaaaagatacaaaggatcgggccacgtggagccaatcttcgtaggaagaaggagtatggacacggcaaccaatgtgaacagagagaatgatcggctcacctcgcttgatgtgaacttgcgagaagatgcgattgagacagggtctagtcgcatactatgtcccgcatagttaaagaataagcagaaccaagagaagttaatattggccgtgcatataccaattatatgcaatgattaagtatatctctcctgcgatgagtaaagatcgactctttacataggtttggtctgaataactaatgtgctcgaagactcgccaaggactcgcatatcctacgttgtcaacgcatagaatatccaactatccaatcaaagatgaatgcaaacattcaaacaaaataggcccaaaggcccatcctgtgagtacaacactgaaaaacccgcaagctcatgtgttggaatatgaatggacaagtcgcggcttatcaagtcgcatacgttgcgctgcaattaagttaagaatagagacaaaaattgttcttcatttattctttatacgtttattttgatttaatattgtcatttattgtaaaaacagactaatcaggttgcttatgtaatcctaaaggacacttgctttctatataaaggggatcatcaaataaactaggctgaaatcattatcaaaagtagactaagcaggccaagctctgactgaaccactataattatattgtcttctctttatttctgctttcgtttttgtccatttggtagcctatactttgagtactcgctattctaagtgagtactcgcataactgctgttagatatctaactttgtttaaatatttgcaatatttggtgttgtctaaattcctccgacaacatttggcgtcgtctgtgggaaactcgttatatttttgagattttggaggagaatcgaaatggctacaaattagaataacacgaacaacaacaatgaatatttcaacgttggcactatcaatgttcctatttctagaggagtaataatctcggttgatgtcgttataggaggagtagagcgcaccaatgtggctcccctcaacctgtttcctcaattctcagggcatgctggataaacctcgacatcaggagctactcaccaatcacacccatcatcgcctccgagggaatcatccaactaacaacctcacagtttacagctttgtaggaacaactacgaacattacaagcagagatcgcagtaagagaccaaatgcaagcttgacgtccaccatgagtcccaaattaatgtcgtactgataatcaggtaattaatgatactaggcatcataatgaacattgtaacactactcgtaattacagggaatgtttcggtgaaaatgactacactggaatcgacttgaattaacctattcacgaccccatacccggtagaggtcttgttgttcccaacacaaatcaacagcctagccataagatggagagaccgtaggaagatgaagatcctaaacgatgcaacatgcgtagtcatgcacaaccgcaaattgaggtaaacgacgtagagtcttattcctcttcctcgaggactaatagacgttcccccagtgtttacactaggtcaagaatggtgttcacaagactaggaggaaggtaccatgcgtagagaggtgacctgcgagactgccacaacgaagtgttttgcgcatgttcccaaatcccaagaaattacaatataaaggaggaaccatgtgatctccttttggtcaatcaaggtgtcctcccaacaaatcaaagatccctctggatcccacaatcacctttgaagtcgagttaatagaatccaaagttaagtccattggaccttatgttaaggacgttttaagatcacgtggcatcatgaatgagtagggatgtcacattaggtctgttgcttagggggaattcagctgttatcccctaaacatctagtccgagatgaaggttatagtaccagcgagccttctagaataggcgcttggaatctcgaacatataagagctggggcaattctttcactcaaggactactttaaagtattttgcaactacctcggtattgccccatttcagttggcaccaaattcatacaggatcttggcctatttgaaatttctctaccacattctaaagtgggaatgtccgactccactaaaaattctttatttttactttatcaaagcttgtcttgcgaggaagcgtaaagcgggaggcttttactacctcgggacccatactaatgatcataagattgttgtgaggttgcccaacaaaaaagagttcaaggatgacttcttttggacctctggtcttttcctatcaacacaacgaaatttcaaattataagtaagtataactcttcttaaattcttggttttgagttttagttcgatatttttttatactttactaattttgttttttgttatgttaacatcgattactaggagacctatcacaactcctgagattaagaaaaggcacattcttggccttccctatgggttgcgagcggctgacttcctgctgcatgagaataatttgaaggcttgcgcccttctcgatagagaacagtcgacaaatgactttaaggtcccagagtttttagactggcagcaagttccaatacctgctaacgaggaagatcgagactacgtggctcacaaccattatctgaggaatgtgacccctcaagaagccaaagatgatgcctcctaaggtaatgactttggtgcttgtggatggtccc

SEQ ID NO: 28131 - DNA, 2289 bp, Cannabis sativa
tcgatccatccacttccaatctcagaattacccattgtcgatttcagctttaaactaggatcctccctttatactcgtttccctgttttcatttttatttcttcctcactattatgtaattcccatggttcagcccttcgtttaacacctgaactaccttcacccacaaagtccctctcgattcttttgtcatcaatcttatccataaggttaaaacaaacagaaggcaaagaggagatagaaaccggtacctccataatagtagagttcttgttagtgattcttggcacaaggttgagtccctgcttgtccaagaaagaattcccatccttcacgttcaatagatcgatcactgcctcctgactcaacttactttgtccatcaccttcgagttcctcccccaaagactgtcgttgtttaattcccttgttcattgtcgcctcattagcctttctttccctctccatcaatgattttctcagggttcttggcacatgatcgataatcatgacccaccttcccgcagctgaaacacatgaaaggcaatctctcatatcttaatggtaaccaaatccgccccccagaatttggaaaaagatacccagggcacaaaggtttatagatcgatatccatactttgaactagaaaaagccattcaaagctatcttagttacatcttctttctgaattttgatgacctcgcctgccattgaagccaaccgaatcatgttgctcctggttattgaacgagtaggaaggtttaacaccctcccagacagaaggaagcgggtcaattcaccctcccattttgacggaatcttggagagccgttgaaggatcaagatgccattgttcaacagccagggggatttattcactattcttgtcaaatcgttcttgttcttgaatgagaaaatcataaatgtagcttcagttgttgcccttttgatcttcactccccaatccacttccgctagtccccaaactctgcccagaattgtccgaatgagggttttgttcaaggttttgttggagcagaacctccccataaggcaagacttccccacctccgtttcctttgcttcattaatctcccaaccatcttcgtcttcaacccttaagttattcgtgcgatcaagcagatcctccattgttaattcaggtgtttgaagcattcctactggaaaggctcttctccaagagagagcaaaaagtctttttcattttcttgttgctccccaatattctgccaatgttttttgagtaattataaaatatatgatcgtatatagtttttcaagagtaatacttatttagtattgagtatttatttaaatataaactttgtgccttatactcaaatttgatcgatcatattttataaatattatgaaactacattacatgggttttaaattcaaatttaacaatttttttaatataaatttaactatttaattatagatataagtgaaaacaaattggtcatattgataatatttgttcactaaattattttgccccaagtatcaaatatgttggatttcaagttacaaagtattatcaagtaagcatcatttaaaattatagagtattaactattaagtttgtattttgataattacaactcactctctagtactaatcacggccgacccaaatattttgagggtcttgtgcaaaagattaaaattggccttttatataaaaaaaaatgtatacattaagactttcattgctagttttttattccttttctttttaaaagatatgtttctaaacttttatgtataaattttttaatatatttataataatagaaaaaaaaaacttttcttataaaaaaatagacatttaaaaatggaaagccttgggcaatagctggccagcccaaaacttgggccggcccggtactaaacataatataaatatgaaatactaaatacaatttaggttactctttttttttaatctaaattagtgaatgacatttgtattttactaatgctttataatataaaatagttagataatattcacatatcatgcattgaagaaggtgatgtgaaaaaaagtacaattaacattttttttcactcctcaacataaatatctaattttattttattttccataaaaatgatgattccatctaattatatttgattatcataatccataaatgtagttggtctttccacctcttcattcatcaatctctcctctcctccaaggtcaatcacattatctgattgataatatgtctcaattggttttttttttgtgag

SEQ ID NO: 28132 - DNA, 2397 bp, Cannabis sativa
  modified_base (1994)..(1994): a, c, t, g, unknown or other
  modified_base (2145)..(2160): a, c, t, g, unknown or other
ttttggctgtttttcggtctgcttcatgaagttctcttttagtccacaactagttacttgttactaaaatgtaatatctcagtctttaacactaacaaaaaactaggtcccattttaatgattttcttttgtttatttttagcatgaaatgaatttttgtgtggctgaaagtcaaaaaggaaagtagtggatttttggctttgtcaaattgtcaattacatggacggtggacctacctaaccattcttcccatttacaccaaaaagattccaaaacaatgaatgggataacgaaacctatctatatatatttcctttattcccaacccctatagtgtattagtaaggaatatttttgtaaattaaaatactattttctaaatataaaaaattattctttaccaatttcaaaaaaattcaaataatttaacatcctagatatcttcacagatgttttttttaatgggggagtttaatgaaaggtctctttaaaacaaataaaatttattgtttaattaaaaattagttaatagaagaaaaagagaggagcaatcacatatatttagttttatagatgtcttttctaataataatgctttataaatgataatgtgacaaataatatccctcgacaatgcatgttatataaatacccatattaatgattttaaaacatcatggatcgtgttcgtgtatgtctaagaaataattaaatgtatttatattgaagagaaatcattagcccattctcaatttctattatttattgatcagaataaaaagacaaagtaaaagtactctttcaaaagtggacaaggcagattgaaccactgtaattttctatgtttattttatattatttacatacttgcacatataattttattatttttttgagtactcgctattctgagtgattacttgtatagatttggtgttatcgaaaattcttccgacaacaagtgttatctcaagtttacatgaagatgaatttctcactaagagagttctcgagtagaatggtctccttcgaatagagtaaaaaaaaatgtaactcttaagcacatacgtgtgtatcgaacggtggtgtgttttttccagtgaaatgatggcatgataaacattgttccgagagcactggtggttgtatgagcgagaatgctatatagaaggaggcttctagtcaagaaaggcacctacaacaaggattaaactattgtgcattttgcgtagtaggactggttgaaggctagagccgctctcctaatgattccaagacaagatgaaatcagttgttgttgtccctcgtactggatggctaatcgcactagtggatgttgcgataccatatgggagtttgcgggtgtcaacgcaaaactcaataacaccaccaatacctaccaagggtaccttcttccactactttatggggcgtttggtaatgaggtttagacttaataaaaatgagattgtaaaatttaaatcaaatttgaattttgaatgataaggggtttgtgtttccaagtaggcctcactttttaaattaaaatggtggcaatgttaatctccttaaacgcatgagtttcatattccatccaagtttacttctccaacttcacttatccaattcaaactcacataataaacaccccattaggtagcgttttgttagaaagaatgaaaacataactagaatcagaatgacattccaatactttaaaataatacctaataaaataataaaataaaacttgttacctttttattccatttcatttcattcactacaaccaaatgtcaccttaggccttactattggtattttgggataaagggcctcaacgatatttatgtcatttattaacataatatatacagttggtaatttaaaaaaaaatgctaattaggatttttatttcctaaactttgacatgtaccaaatcatgtctcttgaacttttaaggtcggtaaaaatgtctctgaactattgagatngttgaatttaagaacttttgtccaattttagtaaaaaaaagtctaacatggatgaaagttcaaggagcatgatttagtacatgtcaaaattcgaggagcatgatttggtagttatcaaagtctggagaacatggtttagtacataaacaannnnnnnnnnnnnnnnattgaatgaaattagataaaaatccttaaatctaacaattttaataattcaagcgaaaattttaacagctaaaaaagttcaagagacataatttattacatattaaagtttaagaaaaaaaaattgtaatcagtgatagtaaatagaagaaaaagaaaaagaataaaggtaggggagttttatttgcaccccataaaatgataaatacacccaaatattaaaaaaaatataaactta

SEQ ID NO: 28133 - DNA, 1192 bp, Cannabis sativa
caaaaaaaaaaaaaaataaaggaactaaaaattaatgtagacttactagtaagttactactttgggggtttaaattaaataataaaacatggtcttcacttattacttttctaactaattaacgtgataagtttgagtgatttttcaaaaccatgtaaaagaattctacatttgccagctaaaaaattatcaagccttttcttaacaaaaaacaattgtctacaaatgaatatcttttaaaatattctaaaacattaggtaagtttatgatacactatctaaaagatatttcggtaaattccctatcaattttgacatataatgataataattaatactgtaaatatagttgttagttaaatacaattagaaattaattgttttgtaacagctggttgtaactgtttgtccagttgtgtaacaaactttaagttgtaatagaatacttgtataatttttctttataaataaaacatttattagctgaagagatcaagtttttactgcatttctcattattgtttttctaaaaatctttgacataataaaattctttatcgtatcagagtaactgaccttcgttcatggcatagtcatcctctgatccatctcaacaggcacactacaagaaaaataagtttcaatgaggacaaatttcatcagtgaagggtgtctttttcgtcaattatggctatcaatggcgatgtgttgtcactaaaaaatcgtcagtgataactagttgctgtaaagtaagtatcaatgaccaacaaacaaagtcgtcactaaaaataaacatcaatgatgacattatcgtcactgaaacactactacaaaaatgagttttcctgacatttttaaatagtcgtttaaagtattcccgtcggtttctataactgtcgcctatacggccgtcgtaaaatgggcataataggtgacgattcaaaaccgtcgctaatgtgagtttcccgacgatttaaaaccgtcgcctataactgggtatagacgacggtttataaccgtgccctatactataggcgacggtttaaaaccgtcgcctataccctgttataatgatgacactattgtcactgataatgttagttttttatttattttaactttgagggcctttaatgacgacaaaatcgtcactgataacactatcaatgacgactttatcgtcactaaatat

SEQ ID NO: 28134 - DNA, 1126 bp, Cannabis sativa
aatattattaggaattaattaattaattaatgtttggtttattattggttagcctgataggtggttttactgtgattattgggctatatgtggtgctttggggtaaagcaaaagagaccaatataaagcatcatgatcaaagaccaacacttgatgaattaataatcgtggatgattcttctgacaagattattcatagataatataatgcttaaatgtagtgtagtggactatggtgtgtgggaattaatgtaactaaaatacagtataaatattgttgaaattaacaaagttatgattcaatttcaagatgcttatcttgattattaagtccaatattattcttatttactacatttagcatatttttagtgtataaaaagactatactgcgtacataacgcagaagttgtttttcttccaatcctgatcatccttcatttcaatttttcattcactattaataatattttgtcctttaattaattacttgcattatttttgtctactagctagttacttttaatatattgtccccttatgcaaaacaaagaaatatcttttattttttacatttctctcaagtcattatccctctttcaaaagaagaaatcttcttttttaatacgatttctcactattatctctctttcaaaagaaaaagccttcttttttgttttttgttttttttttttttgaaattgagaaaaagccttcttttttaagaccattatctctcactattatctctcaccattacttctcaagaaataaaattacacagaaccaacgatatttttctctataaaccatttcttgctagagtacttctacttattttggtatggaacttcccttcttcttaatttctatcttctctttaatttttttttttttcaatagtagttgaaactttagtcatatttgttttacgtatttttcttcaattattatttattactattttgattataccatgttctctcctaatcaagttatggtatactactgaaaaccctagaattttaggttttttttgatagatttgcatcaagagaatcattcctaaatgtgagttattgagtttaattatacaagtttgtagtatatgattaaaggctatgtt

SEQ ID NO: 28135 - DNA, 2529 bp, Cannabis sativa
gcctttctacctgccactcctctcgaaaagaacacaaaggactttaaaaaattgattgcctgtcccgagcagctgcagtaggagtttaaacagtccaagaaagatctagcctcgcggactgtagcttccccgaatagaatgatgtcatccgcaaacattaaatgagtaaccgagcctccatttcttgtcagtttaaatcctttgaggaggccttgcctctccttctcgatcagaagacgggacaaagttccagccgccataatgtaaagagcaggggacagagggtcgccttgccttaggcccctctccagattgaatttccctactattgaaccattcaaaagctgtttaatttcagcaaccgaaatgcaaaccttaatccaatccgtgaagagactattaaaaccgatttgatgtagcacctatgaggaagctccagtcaagtttgtcatatgccttttccagatccaatttgattagcatgaacccacgtttgccttttttcttgttcatcgaatgcacaatctcgcgggcaatcattgtattctcggcaatatgtctacccttgacgaaagctgcttgattagaagatattatttttggaaggatatctcttagtcttgaggcaatgatcttggaaataatcttgtatgccacattacatagagcaatcggtctgtagtcattgactaggcttggggagtcttttttcgggaccaataccagagaagtatcattaatgaatttaggcagctcctagtgagaaaagaaatgtaccaccatctcgactagatcctcattgactgcgtcccaatgatgtaagtaaaaacttggtgggaagccatccggacccggggctttgtctttccccatgtcacaaagggccgccttgatctcttcactctgcggaataccattcaggagattattttcttgttctgtgataattggttcaaatatcccttctctgagcggtgtgaggccggggtcagctttcttgaatatctccttgaacttattgaggaaacactgagcaatttgatcctggtctcgtatccaatcttcgtccggagtatgtttgatgtattgaatatagttccttcgtcttctcacaatggtagacgccataaaaaacttagaacacatatctccctcttgaagccattgcactctagacttttttttccaatgtatttcctcccgaagtaaggcttcagaaagaatttgcctcgcgttttaaacctcaaagccattgtcgggattcttttgctcagcctgttgcaagttggactttgcaagctgtatttgccgagagagatgagtgaattgatttttgttccaatttccaagttttctgcccgtagctttcaccttcctgtggaaattgatcataggatttacgtgtcgccttcctttccaagcttcctttactacccagaaggatcggggatctcttgcccacatgttttcatatttaaattgttggcctttgcacttgacccctcccatagtgtcaagcaacaaaggtctatggtctgattccgtagcggtgaggtggttgatgattgcattggggaatagaattcgccagtcagttgatgcgaggccacggtcaagcctggctctcttcattgccccaccaccatttgaatttcttccccctttcgcccacgtgaaagaagggccaagatatcctaagtcgatcaatccagctctgtgaaccattcctcgaaaatcaaatgcatattgggaagcattaccattgtagttgaagcattccttgtcattgagagttccattcatgtcaccaagcatgagcatggggacttgggaattcagagcaatatcacccacgtgcacccaaaaattctctttatccgatctgttggggggcccgtaggtgcctaatagcatccatgttatcccggggggatcagaagagatttcacccattattaagtatttggaagaagcttgaaccttacattgcactcctttcatccaacacacggcaagtccccccgagagcctgaatgggggaacgtaatgcaagttcataaaatggagtttggtacataccctggtgaatttgtcaagaggaagccaagtttcagacagtatcatcatgtcgggtttatggtgatgcaccaaatgcgccaattggcgaactgtcgcggagttcccgagaccgtgacagttctaagctaggattttcatggcgacattggagacttttctgggcaagtctccatagccccaaattgaaaatccacctcaaaattctccttcatctcttgtttgccttcaacaatttcagtaattgtacaacttgtgcttggttttttctgtttttcaatgatgacaaaatgattatctaagtttacctttagatcaaatgttctatcctcccagtggttaatcgttgtagagttgcctcccaacttagatttgatattcttccctcctttgaaggacttaggagtaacagccaggggagaatgattttttgggggtctgcctcttcttttt

SEQ ID NO: 28136 - DNA, 2679 bp, Cannabis sativa
gattctatcttaagcgaggtttaagacctcgaggagtccctcagggacatctcagttttctgagtatacgtgtcctctaagtaggggtctggcctcgagtttctaggtgagagaaatctcactataacagccacccctttttaccgaatggataccccacaaatatacattgacgagagcgagtgccaaatttgtccttgatacgaggttgatttttaacaaaacaaagacaaccaaagactcgaagggcatcatatttaggaggtgaactaaagagaatttcatgtggtgttttattattaagcaatggagtaggagttcgattgatgacataggcagccgtcatgacactctccccccaaaaggaaataggaaggctagcttgaaaaagcaatgcccgagccacattaagaatatgcctatgtttacgttctactcgtccattttgttgtggagtgtcgacacaagaagtgtgatgtaaaataccattatcagcataaaaccgatgaagacatgtaaattctttgccattgtcacttcgtagaattttaatacgtttttgaaatggagtttgaaccattttgcaaaaatcttaataagttgaggcacctcagattttgaagacatcaaataattccataccgcatgagaacagtcatcaacaatagttaaaaaataatgagcaccacaactagcaggcaaagtatatgcaccccatatatcacaatgaattaaatcaaaaacctcttttgctcgactttgactcaaaggaaacatgtttctagtttgtttggatcttaaacaaatatcacaaggttcatgaataataggaacatctttattgccattattaaaagtaatatgaggtaaaagaaaatctactttgcgagaagggtgtcccagcctttgatgccacaagttacgttcatcgcctgtagttgcttgataagcctgaagttgtcgtataggacgaaaccaataaacctcatcacattgttcacccgctccaatcagagtccttaaagtatggtcatgtatgatgcaaagcttatcagtaaaagtgatagtataagagagattggcaagcaagtgtgacactgataacaaattacaagtaagatctgggacatataatacattagtgagcaccatatttgggctcaaagttatcgtgccttctttagtagcaatggtgtgctttccattaggcagcctaacggaagtaggagaaacatcaatcaattggctaaataatttagcattaccagtcatgtgattcgagcatccggtatcgatgatccattgagcgaaagaatcaaacttaccactcaacttttcagttgaagaagactgccctcttgaagtattgagcatattcacaagtgtagtccactgtgcataggagagaccaggaagaccacgacgatcgtgctcatctacggatgttgaagcatcagatttcaaggtggttgcggcatgtgcgacttgcccacgaccacctctccccacttgctttcctccacctcgcccagatctgccgcaaccacgaccttgtccaccatgaacgcagttctcagaataccaccaatccaggaacccaatcagttgaaaataattttcttttgtgtgtccaggcttggtgcaatgagagcaaacaccattgggttgagaattatcacttcggcccctaacagccccttgcaccacaaagctaacaacatcagcaggagtatcgtgagtccgagatacagttttatgacgttcttcggtcacgactttagcaaaagtagtgtttaagttcggcaaaggctccatcatcaaaatatgcgaaactgcagggccataaagagcgaaatccaaaccagcaagaaagtcatggaccttttcattctccttctcttgagcaaatgcaggagcagcagcacaagtgcacttcggaacagtagaatatcccgcaagttcatcccatattttccgcaaatcattgtagtaagtcacaaccgagtgcccacgctatttgcaagcacccaaaagaatctttaactcatggattctagtaccgtttcctatcgagaaacattgtcgaagatcatcccacatgtccttcacaaggtcaggttggggaacgcaagagcgtaggcttggatccaaagtattatgaatccatccaacaagtgtggaatttaccatcacccataatgactcttccggagtgccggccgttggtttcgtcacagttccatcgaggaaactgagcttattctttgcacaaaaattattgcgcatcaaacgaacccattcattatagttatcaccatgtaacacaataggacaaattgtgagttgtggtccgtcggagggatgaaggtagtatggtgatgtgaaatcgagaggtttggtggtattgtcgtcactcttggtgagatgtagataatcagaatacggtggaaaagattgaaggtttcaatcgtaaaaaaaaaaaatgggacgttgagttgcttctgataccatgaagagttttgtagtatcttatttttgtcttattccatagggccaaaaagcctcatatatatacaatactaattaagccttacatatatatatctacagtactaattctatgaatcgtgtacagcaaggaaaatacataaatagctagctaaactaggaaacaaataa

SEQ ID NO: 28137 - DNA, 2241 bp, Cannabis sativa
  modified_base (906)..(906): a, c, t, g, unknown or other
atattacttgataaagagatgaatccaaaaatatctgattttggcatggctcggatatttggattgaatgtatcagaagaaaacacaaacagagttgttggaacttagtaagtatatattccaatattagaaagatatcctcttcttttcttttccctccttaatccttatcattgttttcttctatgtggaattacttcagtggttacatgtctccagagtatgcaattaaaggcattgtatcagtaaaaacagatgtattcagctttggaatcatactactagagattattagtggaaagaagaacaacagtcggtaccattcagaggaacccctcaatcttattggatatgtaagtaaagcttctccttgttaattaacactagtgatgtccaatactataaaaatgaaattattggtttcaggcgtggcagttgtggagtgaaggtagatgtgttgagttagtagattcaggactagtagaatataagttgagtgaagtattgaatggtattcatattgggttgttgtgtgtacaagagcgccctgaagataggccaacaatgccagatgttgtttcgatgttatctagtgataccactctactaccttcaccaaaacagccggcgtttttcataagtgatgttcttattgaagatgtcgaagttggtataaagaaagcacagaattgtagcttaaacgatgtaactatgtcagttatggaagcgaggtagatagtactgtaaaaaaagtacatctcaaattattgagtttctttgtaaatgttgagaatcatgggtttccatctggaaactaattggcaatgcgtgaagtaatccatgttgttatatggctcaatatggctcttatactatgttgagaatcatgagatttcatctcaaaancaattggcaatgagtagggtagccaatgttcttatataaggttcaattctctactatttattttatatgagacaatatccataatagtaaatacatatgtatactttgtagaatacatgatttactgagttaggggtgcccaaacaacttgtatctttataactttttatgtatttaggtataaaaataacacatttttactattttcaatgtcttttaatttcatttgtagagaagatttgtttttgacaatcgaccaatttcatatgtagaattgttgttgttaaacattggtgtcaacacattgtgtggttgatattccaatttagaaaaccaaacctgttcatataaggagtaacatgttacaagaaaattagacacccaccttagtttaaccatatgagatttgtactcttctagacttaattagtttactgtttaaagttgttggtgaaaacaggggactttctaaagcagttttttaataaaaagtcaaatagtaataataagagacatacgtggggttattaaattaaatatataggttagttattcaatttaatatgtatagaagttatagttattgcattatattaaattatattagactcaataattaattatactacttagaattatagttaaatagcaatacttcataaaaattattagattaaattatatgaagttacaccaacaactatattacaacttgaaaggcacctattaataaataaaaaattatatttttatatatttttacagaaaatacagtgtaaaatataaaaaatactctaatttatagtatcaaaatcgcattttataatggcagattaatgttaaatttagaaactttacaaatattttcaagatcataatttagactttaatgatctactatatacataaaaaaaaactgaattaactagtaaaaatgaaagtcaatctttttaaatttagacaactttttgtaaagagaattcattcttttttttttgataaatcaatgaattgtattgcactaacaaaattacaacctaagagcaccccattccaagggcctcaaaatatacatttttatctattcaacactttacatctttgtgatacacaatgaatgatatctataaagcaaaaaaccattctttatctacatttgatagtttctttgggcatagaaattggacacgagcctttacattccatttcacttcttcaacaattcggtttgtagccgaacttgcaccctgccaaataatagaatttctccatttccaaatgtaataaaccatggcagcagtagcaacacaatagacagcccttttaaactttgaa

SEQ ID NO: 28138 - DNA, 2155 bp, Cannabis sativa
gagaaccttaagtgagtgaggagtgttgatctctttgtcatcttttatttgatacttgatttgtctgtgaatactaactatttctctttcattataggtgaggggcttactcggtgtcctcccagggggtgttggtctgaagctcgagttaacgacttgctctctattcattccaatcatagagcccataacaagcttcttgtcttggataaatcttgtgcgaaaagttgtggagaggtgcacaacgtcaagaaggtagtattttttcactcaacgttgtcaagtgcacccccatccttttgttgacccgagctttagagaaggttagtggtcccttctctttgatttgtcatctaatagtagaagaacattttcttccaaaccgttactataagaggatgattttcaaggtttgtggagctgatgatgctgctgttaagggtaagagtaatttacttggaaagaggtctaagaagactacatgtcaagttgtaaaatctcgagttcctactaaggaacatgaagctagtggctctcagttgccaactaatggtatggttgtggtttctccactgaggggtgacaacgtgttgtctatagaggagaatatgatcaacttgtccatctatcccaatattttggcttactctgcctgcttccattgaaggccatgttgaggctcttctccatccaagagatgaagagtgtttgagagacatcggagttgcaaggcaaacaaattacggtatttctacaatgtaccaagtaagtttggaaagaatttgtatgtacacatacgtagttatttttgcatgttactcatgataattcaaatcgtcttttgtaggctattcaagctatcctctacttgaggtgtgacacagtttttcttgaccaaaagaatagggctttgaacaaggaaaattctagacttagcaaggaattagagaagttaaaactgaaaatagagactaccaaattatcatatgacaagctccaacaagattattcctcgttgagcactgagttgaagcatgtgcatgccaaactcaaggaggaggaggctaagtatgtcacattgtaccaggaggttgatgatattttacttaagactatcatcaagacaaggaggagttgatgatacagtatagggatagcctccatcgtggatgggatgtcgatggtgctattgcacttcatgaaaaatatttggctcttaagcaagagaatgagatggatgttgacgctcatatctctatgtctggtgtgggcgtcgatgctcatacctctatccctggtgtgggttttgatcctcatacttctgtttctggcgggagtggcattgcaatgtgatgttctctattgctaaagatggtatcattgctccatagtgggtcttttaagtttctctcttttatttataagtgacaattaatttaaactttaagtctcttttgtttaaagcatgaacatcaccattgtggcattaagtatgtatgcttaacaacccttttgatgtgcggacatcctcttagcaatttctcttttgaactttatgacgatttgatgtatgaacgttacctctatggtcgtatgacttattatcttaatttggtattaatattcttcattttgcattttgctaatgttttatgttattcgcttgatgtaaatttggcatcgatccatatacaatatcccttagtctaagtcttagtgagtgtcataaaacttagattttggagcagcttgactgagtatatcgagtttggctgaccataacattgttgaataaattttatatttagttacgattgaacataattctgaagacttaatttatgatttgaaaagtcaggctaaatacatctcttgctgtttgatccatggttgagcatggctcttatcattgagtttataaatgaataggtgggttgggcctagttcttatcacttagttcgtaagcaaatatttgagttgggcatagttcctatcacttactttataagttgttgagcatagctcctatcactcattttgtaagtgagtagttgagttaggcgtagctcttatcacttagtttgtaagtaaatatttgggttgagcgtagctcctatcacttactttataagtgaatagttgggttgagcgtag

SEQ ID NO: 28139 - DNA, 1749 bp, Cannabis sativa
aaaaaagttaaaatatgaaacaaacaacaattctcagattcctgcataataatattataataccaaattacaaaattatatttgatacttaattattaaacatagtactgactgtatatatataaggacatatatatatatatattattcttaaatacttaagaatttaaatcgaggtatatatatatatttaaatatattatcaaaaagctaactagcccatgaaatattgtttaattatatgtatatagaattaaaaagtaggcaaagcacatgatatgtacgaataaaaagtagatcaaaatggttagatttagtgaattaagtgatgatgatactaatatatgtaatcaaaatggttaatgagagcactagctacaactatttaaaaaaacagtcttgactgacctcatccgtactgcgtcatgtttatacattcctctttttgcaatttaaagtacacaccagtagatgaccatagatccatgtatatctactttaacatctctacaaaactaattaacaatacaataatattcttcaacacactaataaaaagaattaatctacgaactaaaataactttataactgaactggatgaaaataagctaaaattaaagagctttaaattacccaagaaacatattagttaatatatatcaatgtataaataattaatagtataagtttaattcttggaaacacacacatatatataagagtaacaacatcaatcgagattcttggaaatacaatacatatataagagtaacaatatcaatcaagaaaaaaaaacaaaaataatacacaggtaaaattatatatcttgcacaaactagtgttaccttaatcaagtaaatatatggctgtgtcttcatcgatcgaactcagatttgatgatcaaatctgaaatatataatcaatagccatatatttgctgatgcagcatcatcaagattcccataaatccatttaaaaggggtttaactttcgagtctccatatatttatatatgaatccctttataaaattttgtgaatcttgaagatgccgcatccgcaaatattgactgataatagtgatggccctcatcctgatcttgaagatgctgatgaacatgagatcttccccatgcacatatttatatatatttaaaatctctctctaattcaatatatgtaaatatatatatatatatggatgtatgggaataagctggtgtgcagagataaaaataaaattagaagagaaaaccctaattatgatagttgataaaaaagaaaacatcccacgaagcaaaaagtagaggagagtcagaaaaagaataggtaaagccagcaaaaacggctcaaatagttattctttatatatatgaacctaccccaccgatgtgtttataaaaaaaaaaaaaattataattataaataatacataaagatgtgatgatgttggaggatgggaaatggagttgataagtatatggagatggtagtatttatagagagatctccctcaacaaatatttgatgggtttaaaaataaataaataattaattaattaacaaaaatatatttgactccaaatttggtggctttttagtttttctcgtgtcctattatttgggcgtcagatatatattgaccaggtagtccaaaaagaaagaaagaaggtaattaacctgaaaggcatatatccactaaagcaagactagttctaaaaagttatgccccaatgcctctgcccttc

SEQ ID NO: 28140 - DNA, 3481 bp, Cannabis sativa
  modified_base (3429)..(3449): a, c, t, g, unknown or other
caatcttagtctttaaaaatagacatgggcatcaagttgatagttgctcacatagagcttttgtttccatcgaaccccctatagcatggaatattgaaactaccaagatctttaaacttgggtggtaatttcttttgtaggattgcactacactcctcagcaagtgccaccatctcatattcctccaacttccttttcttagctaaaatatcattcatgaacttcaagtcagttggcatttaatccaaggctttctcgaatggaatgttgatatgaagcttcttaattatttcaaagaatttcaaaaactgtttgtccagcttattcttgcagtgtatttgaggatagggaatgtttatatggtgctcaatgcttataagctgtgttgcttcttttgcttgcagacctttagtagtcttcttttcttcttatgttggtgttggtgcatgttgatccttgtctttatcatctgacttctattcaaccacttgttgctcagcccttggcctctcatattaatttcaatcctcaaggaaattgcttgacactgttcttttaggttaatctttgtagtactaggcaagttaccttgagtacggttggccatttgagcagttaactgctccacttgattctctatggttttaatggaattgctctagtctccatcatgaattggagtaatggatctgcttgaatgttagacactctactattattctgttgttaggcaggttgttaagtaggttgttcaggattcctttgaaaaaatggcctatttcttggttcaaagaacccttgctgaagttaagtttggccagatggttgcacatgaatgtaccgatggactccatcaacagaaggacagtcaccaattataggaattccaatggcttatgcttgctctattggtaggttattaacatcaacttgggaattatcataagggtgaggcccaccacatagtttacagatcactgggttggcttgacttgagttgtcatcatctttattaattctacttgggttgtaagctttgtggtgacatctacttcatacatactatataccttcttggattggcttttttcaaatggccactgttgattattcatggccatcttatctagcaaatcatatgcctcattcacactctttgtcatgaaagctccaccagatgcaacatcaataagggtacggatggtgctggttaatccattgtagaagttatgaacttgcatccaacccatgatgaagacactttttgattaggtccttgtatctctcctaggcttcatatagagactcattgtcatgttacatgaaattgttaatctctgatctcagtctggctaccttagcagaaggaaagaactttgagagaaatttcagggccaatttttcccaagtattaatagaatttagtggcaaagataccaaccaattcttggctcgatcccttaatgagaatgggaaccacctcaatctgatggcgtcatcactaactccattcattttaaatgtttgacacaactcctcaaagttaggaagatgcatgtttaggtcttctgtaggcagtcccccaaactagactgtggattgaaccatctgcagtatgaccgacttgatcacgaaattgttggcttcaacggcaggtggccttatacatgatatggctcctgtcaagttggatagaacataatctcttaagttacggtctggtggattaagaccattagcttggtcatctacggcacctccattattgttgttattggccatctctacttcttgctcaaccatttccacaactcttcccaatctcttccttcttctattttgtctacaagtcttctctatttcaggatcattaggcaatctggcggttggtccttaacgtcgaataaactagttgttcttgagaaaagagaaaattttataacaaacagaattagtacgaaaattgaaaacaaaaaccaaattagaacaaaatttaatttttttttactttttttttacaaatattaactaacaatccccagaaaacggtactaaaaacttgttgtgatattttcaacacgcaagtatacgtattattaacaagttatagactcacaaagagtgaggtcgatcccacaaaaattgtagttaagtactttaaaattaaacttttaatttatctatttggttattttgaatttaagagaaaattaaaactagaaaaataataaaaacagaaagcaagtaaattaatgtgtaaattaataatgattagaactaggttattgatttcaattgtatctatatattatggtctagcataattgaactcctattactaaattctatgcaatatcaggtttactcaaatgatttatagtcttctcggatctataaatctcaattatatgcaaattttttactttcgtgataaattaaacatgtaaaagacatcaaatacggaaaccctataagctatccaaaccacataggtctcgtactatatcaaatttattcctattcaactataacataattaacactcacttcttagatctcgcatcaaaatcataaatatttaattggtgatgaggtaattaaaagtaattaagtacgaatagaatataatacataaaaaattgagaaaaaattaaatcacattaaaaccataaattgatgtcaaacaatatccatcaataccctaataaactatttagctactcttgttcattgtaacaacttcacacatttcaattaagaataaatgaagaaaatagagaagaagagaatattgaaaactctgtcgaaaaagccttcgtggttgcttcagctctctaatttttgtactctcagaatgcttgctgaaaaatatgaaagtccaccttttatatagccaaaaaaagagataaaaagatttgaaaaatatcatcttttcaaattttaagggggcgggccgcgacactagattcttatgcctaggcataacaccactaaatgtgggtagcaagcttactgataaatttttggtaataactcttttaatattactcgaaattagacgatttaagatgttttggaaagataaaagagagatctagaacttttatgttttaactttctccaaaatctaattagaatatagtctaatttaagctgaaattttagctttattttcttttaaattttctctattatatagattattattttttgaaatttgactaatttatacattccaagtattgaaacctgaaattaaagaaaataataattctattctaaaaagtgataataaaaaagataattaaccctaaaaatgacataaataatatactaaaaatagattaacaagggataaatgttatccatattcctgaatgcccggtacatgacagtcacggaaggatgtcactgttggaaattattttnnnnnnnnnnnnnnnnnnnnnacaagtatgttgattaataccctaaatatgaa

SEQ ID NO: 28141 - DNA, 2443 bp, Cannabis sativa
atttgggcaggtgcgtggcattggcattctttcgtttgcgcttatcatctacctatgcttgccatttgcagatgtttaaattgttttgatgcttaactattttcaacatgcattgtataaagtttggatgttgtctttgaaaaaagaaaaaaatgaaaactgagcataagtagaaacaaatttcacaagatttaattgctgactcctctattcggtttaggtgtttgcaacactggcaaattctttttggctaatcatgtctagtcttcatgcggccaaaagattgcacgacaccatgttatgtgcaatattgagagctccactggttttcttccacactaatccaactggacggataatcaatagattttcgaaggatctaggtgatgtagatcgaaatgttgcaaatttaatgaatggatttctgggtcaggtgtggcagcttctttcaacttttgtgctgatagggattgtgagcacaatttccctctgggccatcatgccacttatgatcttgttctatatggcctatttgcactatcaggtatgctttattgtttgctgtgatttttccaaatttatacatgagtggcttcctctcaagtttattaaaaaatcctcacttatggttcagtaatagaaatgaagtttttctttcttaaccatactgttggactgtattactcaaaatggatcatttgtttttattatcatatgcacacagagcacagctcgtgaagtgaaacgcttggattccgttacaagatctcctgtttatgcacaatttggagaagcactaaatggattgtctactatacgctcatacaaggcgtatgatcggatggcctacataaatgggaagtcaatggacaataatatcagattcactcttgcaaacttcagttcaaatcgttggctttctataagattggaaacattaggaggtatcatgatctggttgacagcaagctttgctgttctgcagaatgggagagccgataatcaagaagtatatgcatcaacaatgggtctacttctcagttacactctaaatatcacaagtcttcttagtgctgtactaagacaaggaagtagagccgaaaatagtttgaatgctgtggagcgtgttggcacatatattgatttgccttctgaggctccagaaataattgaaagcaaccgacccccaccagggtggccctcatctggatctattaagtttgagagtgttgttttgcgttataggcctggacttcctccagttttacatggattatctttcacaatttctccaacggaaaagcttggaatagttggaagaactggtgcaggaaaatctagcatgcttaatgtattatttcggatagttgaaatggaaaagggaagaatcatgattgatggttgtgatatttctaagcttggactgacagatttgcgaaaaattctcagtatcataccacagtctcccatccttttctcaggtatgcaatgtaaaaacagattaccaccaacttgatccataacttgagttgtctaattcaattctgtgctgttattctaaatgtgttgctgtgtttgtatgcctggtatgtagaattggttgaaagcgtgaccttctaatggtaaattcatatttccaggaacggtgagatttaatctagatccattttgtgagcataatgatgctgatctttgggaggcattagagaaagcacatcttaaggatgttattagaagaaaccctttcggtctggatgcagaggtatacccctacaacatactctaatttataatcatgatgacgatgatgttgctttgatatcctgtgttttacaaaataattttactttctttttttccacattcaagataactgtagtgatatgttgttttgttcatctaataaagctatttccacatggtatcttgaaattttaatgaatgaaacaacttgtggttgatcacattgtgtgtcattagtttatgaagtatttttgtgcttaataccttattgtttaagacaagaaagatggaagttgttaaatggaatggaagataacttgtattcttcaactcgtgtctaggttcttgaaggaggggagaatttcagtgtagggcaaaggcaattaatgagcctagccagggcagtgctacgaagatcgaagatacttgttcttgatgaagcaacatcagctgttgatgttggcactgatgctcttatccagaaaactattcgcgaaggatttaaatcctgcactatgttgattattgctcacagattaaataccataattgatagtgatcggattcttgttcttgatgctggtcaggtacatacaaacctttgtgttttctcaaactcatcattcttgttcctacttgcaagaaactatgtttgattgtacttcattttctaaatgttaccttccagattctcgagtat

SEQ ID NO: 28142 - DNA, 2870 bp, Cannabis sativa
aaaatccctggatttaattccggcagacatccagagggggcctccttccagcggttagaggccccccattccctccttttatgttagggtttggtttgggcgctaactgctggatttttctttttcagaatcttactcatctcgagacatgtctatccccatgaacggagcggaatcctcagacaaaggttctaacaccatggccaccctggaggaagtgatgaaaggacctgtagtccaggagaaatacaattgtcgatccaccggctgggaggctgatgagttgcattcaactctaacctgcacccaccaactggagaagatcatcactgtgggtgggatcaagccttctgcttctggagtctttcaccgtcttcccagagatgaggagatgccttaccataattacggtggcttcggagcttggagccagactcacctcatgtctggggcaatgctaccgcttcaagattatttattcaatttcttagtttttgttggccttgcgccttaccacttatcccccaagcatatcacctgctctcaggcttgtgttattttttatgttgccagaggctgggctccgcccggcccagctgaagttctttattttatgaacttgtatctgtccccaagaagggagacaaactaaaagatggttttttcacactccgggcccatcctgctaatgagggtccagtccctttcaacttccagaaaaatgttaaggaataccgtcaccagtttttctcctcctctggcttccaagctattgagcgtccggagctgcttactgagtgggtcagggttccgccgatgcaccgcaccgcccccactcaactttttcttcaacacgctaaggtcttctccacatacgacaaagatgggttgaatgttgtggacttggtcacgactgcacactgcaggagggccaagttgattatagagagccagtcagtggatgatttcaatttatccaaggttcttttccccagcgtttgcaatcctgactccgagaaggtgctttgggcagacattattgcttctgcggaggaccggtataagaagtacctcttcaggagggaacaagaattggcctacatcaaggcccaagccgcctcaaggagggtccttcggaatgaggctagaaaagagcaggtgacttcccggcccaagcttccgttcctagtccccaacactggggctcctaatgccggtacctccggagctggtaagtccccgctaattgttcatcgtgtcccttccattcaggattactctggctgtgggccagtagagtttgatgaacgacttcatagttttaggatgccccctttccgatggggtgaccatgccaagggtttctatttttccaaccttggtcactttttaggccggtccttgatgggatccgaccctcccacacctattttcctggatcattttgcctatttatcttccagttcgttcctcccctctgacagctttttagaggacgacgacaccagccttttaatacatgcttttgctagggcagaattagatcgtctaggtaggattagttttattgttttgttcttgcatgcataacttctcaataatgttctaacgcctttatttgtccatgtcttcaagtagcgaagccaatggatgagctcctagacgctcttgcccagacctatagtcccgaaccagtcccgcctcaggcacaaaacccggtggtgactcccgggaggtcttcttccagcattcccctggtccaagtcattttaattgacggggcagagggagtagaggaagaagaaggcgagattcttcctctcttggaccgaaagcgcaaaggaaaaatggtggagactaaggttgctaagaagcccaggagagtagacactccgactcccagctctaactcggggatcccgtcggaggtggacgagtatactgttcctctgggcatcgtcctgacccccattcccactgacgaggaaagaacccaactccggatcgccaagcacaattatgccacgacggagtacacaaaggggaatgctgaggtggaggccctgaaaatgattttgagggaggcccaggataattttactcgcagcgagtacgcaaggaatgtctgcgatttaaatctggatcccttaactgactgatttaattgcttcagacctaccctggctccctttgcctcagaattgatgagccactttgctgctggcctagtttagctcctcatgaagagatacagcgcctgtgcttctaccaatctagtctaccaaatctaggacgtgagcgcgaccatgactgcggtaagttcccatctgtcaagcttctttcgatgcctgatatcacacactcatatatatctttttttttgttgtcaaattgttgcagagaccgatcatctctcgaagactttgattgaccatgggtacaccatatccgaatttgggggcatgtaggaggccatgaagagtctccgagagtcggaggcacagaagagagcgatccgagaagaagcccagcagaaggaggcccttatggagcggagccatcaagaggcgctgaaggctaaggacgaggcacttaaggccaaggatgcggctgtggccacagtgaggcgggaactctgggattctaaggaggcagtgcaggaattgaccgccaagttgaagtctctagaggagctgcatcaagcagacttgcaaacgacagccaacctaactgttgaagtgaaggggcttcgtgaatataaggagcagactcagaaggaggcggccaaggcgaagagagatgctctcctggctcttgtcacttgccagtactgtaagaagctctttaatgatggagtcttcatggcctgg

SEQ ID NO: 28143 - DNA, 3841 bp, Cannabis sativa
ctgtgcatgggtgtggaagatggaggcattgttcttgatatttggtgtctacagtataaaagaaaaaaaaaattctaaggcagtataaaagtaatttttgtcgtgtggcaataaaattgttaatatttgcccaaaatccaaaatttttgtaaatttctcacttcttttctttcaaaggacctcttgaaaattttctcgatggcaacgtggaaaggttagaacagagtaatgatatatcatttaagttaataacaggtcatataataacacactttatgtttgaaccacattgaacaatgtttgatggagagcaacaatggaccattaatctttgtaaaaaaaaaacaaagaaagcagtatacacatcgtttagttttgttgtagtacgtttttgcctctgatacttcataagagtcagactaagagcatcaccaagaactaactcaacaaccacactactcgcccccacccacttctgtgacgcaaataatctgaactttcttattatgtcttctcctttttcaacggtgataccataaggaccctgctgatcaacaccttgtaaacctaatcattgcagtggcaccatagatggtagtggtgcgaatgattattttattttaaaatgaaaagaatttaataatttttttattaatttttattatgcatttcaaattttattctattccaatgctattactctcattctcattcttttcattcctcccaataaaacacaacttaaaaaaaatataaatttatgtgataagcttgattattttgaggtttcctgtcaaaccgctcatgaatcaagtaatagagtcataacaatagttggagtcaacaagcacgattgaaatgatatcttataggcttatattatataatatgaacataaatgtgcacaactctattatttattatcaaatcggcatgccaaaccaacttggagggcagaaaataagaatagacaacaatgatgaactaattcttgtgttgaagtcttccgctctctgcaccagcgaatggatcgattataacatttataacagctggtttacgagcagagaatgagtccgaaagagcagattttagttcttccggagtcgcaacaagataacccttccctccaaaggcttcaattagagtgtggtatcctgcactaggtacaaaggatgtgggtgctggatcatctttgtaagggccactaatttcttcagggttccttctatcaccgccataaactccaccattgttaaagacaatgacaacaacaggcagctgatatcgaaccaatgtctgcaaaatttgagaaaatgaatatgagcatacagtaatgaaatatctcaaaggcagttctagattcaggtttaggcttagaatgagccatataaactaacaattatggtaacaaaaatcaaacttaacaagctgcaaaccttaggcaaaagaaaaggacaacaaaaaaagcagcactgttcattttataataaactgagataataccaaaggctgcagtcattcgaacttattaaaattgaaacacttctcattttcagagaaatacacaagcagcttagaaaaattcatcatagccactgagatcacgttcaggtttattaaaatcaaaaaaatagaaaatcctatatcttctgactggcttcttaaccacgttcttttcattatcctacctactaagcttttcaaaggtagttcaactagagtaaggcaggaggaattcaaccatagatagtgataacgcctatcgaaggtcacaaggtaatcagagacaccaataatgttatgatttgtatgaaccccagtctatgaagtatgaacaaccaaatccatgctaggtaggtatctaaaaaataaataaaataaaaaatccaagctaggtgggcattttatccaataaggaaactatgattttaagttgtacaagtttttgcttagaaagaaaaatttcatgtttcataagcaaaacacatatcaaataattctatcatcttatcttatctaatatacatacatacatacatgttttatgcttactagaatatgaaggccatggaaatcataagacagaaggcatgttttattgctagaggcacacgagtttctacgttaagttagcatattaagaaaagaaacatacctcaacttccatggcactgaacccaaacccagaatccccttctaccgcaacaacaagcctatcaggcgaggccacagcagctgcaatacagtaacccagaccaactcccattgtgccccatgtcccagcgtccaacctggtcctgggctccgtctgaaccaaaacagctcgtcctatatccatagtgttggccccctccgagaccaaaacaggagcagggctacccaatcccaagattgcatctctaataattctcattggagtcatgaaattaaatggcacaatgtccttagccaattgaacctccatctttaacacattatctttagtcttcttagctatggcttccacccatggatgattcctcccataacaaaatgggtcatctttgatctctttattgatcatttctaacacccttttggcatctccgaccaatcccagatagggtttcctcaactcaatctcttcctcagagatatcaaccaaaataaacttgacgtctttagaccacttaggaggttctccaaagtgcaacaaccaattgagcctagcaccaacaacaagggcaacatcacacttacctatagcaagagacctcgcagcggtggctgccagttcgtgagtatcaggcaacaaacctttacccattggagtaggaagaaatgggattccagtgctctcaacgagcttcttcaatggttcttccgcacgagcaaaagctgctcctttcccacaaacaatcaaaggtctctcagcgtgtctaagcaaagaaacggctttctcgatctccgaatttggcaaactcactaacaactttcgcttggcgaaactgtcggccacagaagctaagaggtcgtcagcttctgattccggaatactctggtgcagcacatcagaagggagatccaaataacatccgccgggtcgacccgaaccggcgcaatcgagaactcgaaacacagcctccgggatttcccttatgtctttggctttcacggatagcttcgaaaagggtttcacggcttcaatttgatcaagctcttggaagtcaccgcggccaaaatctttctgatcgcacgagccagagatcatgatcatcggccaggcgttagccatggcgttggacattccggcgaggccatgaacgcagcctgggccagagacggtgagaagaacaccgggccggccactgagatagccgtaagcggaggccgcgtacccagcagactgctcattgtgaaatgcgataaatcgaacgccatgcgctacggcccggttagccagcgaggttacggggatgcccaccacaccgaacatgcggtcgatgccgaatcgagcaagggatttcgcgacgagaacattagtgtcgataagggtttggggagtttgcgaatcgggatgggaatgagccatgggagggagcagagaggaatcaaggatgagagtgttgtgttctaatctaagtaattgtacaaatcaaatgtgtagcagaagaaaggagttttataggcgtataaaaaagcagggatttagggagtggagtggagtggtgtttgtctggggaaggtaacggccgattggagaggagtaaacaactttgctttgtcgactttctttaattgcaattgcaaatgcaaagctcgtctcttccaaactcactatgtatccaattgttttcta

SEQ ID NO: 28144 - DNA, 3375 bp, Cannabis sativa
  modified_base (1738)..(1741): a, c, t, g, unknown or other
aatgcaaaaaaaaaaaaaaactattttgaagtataaaaatagaaaagcccgaaaattataacctaaaaacaatacaaacttttaaaactagtgtcaacatttaaataaactaaatatttcattaaaagagatagaataaaactaatttcattaaaaacataatgaaaaaaatacaatctacaaaaatataatgtaaaaacaatatcaattttaaaaactaatttcattaacattaaaagaaattaattattttattaaaaacaacagaaaaagaccagtttcatcaccatcatacggaaaaaaaaaaacacaatacataaaattataatctactttaaaaactagttttatcaacattaaaagaaactaataattttattaaaagaagcagaaaaaatagtttcatcaacaagataatgaaaaaaaaaaattataatctaaaaacaatattaactttaaaaactagtttcattaacattaaaagaaactatttatttcattaaaggaagcaaaaaaaactagtttcatcatcaacataatgaaaaataaacaatgcctaataaccaaactttaaaaacgatattaactttaaaaattagttttgaaaatataaattttatataaatacctaataaccaaacttctaacttcgtttattatgatatttaatttttttatttgcttactcaagaactaaagttgatttaaccatacattatggagtaaatataacaaagagaataaaaaactaaaatcagagagaaaaaaaatagagaaaattagagagacaaaaatacaataaaaacagaaaagaataacaaaaaacgaaactgagggagataaatcatatgtaaaaaataaaaaagaatggaagtgaataaaagcgaataatcaaatattaccccaagcaaacataaaattcacaaatctactgacccttaaataaagaatctgaaataaaaaccattagcacaatacgaactaaaaacacaatctaaaagtaaatatataaataaatgagaacaaataatgagacattcacctcaaatgcaattgataaccataattaaccaacacgcccaaaatgagaagagacgtcactgatgactgctgaccaaagctttgattaacgtcaatgaatagagaagaaaaagaaggtagccacgaataagcaatcggcgagcacagtaaaaaagaagaaggaaaaaaataagaacaacaaaaagaaagataatctgaaaatattagggtagatggaaaagatagagaaatagaaaatgagaacttacaaaattaaaatattgtaaaatgggcgaaaatttacaaaaatattgtgacacaaagttttttagatttttattataccaactgttatcctattttttgcactgtgacgtggcagcacatgctggtgacacgttgacttgattccctatatccgctcgagatggatgctccgagcagggcaccgatacacttgcacggacgatgtcttcccagccgagcagtggataatttgagcagggcaccaacagttagcaattcaaaaatttacatcgtgaagcacaagagcaatccctataaatctgggatcgtatcatagagatatgacaagctgtccaaatcccacaatctgtgtattctaaatatgtaatatatgttcttacaaattatagatattgtaagtaaaagggaaaccttccctcaagcatgtagccctataaatagtgatccattnnnnctggtaaaggggtcgaaagaattactttaatgaaatttaagagagcatactcagagatttcattgtgagagcttcaagagaggaaacactgtgttctttgtccttgagttaattcaaatcaaggggagtaggctattactgaactgaacgggaccaaacctctttaaaaaccatctgttctttatttattttcttatattatacgtaaatcatattctttatcgcttattattagactcattgtcgttggctaaaagcaaggtcaatattttggtgctttcattgagagcaataatatcaacttgatcttcacttaaagtttgatcataaacacgatggtggtacaaactcgcagaggcttggtcgatcaggtggacccactggcggtagatcccgcactacaaactcctaggaatgcaagggtcccaccagccacttatcctgaacaaccgatcacgcaaccacctaccacgagtcaagctgtgacgtctcctttggctggaatcacacccagtgtgcaagagactgtaaacaccagttcaacagctgatctgagtactcctagcattgggatcccttaagcaacaaatgtccagacaaccattggagatgacactgagatccagaacttccgtaacgctcttgggctcatgtaaggtcatactactactttgcatcatgatcaggaagagctccatgctgcaatgaaccttgcgttcgaagagcaaaggcgccagttcaccgaatggatggatagagagatggaaatgttgaagactcagcaagcagccatcaacgaccaaagaagacaggctaccgtactgatacgaaggcctaccaagttgctaatcagcaacctgcgtccaacatcctactaggcagcttagacaaaaatccagttgggcatactgcccaatctttgaacggtcagctgtccaatctccggtcacaggttccacctgtgggccaagtggtaggcggccagaccttatctggtaattcctctgtaggggttatacccaataactcggccaaacttatcagtaactgaggcaacctggtgcttcaatattcaatagactaggaacggttcatgatcttagagatgatctaaatagaaggagagggttagacgaacaatatgttcaaccaaccactcagcctggggttcgcattgaagatccaactcaaagagatcctgacgtgacactggtcggccaagaggccgagcaagttcatccatccgtgcaagcatagttggatgaattgaaaatatgatccaaggccttgctgatcaaaagctcagtgatctcgagttggaccgagcacgtggatccccgtttactccagagatcaatgttctagaactaccccacaagttcaagatgccgacctggaagatgtatacagggaaagaagatcccttatcacatctcaagtatttttaaatgcaaatggacttgcaaggggtacgaggagatgtgcgttgcagagtttttcctgtcaaactctcagaagccgctcaacaatggtagttgaagttgaaactaggaaggttcaattcttggaaggctttctccttagaatttcatgcacaattctcttcttcacaccaactcccgttacatttagaa

SEQ ID NO: 28145 - DNA, 2541 bp, Cannabis sativa
gcctaatcactacaatacaatacaattctctctttctctctctctatcttttcaaagtctgcttttttttttggtgggtttatcagtttttttttcttgctaaaactgataaaccgtactaaccagcattgtcaccaactcagtggaaatttagaggaaaagggttgatgggattttgctcataagttgaaaaaaaatcaaagcttttacctacatttgggttttaatatggagaaaaatgctgttgtatctactctgtttgtagtgttgctctgttttccggtggctttttccggccatgactatggtcaagcactgagcaagagcattctcttctttgaagctcagagatctggttaccttcctcgtaaccaaagagtcaattggagatctaattctggtttacacgatggaaaagccagtggggtaagtaaccaaaaatgaaaaatctaatctttggaaaattacagagtaaaaaagtttggaactttatatatgaaatggaatatttttcaggtggatctggttggtgggtattacgacgccggtgacaatgtgaagtttggattaccaatggcgtttacagtgacaatgatgtcgtggagtataatcgagtacggtaaacaaatgggtgagaatggtgagcttggtcatgccatggatgctgttaagtggggtactgattacttcattaaagctcatcctcaaccttatgttctctatggagaggtattatagtaatttccattttcaatttggaattttgataattatattaatgaagcgaataatttaatattatagtcattatctttgtaaagtgaattaatgggtattttttggtgtgtgtgattaggtgggagatggtaatagtgaccattattgttggcaaagaccagaagatatgaccactgatagaagagcttacaaaattgacccgagtaatcccgggtcggatctcgccggagaaaccgccgccgcaatggccgccgcgtccatagtcttccgccgatctaatccagcttactctagcgagctactccgtcacgctcaccaggtcatttacttttttacccttattatttatttattaaaaaggaaggtgcttttagtgtttggtgtgggaccactttataggtttcagttatggtatagtaccgtaactggcgcatattagctaggtaaactgagtacgctatcttccaccgaagtgagtaaacactgacagtgtcgtgtgctgtcaatgagtttagtcgttatggaaactttctttaatgcgcatatagcgtacgttagcttaatacttgtagttattaaggcagttgtgtgggccctacttttattaatgttgtcagatgggccgttgtcattgtaactgttatatcggcccatatttattcttttaccatacttaacacacagtaattgtgtgaaccttaaattaataattttatttcatacaatttttttttatatatatatttttagttacatgttttacgataaaataaccacaaaatataatttttttttttcgataattatgataaaatctctttaattttatatattgaaattttcttaataaaacgacgtcgtcttacttgggaccgttttgtgccgtgaatcacggccaagttgtgttagttgaccgtactaatacatgtgttaagtgtcacgtgagatccttgtcggtggttttgtaacggccattaaacaaaaaccaaagccaagccacaccacctcacgtttcatatccatccttttctgtatttttctttttcccaaaatacccttttggttttacttgaattaatcctaaaccaaaaaaaactaacattgtcgtttattgttttcctttcagttatttgattttgccgacaagtacaggggtaaatacgacagcagcataaccgtggcccaaaagtattaccggtccataagcggttactatgtaagtaacatttcaacccatttaactgagttgggctctttatttgggccttctctaattgggccttgtgtttgtataggatgagttgttgtgggccgctgcatggatgtaccaggcaactaacaaccaatactacttgggttaccttgctaagaatgctgaagccatgggaggaactggttggagcatgactgagtttggttgggatgttaagtatgctggggttcagacccttgtttccaaggtaatggttttttcaaaagtttataaaaataccattttttaccaaaacaaaaatggtacaggttactagttactctatagaagtaactgttgtaactaaaatgttactgttttgtacagttcttaatgcaaggaaaggctggtaggtatgcaccagtgttcgagaagtaccaggaaaaagcagagtactttatgtgtggttgtatcggaaagggtagccggaatgttcagaagactcccgccggtctaatcttcaggcagagatggaataacttacagtttgtgacaagtgcttctttcctctccactgtctattctgactacctcacttcttccggtaaata

SEQ ID NO: 28146 - DNA, 1683 bp, Cannabis sativa
aaagtcagaccggtcagactacacctgaaaatcctggtggtggaatctcgcaaggaagctccatggcagctgcaccagttactttgtctactccctttagcaatactctcagccagccattcactatcaaactcgacaaaaataattttcccttgtggaaaacaatgatctacaccattatacgaggtcaccgattggaagggtacctcaacggtcaaaaaccgtgtccttctgagttcataactgcagaaagaatcgatgaacatggagaaaccatcactgaatctcaaccaaatccagctctcgaaggttggattgttcatgaccaactcttaatgggttggttatatgggtctatgtctgaagctattgcttccgaagtaatggggtgcaaatctgcttttgccctttggactgctctggaggaactatatggtgctcactcgagagcgaatatggacgatctacggacgaaacttcaaacaactcgaaagggggctcaacctatgacagattatctgaaaatgaagaggatgtgggctgattctctagccttggctggagacccttacccagaaagacatctagttgctaatgtgttatcgggtctagatatggagtatttgtctattgtgcttttgcttgaacacaggtctgatttgtcttggcaggaactacagggatctctactcagttttgacagtaagcttgagaggcttggagctgtttcacccacaagcaagtccctgactaacccatctaccaacatggctcagagaccgtctaactccaacagcagaaacaactactctggtagaggaaacgggtacaacaacaacaacaacaacaatcaaggacgtggcaactcctatcatggaaattcctcaagaggaggaaacagtcagaatcggggaagaggtcgatacagtagcaacaactctcgaccaacttgtcagctttgtgggaaatttggtcattcggcagcagtgtgttactacaggtacaatgataactacatgggacaaccacctcagaatgacaactctcaaagtcaagacaaaaacaatcacatgacagcccttgttgctactcctcaaactctcaccgatgatgcttggtatgctgacagcggagctaccaatcacctcacttccgaacctgacaaagtgaacaacaaagcagaatataatggtaaggaacacatgatgataggggatggaagcaaacttgaaataaaacatgttggtacgggtattataaatactgattctgaaccccttttgctgaatgatttactacatgttcctaccattacaaagaatttagttagtgtttcaaagctgacccgtgataatgatgtttctattgagtttttccctgatttttgttgtgtgaaggatctaaccacagggaaggaggtgctgcaaggaacacttagagatggtctctaccaagttggttctgcatcagctagttctcaaggtgtcaaacagtcccaaaagttgttttctggtgtgtctttacagtcatgtagtcagtctagtgtgtcaagttttacttccctaaaagatacctggcatagatgcctaggtcatccgtcgtccaatgttttaaatcaagtgttacgaatgtctaatgtacctgttgttatcaatgaaaatcacagtttttgtgatgcttgcc

SEQ ID NO: 28147 - DNA, 2317 bp, Cannabis sativa
aaaaaaaattaggagtatattatccctcttctatatgaaatattcttagtagtggacccttcatgctaaaatgattggactatagactccttacttattaattgccatccaaatgattttccagcctaatctttttaatattcatatacgttgtaatgatttaggaccactcgtaaatttgtgataaaactcaatgatttataatgccaaaaaatggccatgttaggatttataataaactgaaggaacataaaatatctcaaaacctaatcatgttactaaaaatgctttaatataaaaactgtaaatcatgaaatccttgttaaatgaatagaaaatgatgaatacgagagtgaaagcactaacctcaaaccatgaatagagattgcaccgaaggttttgatcttcaaataatacaatatttttatgtacttttctttgacgaggaaagatagaatacaagagtcttattgtttcttggggaccactacttacgtatatagaaagattatagaattagttttggatatttgtaatttaattcttaatgaaattttaaattaacttatagaatcttctacacattatttccatgataatttaataacctttattacttataccataattgatcacttaattttgtatcaatctttattaagcattatacattatacatatttggcaacaaatataatttttctcttacaatctcccaacactgttacaacatcttaatatttacatacttgacattacattagactcatagttgaagcataggtacatttttgcatatcttgaatttcaaaaaacttttagtgtgttaattaagattgaatttctctccttttaacagcatgagtagcacctggtctacaatcttgcttgccaaacttttttagtactttagtgatattgctcttttgtaataatccaagaatacctcgagaatggtctcgatgtatctgaatttccaaaacaaaagaggcatccctaaaatctttcatctcaaaatacttatatagaaatctcttaatttcgtgtgataaacatatatcattagtgaatagtaatatgtcatcgacatatacaacaaggaatatatactcactcccactaaattagtgatatacacaatatttatctcaaaaccaaaagagataactacttgatgaaacttgtgataccattcatgtgaagcttagattttttcattttacaaaccatattctttggttcacgtaacaaaaagtagttttttttgtttcaccatataattttttctcatcagtatcaccatagagatatattacatccatctaatgtaactcaagattaagatgagcagaaagttccattatcatctaaaaagagtctttcgatgaaagtgaagaaaaaacctctataatcaatgctttcttttatagtatatcctttagctacaagatctgccttacacctctccacattaacatttgtatccctctttgatttaaatatccctttacaaccaattaattttacaatttcgagtaattggacaaatttctaaactttattgtcttgcatatagtatatactcttcaacaaataaactttttagagttagaactttttgcagcctaaagaaagtcgattgaataatattccattgtcacattatttttttttttgaagaaatataatacaatcatctaaaattacttcttacttctcttgtggattatcttaatggctcttgttcttaaacatgttgagtttgttcttctagaacaattacctcatgttcaaatggggggtttgtttaacatatattgtgttgttgaggtttcatatttatttccttatataaatgatatgtggagaagcttgaaaaatttcaaaatgatagttgcaatcgcgttttaattcaattactcaaaataaatgtgtctaatcttatttatcccgaaactccacatcttcaaataatgttgcagttcccgtctcaaaaatatttcaaattgtggcttatacccctaagatcattaagaataggcaataaagtagttgctcactatttttgagtcaaatttcttttcatgtggcttatatgctctttcttgaagtggacatccctaaatgtcaaaactgttttaggctaggattttgacctgtcaaaagcacataaggtgttttgtaactgtcttagttggtatcctattaagaatgttagttgttgtctttaacacatctccccaaagagtaacatatcctaaagagtcccattttgtcattaatgtaaaacactcaagcaactaataatatctcaaca

SEQ ID NO: 28148 - DNA, 1574 bp, Cannabis sativa
aaaaaaaaaaaaattaaaatttgtcttgatttaatttgtgttgcatgaatcagttgattgctatgcatagcactagtccgattttgatttttcgttcatacttttttttttctttgtctattttatgttagaaaaataaagcgtgttctttgtaggctactaagacttcaacctttttgaccatcactctcgttattgcctcaaatattggttttattatgcccattaagaccacctaaaatacaaagaccaaagaatctcgtaacgtaacactactaaagtcattttctctatcttctataataattataaagtattttttaccataaaaactcctgtattttacttacttgacagtttagtccctctaatattttttttgacaattaaaatcgagaaatataaaaggaaacttaaaagtaccatataaaggaacatataccttattgcaataatgaaatttacacaataaacttaaaaatagaatatttttttacagttttacaaattttttatttatttatatttttacgaatttttatttcatcattattttcttattatcataatattatatttttacaatatgaaaacgacgtataaacaaaaaaaatatctataaaaacaattttttttattatttttacgtatttatgaaataatcccattttaatataaaaattttaaaagataatcccgaacttaacattttgttaaaataagtaacttcaaaaaataaaacaaataaacctattgaatttgaaacttaataataataaggattctattgtcataatttttttccaaggattgaattgccaattaacaaaaaagtgagggatcatatatgtcaaaaaccttaataataataaataataataaagagtatacaggcgccgcaaactcttaccaccagtcaccccaaaaaaacggccttcttcttcttccttccatagatatatacttatctcaaaaataattatcataattattccaaccaatcaattgcttcaattttcaaaactccattacaacaataacaatatatatacgttactactacccattctgatcaacagtagattttcttttccataattcagaaacatcattctcttattttaatggaagatattgaagttcctcactatttcacatgcccaatctcgcttcaaatcatgaaagatccagtaacagtcgtaactggaataacatacgatcgagatagcatcgaacattggctattcaaactacacaaccaaacttgccccgtaaccaaacagcccttacccctaaactctgacctcactcctaaccacaatctccgccgtttgatccagtcatggtgcacccaaaattcagcacgtggcattaaccgaataccaacaccaaaaccaccgttgaccaaagatcaaatccttaaactcctaaaagatctcaccctcctccgtcaaccccagataaagatcatcaaacagcttcaaaatctcgccgccgagaacggaagaaactcccaactcatggcggaaactggcgttttcgaacacatgttgtgttttatagttacttgtgtt

SEQ ID NO: 28149 - DNA, 1802 bp, Cannabis sativa
ataacagaatctgtactaacaaaattagataaaaattacagttttacaaacattgggtacttatgctgctaaaaataaaaattgagtttacgccgcttacaaacataaaactttgagtacatataacgctatttactcataaataaataatgattgaaattttataaacatattaggtagcacccgtgagaagttggttctaataaattccattatacattaataaattgaaaatagataaaatatttacatttcaatatcgatctattccaaatccaaagattccaaaaaaacaatcgaaataataaactaaattaaaaggatcactatatattttatttttacacaactcttttcgttgaaagaacagaaattattcaaaatatttaaatacgaaacatatatgtatgtgtgtgtaattaaatatgcaccagatgggagaatataaatatacttaaaaaaataaaggtaaatgaaaaagctgaagcaaagcaataagaatagagtgatgtggtttgatttggtttggtgagtagtgagtagtgaggtaaaaagaaaaggtgggtccgaaggaagaggatgggaagagggttttgacaaagtgtagtttgagctgccgacaacaaatctgaggcgtagatttcaccacacacggtactgtatcatactctgatcatgatctctctctattctctattctctctattctccattctctttcactttatctgctatatatctaatacttgcttatatgtattcatcatttcatttgtctgaacctgaataatgcaacgtcgtacgtgtactgattaatatacctgactatactaaatgccatgtgcccttatcttattgacgacttgttataattacaacaaacattatcattaaagaaaataataataataataatcatatagctcattaattttacttacaaggtcctaagtcctaacccttgcccacatatctcaagcgatttgaagacattaagccaggattttctattgagagcaagcaacccgtaaggtccactcgacctgtatggataccccggcgtggctctaccacaatagattccgaacttatatcaaatcaaaagtaagcagagtactctaaagtttcagatatcaaacccaggcagaaactctaggctttgaaaaacaattgcataccgctctacagtttgtgtgcttagtattgtcatcgttttatgaatgagattatttcagaaataatcaaaaatttatgtttttacagaattgtatttttagggactattttttacatgccgttgttagtgtaacattgtcgcaacatgaaataaggtaattttccctctaaaaatcacctgtaaaaatataatttaaaaaaatctgtaaaaaagtacaattttagatactttgtctaaattttttgttgcattaaagaagagagagaaaggtactacagaagagcccaaattcggccattttgttgaggccggcagttcatgtggcccacacgcaatgtttactttttgggctgcaaataagtttaaaagcccagcccaagaaataactttgcatatcggctctctaggagccaaattacctgtccccagttcttgtcccactccagtcccaaccagtaatattttgccacctcaactaaaattacacctacacgtttaactgatctctctaaaaactaactgagtttccttgtttttaatttaataatttttttgtaataaaaaaaatctcacgactttatctctctttctctgctatcaatacatttcttttcttttttttttt

SEQ ID NO: 28150 - DNA, 987 bp, Cannabis sativa
atgaaattttcttggcatattctctgttttcgtcaataattaagatttgggttctttcagggaacaaacaaagtcatctgggagttggaattgggacctagcaccaaagttgacattttgttaacctaggccattttcaagtaggtttttcgagaagtcttctggacatattatctgttttgacaaataattgagatatgagtatttttgagaatcaatcggaaccatttagtaaaaaaaagctgggtaactatatactttttttcctaaaaaagcaataaataatataaaaaaatgggtaactatctattttttttttttgaaatcaaatgtgtaactatctattaataagttaataacaaaattacttgtcaataaacagtaataacaaaatccaacatattttgagattctccgacattatcttacaagctagcagccttttatggttagggtaagtacataaaaatttctataaaaaaaagtacataaaaattaattatttatcagaaaaataatggaagggttttggggtgataaaagtttgacgaatcacgcacggttgtggtgagaaaatacaaatgcgagcagttcttattctgtgggcgcctccaggaagatgtacacacagaaacgtggccaatcgaacaaccaaagcttagagtcaacatcgaagaaagagccctgggtcttgcccttaatgttttaatcacgtaataatattattcgatattcgaaatataaatctttttttcttttccttttttcgagtcctcagaaaaaaaaaaaaaaaatcgccgcttggaacataaaaggcgagacacgacacgatgcggaaattcgcagctggcaggcttaaaaacgctctcacccgttatcttaataaccataccaatctttcttcttctcaatcacgctttctctcatccaaaactgtacttgattctgctacttccatggcagacccttcttcctctcctgtcactc

SEQ ID NO: 28151 - DNA, 1111 bp, Cannabis sativa
gtctgcatcgtgtaaacaggcaaagcaagccccaccgatttgatcaacgtagcacgaccagcctttgataacgattttaatttccacccatggtgtcctatgttatttagtgttttgttgctcttctttttcggtttcactatatataataaaaggacataaattgaaaaattaaataaatcataaaacaaattttaattttattgtaataatattaactcgcggactaaaatttattaacatcccaatcacataaaaactgcggtgttatatttttagcttttacaaatatatttgatttctgaaaatttgtgatagcaaagtggaaaaggaatttcattagataatatctgatattgcttatgtatgcttgaacaagaaaggtcagcctgaaatagctatagctagccagacttcgattgaattcaatcaagtccttgcttcattggctgtttcaatacgttaaaacttactttcttgtctttgctttgctttttcctttttttgggtgaatgctacaatatgtcaaatcaaataggccaactatatgtgttgttttcttgtaagaggttaacccaattcatggcttcggtttgggatagccaaacgcaacaaaacatgtactactaccacctccaagaaattgaccccttaatgaacagtaaccttaattatctagccaatggagttaagtaaccccattgagcgttttatctcatgattttatagaaaatggaaagaaagaaatgtctaaatcacattaaccaaagatgaaacaatcccagttgttcttttgtggtccacttatctataatgaggctactccattacttttggggcctgccaaagatggacatattctcctttttcaatgacgtacctctctctctcattcttggctgattgattcagctcatcatataatctaccattcatttttttcaagcttttatttttcctcttctacttcataatgtcatcataactgggattgtttgataatgttgatgggtttgttatgttttcatagataaaaagaaaagaaagattccttttccttttgaagcctgtcattgtaatctagagcctgcatataatatatatatatata

SEQ ID NO: 28152 - DNA, 3558 bp, Cannabis sativa
ttatacacttgtggtgtatgtgatgttgagattgctctcacatctcttttatatatatgttatttatatattgtgtctcatgtgtagctttttgctttgagttgtaacccctatcttcatctatattctctattttatgtgtatattttgtttaagtgttgtaacattatttatttatatttttgtcctttgtattatttatcatagagttgtaatcttgttggtttgatatttctattggagcacaacaattttccaacacttatggttagggagccaatgatcatccagagttctaatactacttccatcaccaacttttcaaataatccccgaagccattaagtctcttccctataaaatacttctccaagtatatcatccaagctgaaaatagaaaaaattcaaaatcttgttgtgaaagcatatctgatgcttttagaatcacttgtttaaatattatatttttaaatgtgagaattatatgggataaggggttgaagttgaagtatagaaagttaaatttttcatagaaaataaaatttttatttattttagaataatttacggtataaatacttaagtttaatttctagttgcaaataaaagtttaattttttgcggttataataactaaatattataattttggaacttttgtaagtatttgactgttaagtgttaattaaattgtcacgtggcaattactgattggtttaaattattaatttttttaagaaaaaattaatttaaatataccaataagaaaataacacgtggataataatagattgataactctagatttgaaaaatataacttatgtattattcttcaaaaattaaacttaatatttatttccactaaaattaaacttacttatttatggcggtatagccggccttcttatttctcaagtctcaacccacccatcaacggaagtccccctctccgtacctttccgcgcctaagcgtccagtgtctgttaaggtccgttcaagtatttctttcccattatttttttttttttgaatcttttcattttctttgaaaatggcgagagaggatttctttttgattaatttgagagagagaaagagagattgggatgaaaattacgtacgtaaactcttaattcttacagatatgaagagtcatgacgagaacattgcttcaacagcaaccgattcagccaaaacaatgctccaacctcgcccttctctgaaaacccatcatctttttaataactatggatcatggaaacacaaggttcctttctctttcatctctctctatctctttatatataaatgtttattacatatatatatatatatgttctggacacattgcagttatttgtatttatttcaatttttgtgttcaattgatattgaaaatgtataattttgaataccttcttcttggggatacgaatgataagctgaaaactctttgtttgtggacatctgtgggatttagttgagagaaagttgtttgaaaagggtcagagaagatagaaaccacctgctttggaaaatgagagggacgccttcttctcaccatgtagatttgaattctgaggtactcgctcttcttgaatgaaacccattttttattttacttttcgaatattccatgtcgcgctgttatgttctgttagttactggtactacatggctaagaacattgttttagtacgcaattcatttggaacatagctgttgtttccttcaatttggtaaggattaataagcatgctttgcaatgagcttaaattttggttctctagtgtttcacggacaattattttcctcgcttcaaattcactaaaatcccttctggtggcggtttgatggctttttgacttgtcccatttgaggtggggtaattgatcttcaaggtacatcaggataagcaagaaacatgaatgttagatcaattttttccttgtatggccgtagggtcttcaacttgaaagaatgatgtcgactaaaatataatgctaaggaataatttgatgtggtaatttgtaggaaaatttccaattagtattctgctttatgaaatggtagcacaagaaatgaaacatatgagttttgtattgtttgttataaaaatataatattaaatattggaaactatttagtcttataaccttaaattatctttggatttctagctggtggtctaaagtagtttatattacttgtactgtatcctaccgactaccgtcttctctttttccaattttaactaactgataggtctagatgttgtactttcattgtgtttattctttcttctgttgtcaattctttgtattgctatattatgcgtttttatgaatgtatacatcacacttagtaacgtgatttatattttgctaaatctacttgcgagctatgatatgtttttcactgtgagggtgatcataaagatctaattctataatttttttatgacttttatcgtatttttcactctatttggcatttttactttttttaggtataattatttgtctcatggccttcaaatcatctcgtatctttctctttgcagggtttgagtttgatccctgcttttcagaatatagtttcggatgaattgaaaaaattgaaggactcttcatcagataacaatataaaaaagtcaacctctaaatgtgacatggatgatacgttgtgggaatatgatggtcttcatgaggcttatcaaggtgattgtgaagaaatactactagagatgcaaagaatcttttacgaggatctcaaggaagaaccagttgggaaaggtaatgtgtggtaaattaagttagactttcaaaacctcattttttcagataagtttttccggcatgatttcacactgtattttaatgcaaggcatgataagcttaaattaatcttgatgtattataagtagtttcggcatggttgtacatgccttttatgttagtaagaaaacctttttgacatgattttttgaactggcctgttctgtgcaaaatatactgaattcaatggccatattctattcattgctcgttcacaagggttctatggtcaaggatgtcataggaagttggagtatcttcctcctggaagctagggtattttgcaaccaatggtgtggcttagggtggtttcagtgggttatgggtatttgggtctttaaaactaagaaattttacacattttctttgtgttaccactaatgtgaactgtgaatcacattggttttttcccctttttgatttctagacttctaagaatgacttaaggtgaccctaattaagtaatctgtttctatgagagagaatcatcaatttgatttttgtgtgtaggtatccacttctccatgtgtgtgaatgttttaggttttaagttgactagtagattgtacattgtttttgagcatttctgttcactctagtattttgcagaactggaaaactatgttgaagtttgggaagaagaagaagatgaatacttggcacgtgcagtttatgagcatatgcaactgaacgagaaacaggtatgttgtgaaatatat

SEQ ID NO: 28153 - DNA, 2230 bp, Cannabis sativa
tatgtagaaagaagcaactgaaaaagctaaagaaattttggtggccgccataactgaaaatgtagagatcaacaaacataacatttgcgccatcccaaactcatttcggatcgctgactttggttgctccgtcggcccaaacacatttatggccatggagattataattgaagctatttacaaatcctaccatgatagtacttccacgtataaccccgaattccatgtattcttcatcgaccatgtatcaaatgacttcaattttctcttcaaaaacctacctaaggaccgaatttactttgcggctggtgtgccgggctctttctaccatagattgtttcctagggcatcattggacctcgcctactcatcacatgcattgcactggttgtcgaagactccaatggaggtcataaaccctagttcattggcatttaacaagggcaagattttttatgccaaggctgcagagcaagtcggcgaggcctataagaatcaacatgaagaggatatggcaagcttttttggtgctcgatctgaagagctcactcttggtgggctagttgtgattcttatgtcatgtagggaagatgggagtttgccaactcactcctcgctcggccctctttttgaaccacttgaatccaccattatagatatggctaacgaggtacgatcaactcgagttttcagttgttttctatcaaatatgtaagattcgatattaaattatactatattccacacatatcaacaaaggaaaacgaaagaataataatatcaaattttggttttcagctatctactcttctatatcaataatatacatatacatacatatttttagtaggagtatttatccaattcaatttgtactatttttcataaaagtgcggttttcataatttttttttaaatttaaaataagatatatattgttttgactaaagaggatattcatttatcaaagccacaaccaactggcccaaactcccatcaaacaacagccactgagttaggcataaaaacatgcctctttcagtttgaataagtttcttatcttttaagctatacaacctatatttaactatatcttttacatcatttacaattttcataatagacaaacaactacaataatgcacacaattgttcctattcatccaaagcatgtagatagtagcagcaaggatcaaaatgataacacctaaacccttccctgccacccaataacataaccatctgttataatcaatcgaccaagccacaaaaccaacccaatcaaacacctctttcacaactgccttagaaacaacacagccaaaaaagagataatgatgactctcctcctcttcacaacaaacatggcagctgatagtgtctagatctatacggagtctaatgaatttatcccttgtaagaagatggtcatgaaccgctgccaaaatataaatctatacttgggaagggataaaatacaccaaacagctttgtagaacacatcaatatcatgctaaattaacccagagtctagttgcaagaaacttacctctactaacagcagcaacaatattatccttgctgaatttctttcttcactggcaaatttttctctaataccaactagcattcaccttcaagtcataatcttagatttcatattttgaatccaatcaaatctgcacaaaagctcaaatccaatctaattttgaattggttactcttttaatattatattatttaatatttagtaaaatatatatatttttttcactttacaaaaaaatgaaacaagttcttaaaattatatatcttcaacaacaaattcaaataatcaaataaaagaataccaaattccaagaaagaggacaaaaaattatattcagaatttttttttattaaataatatatttagatataaatatatacatgcatttcatatattaaattttaaaatatatatgcaccatatgtattaattttttaaattattatttttttcttctcaattatatatttataaccttttttaaatatatataggtgcggattcgattaaatttaatatctaacccgattttaaatttctcaattttattcaatctacactttacagattgaattgaattgaatcgtgcagattaaattaaattgagtatttaattaacacccttaaatttttgaagttgtatttatattgaatgaaattatatcacattgttttgttttg

SEQ ID NO: 28154 - DNA, 1799 bp, Cannabis sativa
agtgacagtacatacgcggtacaagcttatatggaaacaccctctggtttttacaaagtcttacgcataagactttttggattctcaccaagattcccgtatctactctccagattcatagcttcactttcgaatgacaaaacttgtaaccataattaacaaatattcactttggtttcaagttgaagtcgcttaacaaatcgttattataaatactgttgttccctcagcccttccaggcttagctgactccagtcagcttcaagcagtgcttaaacttaccactcgacactacatttgttaccatgtcaaaaggattatttttagttggaactttggaaattttcacagcttctttctccattacttctcgtatgaaatgaagcttgatatcaatgtgcttagttcgttcattgtgcacactattcatggttaagtgaattgcactctaattatcacaatggacaataataatcttctagttgagtttcaacacttccatcaacctagttaaccacagtgcttccttcatcagttccattaaggtcatatattctgcttcagttgtcaacagtgccacaaccttctaaaagtttgcttccaattaatagtcgttccaaatatagtaaacacatatctagttaaagacttttgggtatcaatacaccttgcataattagagtccacataaccattattaacatctaagtctttatttcagttattcatgccaaatatcagtcttttctcagtagttcccttcaaataacgtagagtccattttaaggcttcctaatgctcctttctaggatttcttattaatctacgtaccatgctcagtgcatatgttatgtctggtctagtacaaaccatgacatacatcaaagagccaacaacactagcatatggaactctcaacatctttgacttctcaatttcatctttcagcatttgagtaacactcagtttgaagtgttgtgcaagctgagtactcactgccttagagttattcattttaaaggtaattaaaacctttttgatgtagcttgtttgatccaagtgcactagtctctttcgcctttccctttttatgcccatgcccaaaattttactagctggacctaaatccttcattttaaacttcatctttagttggagtttcacgtggtggatctcttgtacactttttctagcgatctgaatatcatctatgtacagcagcagatacaaagtatctccaatttctctcttcaagaaatatatacaaggatcaaacttacttctcctcagacttatcttggtcacataaccatcaaatctcctactccactgtctcggagattgtttcaaaccatacagagactttcttaacaagcatacccaatgttcctttccagcctcttcaaatccttctggttgtttcaatagaattctttcatccagatgtccatacaagaaggcagtcttgacatctaattgttctagttcgaggtcttgacacgcaataagtgccaacaaaattttaatcgacctatgcttaacaactggagaaaatatctcattataattgactccttctatcttagagaatcccctcatgaccaaccttgctttataccgtgcctcttgtacaccccaaatgtcttctttccatctgtacacccatttacatttgataacttcaccgtcttccagcatcggtattatattccaagtttggttcttcttcgaggagtgcatctctttcgatatagctccattccatttcttctggtctttgcttttcactgattgtgcat

SEQ ID NO: 28155 - DNA, 1741 bp, Cannabis sativa
aattttgaaaataatttttcctttttctgattgcttataaatagaacccaaaacttttggtgatctttttagccatttcaactcttaaagaaccagagcaaaaatttctacgcaagttttatcttagattctttgaagaaatcataggaaaacttttgacaataccatccgagcatgtcaataaagcttcgaatcagtgagtaagttctttattcctttcttttatataattgcaatgaaatgcatgcattattttaaattctttgctatggattttgcctattcttgaactgttcttggttaattgtagaataaccaggtttacggtttggaaatttaactaatgtttaaccataacgcctaatgatatgactgcgctttgattttgaccttaaatcgttcattcccattcgtccataatcaattgacaaaaaatcaggttccaattgaagtttgaacttctgggactagaaattccaattctgggtgaaatcttttcttttgattcttaatcaggcttggtcagcatatacaatctattttcatttgttagcctgaccaactcttattctcttgtctcccactttttgtagatgaaccctggtgatttttggggaggcaagcatcatattgactaggacttgctccaaattttgtatgaagatcatcctcatctccgtgctagtccatcttcgtctagtgacgatctttcgaattccaattttgaagattggaaagtgagcagtgaacacacaccttccccgaagcccgagctgcaacaccatttgtatcctgaccagatttgtggcaaaggatacagtcgtttcatctgggaatcggagaaaggttggagacactatcttcctgctagctagacatacagggtccatctgagcgtagtcgacactctgcccgagggccgtccaagcccagctgctaaaggaaactctattgctaaatttgatgagactattgcaaggcacacttctgataaaactccgtccaatagtaaaatgatggcacaaaccaagtagactgtcataaaaccttcgtctgctgaccctcatatcgctcgtttggctactatggctagggcaaagcaggctcgtctagtggttgaggaggaggggattgctggagatgttgaagtctaggaatggaggaccagggcaaggtctatcctgcaactccttctaaggccaaaggtgatgaagaagagggggtagctcgggtgcttccttttggtggctacaacaaaaaagggggaccatttctaagacaggtgaagtcttggaagctagccagaactatgtccaggaggagtatacgaaggctcgtcctattagtagaataagtctaaaaagagctcaatgggtctctctgccatctgcccttactataaagagattgactaatctcttttaagatggtcttctggggcaatttgaatgcttccttccctctcatgggtagatggtagaccctggagagggttactgtgcttgttcaggtcctcacgccaaacaatgttacctttgcatctgtacttcaaggagatggccaactattaccatatcagtctgacccaattcactcctaagggcattaaatacttattcgccctgtttgtattgtatgcctctcaaggatggggtcagtcgttcgcccacgataccaattggttgttcaacttgaagttaagtcccaagaaaaataggtttgggtatttctacttctcaca

SEQ ID NO: 28156 - DNA, 1192 bp, Cannabis sativa
aggtggggtcataaattatagtttagcaaaaggattgtttatttatttatttatatctatagtacactcttcaaataattttttttttaagtaaattttctatatgtttcgataaagcttttagtctttttttttttaataatcatatacattataattatttataattatttgtatattgttagaaaattgtcagtagtttataatgttaaaagtgtagtaagtaactgttgaaactttattttcattactgtaaactacttaaaatttactggtgatcctaaataactacaatgtatgtgattatgaaaaaaattatactaaaactttttttagataccgaaacagacacgagatctacaagcaattggatggcgaagagtggtgaaagatgaaatatcggagactattggtatgaaggaggcgctcatccgcaccccttcgatagcttagataattcggggactacgtgacaattataggggtcttatacttcattctttcttaattgggttatcgacatgcacctcgtattataatttttcattactcataaaatatgcaacaacgagattcaattctatagataaacatattacatataattataagtatataaccaaagatctaaagaatacatttgttgatttaaagagaaaaactcaaatagcggaaacataccttaatccttaaatagtgatgattttaatccatcttggaaagatgatatttgtgttgattttgagtaatgatcttccaagaaaagaagatttaaagttttctaatttctctcttattggaggaagatagaatagaattgactcatgtagataatagaataggtaggttgttattttaagtagttctaaaatagtcacattatttgggtcaaaatttaaatagtaatacaccaatacatatgagtccatattgaagaatgacagtaaaatcattcctattaatacatcacacaacacgtgatgtactaaattttattttatgtaattttaatttaggtgaaatgtactttaaactcggtttaatatatttaagtttctaacccttaaatcaactcaatctagatctaataattacggagattaataaatactcataatcttaggagagagaaaattaaatagattgtagttataattaagtaaaataaagagtaatttgtagcgtagatatc

SEQ ID NO: 28157 - DNA, 1572 bp, Cannabis sativa
tacacaatgcatattgatataggagacaaggttcattctatctgaggtacaagtaaaaagagacaattttagtgtaacttaggatgtctgatatactataccacctgagatactacagtattaggtgtgaaagttacttgacctcctatgattttggggatggtaaggttgtaaagtgttaagggttcactataaatagagcctttgaattcattgtaaggagactttttttttgggagaaacatctgaatgaaacaataatttttctagagagtgaaggttgtaagattttgactttaagtattcttctattaagattttaaaataccatttcgagttcttgttatttcattgacgagttcttaccgtcaacaatttggcaccgtctgtgggaacgataagctctagctacgttagttgctaaaccatttactataatcttcaagatgtcaaaaaattcccatcgtctttgagaaaatggggttcactcaggtgaaaaccagccaaccaccatagtaagagaatgtcaactccagttgctggagggggtcagagggagagtaaccaaagggtggaccagcacgcaaatacttaaattgggcccaaagcaatacatgactcgataatggcattggtgggtaaccctatcgatagaagtattcaactatcgagaaggccatgtccgacgtagtgccttccaccaattgtgccaccaaacctcgacacttcaaggaataggcctagaaaggaaaagcgagcgtactcagtgagttcaagctcccaggcttactgctacaaggaggaaataagcgacctccgttggaagaacaagaggttagaaactagtgttgcttgtgtgcaaaacatgttgagtggcatactcaaaggccaaacccaagcttgacaccttcatcacaaaagccaccgagtgggaagaaagatctcaattatgtatgctggtaaaggtgattccatgtcatccactaatagcaccacatgagatgaacatggaaggagtctattgtcagacaaaagctcagcaggccaagtgagacgactcaaaccaacccaccatggggggattttgctaaaggaagcaccccatagcctaaggaagagacttcactcaagtggtctcatgctagggggcacttcacctatggctccccaccaagtgcaagataagcagaaggccttatctgtcaactttagtggtaagttacacattgtccggacaagaggagtaccctccacgagccctgtgcaaaccacatgaaagacccaagtttcactcgctaactttcgagaaaggatgagcaaaaggatgaaggagttggaggcaaaagtgcaagacctacatcaaaagatagctatcactataaagggggccttgagtgatgacgaggagtttgatgaagaatctccgctctcaagggagatttaaatggaaccactcccaccgaacatctgaatgaaacaatgatttttttagagagtgaaggttgtaagattttgactttaagtattcttctattaagattttaaaataccatttcgagttcttgttatttc

SEQ ID NO: 28158 - DNA, 3324 bp, Cannabis sativa
ccaccaaatccaccaaagatttggaatcctcgccctcatttcacatttgtgcagattaagcgttcaatggaaggccaatcagagaaagcgttgaacgaaactccaaaatctgaatccgtaaatagagcaaagaagttggttcatcgacgaatgttggtggggatcaaagatgggagatttttattgggaaattttcactgtatggacaaacaaggcaacatcatcctccaagactccgtcgagtacaggagcactcgacgttcgtctccctcgcccatggaacagcgttgtctcggtttaattcttatacctttttcttctcgttcatcctgtcacgtagattgctctattgaagaacacatggctctcctcgctgtttaggttgtttctttctttctttctttctttcttttggggtagaaagaagtatctgatatctgggtttggatgcttttgggaagtagttaagggaaaaatgaaataattgatatacttctttatggaatttttttctgtttatgaatatctgtgattatcattatcatgccctttaacattttgttgggatttttgagttaacataaacgacagagtacataaattgaataggaaaagctagatttcactaagcttttcctttgccaagcctaatctaaaacctcatttcactgtcctagagggccttctaagttttgggtaattaaaataggagtggaaagtgagctgttattgatcaaatcaggactggtgatctttgtgcttgccttatctttggctcaaaaacatgtagtggtggttgagtttgtaccaatggctttggaattagagtgtgagaatagctttggaggatatgatttcaatgaggaaatatcataaaattcccttcaaggagtcagctgatttcaacagtttttaaccctttaatttggaggaaggattcccttatcatgtttactttctgagtttctcttaagagaagtcttgctatattcagcttatagttcatagacaataaatttagagtttctgttaagtgagtgcttactcttccttagaatccatactctttttagaagacaaaaacttcttttgtttctcaaattttgaaatcttggagttattgtttctgtattattatggaagttgatatctctttccagcttgcctgtgctcaaacaaaattcttgattaagaatcaattgaatttgaacttataagctcttggagaaccttccaagaaacaaccttacatgttttggtttggaggctatatatgactggactcttggatttagctttcaccctattctccagcttgtttgatggccatgagaacttgtaattagatattgaatgctgaaagttatcggttagtttcatagcaaagctcgcatcacttggtccgtcctaaatctaatgctcaagaaattggattgactgattgagtaactggaggacctccattatgccttggctaaggtaaaaaatattgtgcactattatgtccttatagaaccagttagaattttagcattacatgtttttgaaattagttagataggatgcatatatcttgaacaatgctatgtgtcccaattgaaatggggctcccgatttacccgatgaaatggtttttttggcatatctttgggccaaacaagaaaagctgtcactttcaatatgatttgggttttcttctctaaaagtgttcgaagattcatttgttaataggatgcttaaaatgcttatgagccatcactattagctacaaagggtgttaatgtcttaaattacatatatgctattgtcaatttgtcactgacaattgtaaaatatgttcttaattaatagtgaaggtttttttttttttttgggtaaataagctcattgtattgcatcaaagagcaattacaaccagctgcactagcagctaactaacccctcaattacatcaaatctctacaaaattgaaagccaaagctaatttttcactcctattttcttgtggtaagtctcttttaatctagctgctatggttaacttgattttagctgctgcagtgtataacctgtggaaaaattggaatagatgtgtgcatgaagaattttctcgatcagctttgtatattgttactgagattaaaggcattgtgcgtgttagaaaagaggcttcgtcttaaagatcaacgtttttacaaaagatgtatatatgatagttaagagctgagttaagctggctgttggtggcctggcttttctctgtttattgttaatttgttgtgtatttgttaaggttcagtgatcaataaagtttcttttcgataagaaaaaagtctcttttaatctatttacaataagatgcttagcaaacaaaccaagcaatttaatagttttcatctcatgagaccaaagggctctattccttttcagccaaaatgagatagacacaaaagttaaagacaagaatgtgggtttcccttttcactttactcaccttgctcctaatataattcaagagacattgatagttgtaaattgtaatcatgggtgcccatgagttttcaactcaactccatacacaaggggcaaatctcatctatctctaaaccaaagaccttaattctatttttcgttttcagccatgtaataaatcgatctttggaatgctaaatcgaggccaaatctgagaagcatactaaatagacgaagaagggaaaagagttttgcaaacctgattaatggaaaaatgaagcgctgcaaattgattctttgtgtaaaagttttccaccaaattacgcacttgcatgatcgatatttaatatcagctattgttttgagtagacttatagttccaccaatcttcatgtttaaagaatctatttgatccaagagttgttcttagtagccaaagcccacacatgcttagtaatatcccctttgaaacatatttttcattttcattaatttgaaacattgtttatcttctttttgtatgtcatgtatttgggtccttgtgtgccaatgtttaaggtgtcataataattcttcttctcttttagtgatacaatattttttttacttatccaggttaagattaaactttagtaaaacatttaataattaaaatattgaaaataaatagaaaatatcataattagcattcaattttatttaaaattaaaaaagaaaatataagatactaatgtcttcgcgatagttattatttatatgtaaactagaaaacaaaaaccgcgcgttgcgcggtcttaaaaaaatcataagctataattattattgaaaaaagtttattttttaaatgtgaatt

SEQ ID NO: 28159 - DNA, 1964 bp, Cannabis sativa
aaaaaatatgatatatggctctaattatgatatatgtcttccaattatttggagatgcatacaagatattatatggtatggatgatattaagtctattgtaattgtgtgaaagaaaaaaaaatacaaaattttaataagttattaagttaataaaaaataagaattaatttggtagaataattacttatttattaacaaaatatttttatacaaaatattaaattataattttataaaatatattacacaattattatcaaataaaataataaactttttatgtataatttttttaatcctatatatgtaatatataattattttaggatatgggttgagtaacttgagttggatttgtttgtgctaacaattttaaacccttggctaacccatataaattcggtttgaacaattattgattgtgcaatctaatggtccactcgcgtagtaatcaataaggtcgaattcggtttggattatcgagttgatttgatcactctataatttgtgcacccctccataaaataactaaaattgattaaataagagtaaaagagaaagaagtttaatcggtcaattcattcttctattatagtatagaaatacagtagctgtgttatttgcaagagatgcaaaatatgttgcttcccaaagaatgagtcatattattcgagtcccattattttcatgaaagtcaattcacaaatcacaaaaatctaatggaaatcttggttgttatggtttgacatcgcaattgatgcattgcttcttcatttttatttatttgcaatcatataataaaattaaataattgttatttcaactttcaaacgtctaatttcctctccatatgtgtgaaagctcggtacacattggattatttatttatttatttattattattattatttatcaacacattgaataagaatattaaatgatgtaatccttttttttccgtccaaaaaataatcaactagctagaatgtgtacattagttggtaacagactttcaagttatgagaattatttttagagattctaataatgttattgtttattcaaatttttaggtgttaaactataatataatatgaaaataaaatatatacgaagatatattgaaattgtatatgtgatgaaatgatcgaaatacctccagctattgatgtttgaacttcaatcccaacgatagcttcgatatagaaaatcgagcttcctcactctctcaactttctctagatgaaatttagttgtttgcacagaataagtgaagagctcagggaccgagacttgaaatactctattagtatctgcaccacattaattgtcagaatattttaacaattaattcggaaaaccaaatcggataataaatatcgaaatctaatcatatatagaatatcactcaattaatactgtccaaattcaatgaatataaaatatttatttatctcgatattaatttttttattttattccataaatataaaatattctaatattctcccacttggtcagtatttagactaaagtattcaaaccaaatgttcctcattatataataaacatatgaatcatagcgacatgtcctcattatatgtcgagtattatcttccatgtattacaatatatttactatatagcaatgtactttatgtggcaacgtacttaagtaaacctaattatgtttattcggtcctctaaaattttttcaaatataaaattaagatgcgcataaatatgagaaaatatataattaagagtttcattaaataattttagttttacagccaaaaactgtattaggggtaactggacaccatatttactttacgatccttgaacttgcgttgcgacatgtctttagtcaagaatatgcgattacccaattcagtattgtgtgcttaatgaccacttatcatacctctttatggctaactacttaatgtcgatatgctag

SEQ ID NO: 28160 - DNA, 2084 bp, Cannabis sativa
tattgaagagaaaatttgtattgatatctttggatcgtttgttttattgtatataaggataacaagacgcgtagatatgaaaatgttcagcagcccacttagctaccacagacaatgcaatggcataggtaaattatctattagctttatccatttagaacgtgtaatcattttgtttccagaaggttttaatattcatttacatgataatttggacggctttgatatataaagttcatcatgattttgatgtgtaccaacgtcaaattagagctcctttgtctcgaactcattttcttgtaactttaccgctaccaatcactgggcatcactactgcactgcactgcacagcagtttccttctgtttctgagaaaatgctagagaaatttctagtatcttaatgtaacgatgattatctcactgaaccccagctttgtatttactttagattcacctcttttgagcatgctttcgttacttccattacttactttcccttttggcaacttgtagtacaacagagtttgtactaattccatacacttttagaatgtatttttgggaaattccatctttgacaagagagctcggtagggtcggcgtcactaaacaaacagtcgaagaattggggttaatttcttaggtgtcctaccgcaagtattatgtttcatgctaaaattcacagcatcagttcggcacataattgctagtaaaagtggtccggagcacagaaacttgatgagtatattggttgtgctcataaattttgacacaaagtctatctctgtccatttgacattcaatatacaagagtagcatccgttcatgttttccatgaattaattgttgcttagttcctcctaacttcatgttaatgttgttctttaatgagtttgttctcaaaaaaattctgtccatttgacaagtgaaacttcaaaatcacaatggtgaatcattgaagtacccagaaaggaaatagtaaaatatagaaccagaacaatttacatatcattttcgacactgaagcagcgcgatcaactgatggggattatgaatgtacccaaaagttcaagccagtaaaactctctttatactctagagaaaactacaggctaaacgccacagaaacgtttcatgttttcctctctacatcttcacaatgtgatatcattcataaccatcaatgctttgtttcattggatccaactgcaacaccacataacccaacattttacaatagatggacgacaatcaaatgcactcttgatttatttcctaaatgccacttggatatatttttgtgtttatttaaccagattgtgcaaattatgaaattgtaaaaatgtcaaaaaaaaatgtaatttgctttgatagattataaaaacaatttcattcccatcaatcatcacaattttgaaagaaaatgtacacaaaggaatattattgataaaatttttacatttttacggtttaatttttgttatatttttttaaaaaagaaaaattaataactttacgatttctttttaattacaatttacagtatttaataataacaaagaaagaaaatgataaaaataataaaaaacaacattaaaaataacaaaaaaataacaagattataataataataaaaaaagctattaggatttttgctccttgatttatggcctatgtattattatactcctaaatgtttcagctcgttaaaatagtccataaactattcacagtggtgtaaattggtcattctgtcaagttttgtcacacgtggcacacaaaatgatgacatgactacttagtcagttgctacgtcagtgccatgtcaacgtcatgtgtgtaattaatttgaaaaaaataatttatttttttaatttagttttacttaattttcccaattactaattgatttttaatttaataatttttattttttaatgttaatattcatgttttttttttttttgcactgatgtatcaattggttaaccagtcatattatttttttgttcgccgtgtgtgacaaaatttaacaggctgaaaaattcagggggcaaaaatctttttttaattttttttttt

SEQ ID NO: 28161 - DNA, 3668 bp, Cannabis sativa
aatctttattatgataaattattttattttagaaaacatcctaattaactgcagatagttacaaaaaaacatgtcaaatttctattctttcttttagttgaaatttctcatatctgagattctattgccagcgaggtgagtttgggagtggtggttgttgttgtttattcatgttttgatatgaaatctaatgggtaagtcacattacaatgaactttaaacgtcgatacatctaaggatgctcaaggagattttgatgtggctgtagtttataaatgattggaaaatattgctagatcgctgggtatatcgtttcagcctgtgtgatcctacatgatgttgttgttattgataccaataacatctggaaattaaaggggagttttgatgttgatcttcttaaacctaatctatttcttactaaatttttgctcgatgatgatttttttttttgtgttttcaaaggtgaaccttggatttggagcactctatgttagtttttattgaacaaaggagaatcgaaaactactctaatcttaattttgactttgttttattttggatacaactccataatctaccaatatattgtctttcgaatgaagtgggttaggaggttggcaatcttattgggcatgagattgaggtggatactagtttcattggtgatcatcggggtcgttctctccaatcctatgtgtaaaatgattttacaaaacacattcttcgtgctcttaaggcgggtttaattcccgaggaggataaaacacttgttgcataatagcttttttaaaatgggtttcaagaatgaagacaattttaattcttttgttcattttaagaaactgtttgagtatatatggtgagttatgattcaagtttcatttttgcttcttaaatttctttaaaaaaaattgctataaattttagttatatagttgaccatattaaaatgtacaataaaataaaatagaaatcaatgggtgatttaaaaaaaaacttttattcacttaaacatttgaaaaatctatatatatatgagagatatgagacggtgacgtgacactataaaatttctctaattaaaattatttatctctctttaattatctcattttttaaatttttattagcttcataaatatttaattgatataaaatatatatctttattttttactttttatttattatttgttaaaaaaaaaaattccaaatttatcatcataagttttttgtttgttggctttatatttttattttttatttattatttttttaaaaaataagaatttcaaatttatcatcacactttttttattttttggctttatttttaattttttattgattaaaaaattgattagagttagaaactaaattatgaataactaaaaaccagatatatatatcattgtggaagtttttgtttggtttctcaacaatcaatctctctaactatttatatatattcctatgagagaaaatggtcatctaccactctctcttttcatctgagtcttatttcccatttctttttcctttctctgcttttcttcgtctaggtgttctgtgtatttttctgtgtgtgtgtggctgtgtcctttgagtttgttcctctgttttgttgattccttccccttagttgctttggtttggtcttccgtgttttcctaaagatctcgagttggttctgtctgttgtagtctcagtgtgggctcttgtgttttttgtggggctgggtgttgtaaagaggttgtgtttcacgtgggtgttgtctcagtgtgggttgtgttttttgtggtgttgtctcagtgtgggtgttgttctgtggtaaaaaggttggtaaggttggtttttatagttggttgcttttctttgtctgattcaatggcattagtaagtgctaccaactcctccaatcatggaaagtgtttcacgtgtgcggaagcttctgtcaagctcattccttgtgcatcttctcagcaggctttacattctttttgtcttcttgggaaagtggtggccccgatggtagttaatgaagccaccattattgattttgtggaaaaggtatggaaatttaatgtgacagtggtagctgttaatgagggtgccaacaaccataactgttttgagcttggtttcactagtgctgggaaccgtatttgggcccttgaaaatggtccttggtgtgtccgtgggtatacatttttgttgaaagcttgggagcctttaaaagatctctctgttgtgtttaactgtgtgaaaacttggttacatattcacaatctccctagggactactactcaacagataatggtaaaacattgggggcaaaagctggccaagtgatatatgtgaatatggatgaaggaaaacctgctctctggagtaaggcgctcaaagtcttgattaggttgaatgttaatcaacctctgttcgctggatgctacttcggtctggaatcgggctcccaaaggtggattcagttcaagtacgagaagctgggaatcttctgttataactgcggcaaaatgggtcatcaaagaagaggatgcactctgtcttctccggtcacggtggccagtgtaaatggggttcctttcccaatgtacgggccgtggttgtctttggagtcgacgtacctagacgttttctcgggagcaaactcgttcactccggcatcgactccagtgggtttggcgagtcctgtctctgttcgccatggaatccggccgttggccgtgactgctggtttgaagggccatggtcggaagaactctcgatcttcgaaccactccgtgaaggcgactgatcgtaggagcctggaaggaggtcaggctcgcagaatggtctgggttcccaaagaactccctgcatcacgcatgcctacaatttcctttaatggtatcaagagtaccgttggaagtctggaaggtggaaaggagtttgtacaacttcctggttttaattcaaaatataatgaccaagatttgactattggtaaaggaaaagggcctcggtttgggtatattaatgattctgttgggccggctctctcttgttctgggccgggttccaagatgggccatttaaaagatagtgcctcttctaatggactcattaaagaatacaatggccagtttttttctgcttgtgggaccgagcccattttggaacataaggaaataggtgtgcttcattcaaagtgtgttgggccgaatggacttgttgggcctttagagatttcaaatggactaattgagggtaaagaggctattgggccgactaagtccaattcaattgagagctctatttgtggtcaagaggttaacttccaacatgatgaaaaattagctttgactaatttttttcaagctcaaggcactactcttcaagagcttaagaaatttgggaatttggatctatatgagattaaatcaattggaggtgacattggggttcctactacctcagaggttaatgaacgaactactcctttcaaaaagagaaagtttgatgagactactgcttcgctttgttctcgtccttggaagctccttcgtcctcatccctgggctatccgtgatttcccttgggatacggaggatcgcgctaatgatactaaggtgacggaagaggagccctcagaggaggtctccct

SEQ ID NO: 28162 - DNA, 1650 bp, Cannabis sativa
atatattatattaatatatagaaatacatattaaaagtttaagtctacctatattatattaacaacaacaactaagttattttataaatttcaatgatagaattttagcaattgaataagtattattttattatgattaaatctaaaaatatatatatatataatttttaattaatgtataatttgttattaaaaagtattattaatataccatttataattttatatatttattaaaaaatcataaaaaatatgaaaaatattatataaataaaaaactgagcaaacaaaactttttggaggtacattaaaataggactcaaaagggtgggaatataatatctacacgaaatattcacttaaatttgtggttgcgcctaatataaccaatttctagattagtggtaagtgagaatagccccttactagtccacaataatattcgagggcacaaatatgcaactaggatatatatactttgcaagagagatgaaatatgtgaccgttaatagtcttgtgatccgtaaaaaaaaatattaggtaagtttgtatgcaatctcatatcatttgaagaattaggttaagtgtgatgattttgaatttgtgtaggtatgagattacatagttaaagagagtttaatatattgattagtactatcaatgtatatcttattttatggtagcccatcacaaaaaaattctacaattaaatgtgtttagaataatttcgtgatctcctgaaaagtttagagtgacgtgtacaaaataagtaaatgttaattttttagcatgtcatggtagctcgatcctttggataaaagaatacttgacaataataataatttaaaaaaaaaattaaaataatgtaaaaattttagaaaaaacatgattaggtaataaataaattgagggtaagtattatatttattcttaataatataagtcactacttgtctaatttaatgtttaaaataaaaaataatgtatttcttaataaaaagaatgtataatttgatatactttttatctgttttggcattaaaaaaaaattagtctaattttttttcatattaatgtacgttataaaatattcacgagtgaaacacactgtttgaactttatttttggcgtgttaaatttttccgaactttttaaaaaatttcaaaatatcttaaataacgtacatgaccataagaaaaaaaatttgactaaaaaattattttaaatactaaaatagataaaaatatatcggtttagatctattctaaaatttttagatttatatatgacaaatatacaatttttttttaataggtaataatgtttgtacgtttttcttttttcttcgttaattggcttcaaatgaccggcaacaaccacatgcatgacattcaataataatagatatgttttttcatgtaaattattttttgaacaaaaaagaaaatgtaaattatgatgatgtcttaaatttgactcaaaatctcttcaaaaaataaattaaaacaataaaagttataaggataatcatgaatcacgtacattatcatattaccattgatcaagttttcttcttccttcttttgtggaaaaaaaaacaatcttattaaatgacaaactgatcgtgagaccatgtcaaacttagatcta

SEQ ID NO: 28163 - DNA, 3217 bp, Cannabis sativa
  modified_base (621)..(621): a, c, t, g, unknown or other
tcattatccacatgtcattttcttattggtacatataaattattttttaaaaaaaataaaaattcataacttggaccaattaagaattgtcgcgtgccaatttgcattatatttaacaaccagatacctacagagttctaaaaatataacttaagatattgttactgtcaaaaattaaatttagatatttatttgcaactaagaataaactttaaatatttataacgcgaattgctcttttattaaaaaaaaaaatattcatttaaccttttacctgagaaaaaaagtccattagctttatttaaaaaaccaaataaaaataatgggccttctaaaatgtaggtcagattgctctaaattgcccaatacttaggcctaggtgcgtccaaactagtattctatacttatttagtttactttttaaaatttttatccttatttctatattatttaagatatacttacttttataaataatattttaatatacttgattaatataaattatgtgctgaatttaagtaaagagtgagagtatattggacaaaacatctccaaagtgtgtcgattttaatgaaatataaaataagagtatctttttaggagaattatcccatatantattttttttaacttttttttcaaatttacggtttgggtttctaaaatagttgcagcgctagttgcaataggggtttctgtacgattttctgttgcaatttaggttgcagcgctaattgcaataggagtttttatgtagaattttataaaaatgcacaaaaaaaaaactattttaaagtgtaaaaatgaaaaaacctcatttttttattaatagatgcgaaaaagaagtatcctcaacttatctaaagtagggtgttgaaggctaaagctataaaaggaaacgtcagagaaataaatgaaaacacagtggaagaattgctgctcatggtgaatctaataagatagtacggtcgtttctttccaaaaaaaaaaacaaacagattgtcctgtcgtttgttgttggacactggacatttgaagaaaaacacttgtagttgtagacttttaccttctaattagcttactgcaatcatcttcttcttcttcttcctctcatggctggagggaagaaaggactcaactattcatgcattctactcataggtcagtaactatgcttctttaatatcattaattttaaacataaaagtaagagtttggtttatctgaattaatggagagtaataatggtttattatatgtttgtttatcaacatatagttattgctggtatggagagatttgcattcaaaggagtggcatccaatttagtgacatatctaacagatgttgtaaagatgagcaattctggtgcagccaaaactgtcagtagttggtttggtttcacatccctgttgccactcttattggcaccctttgctgactcttatttgcacaggtataacaccatattggcctcttcatttctttatgtcgcggtaagtcatcactctctcttcaatcttttcttttccaattattaattaattatgtgttttcgtaatacgccatgaacagtttaagtttttctattcaccatttctttttagctctatattattagagctcaattgtccttttttgttttgctttaataataaatatatcattcgaattaaataaaaatttattaaagctaataaaagtttaaaagaaaatgtataattacataaacataaatttttataaacttcttacatttttaccattaaatctttttttatatattgttactgtaatctaaaaaaacacaaaaaaaaaaagaaaaacatcaataaaattatataagagtaacaaaaaaataacaataaacaatataaaaaataatatacaaataacaaaaaaaaaaacaaaaatataacataaaaatacataaaagactgaattttatgtaaataaaatcttaaaaaccgtaaaaatattaaaaattctgtatatatttttttttttttggagttgtttttgtgtatatttgaaattatcccttaaaaaaaatatctacccattagttcattattgaagagaaaattacattgtatattcactttacttgttttaacttttatttttattttcatattctttaatatacccacttttatagatagcattatactctttaaattaatataaattatatgctagacttgaggagatggtgatattaagtaactctatgtacattttaataaaatataatatgaggatatttttcgttaatggataaaaaaaagtatttcccaacttatcttcatagtgtatgagggtgaatatgtaaacgggattattttataagtacataaatggcaaaaaattttacaattttacagatttattattttttatatatattcttacaaatttatttttttttaacaaaaatatagtgttaactttttgttatttttgaaaaactgtagtattagcattcctgctactagatacgtgaatattttttacaacaacacaaagtgttgcttctattgttttagaataatgttattttcacattactgttacagaaaattaatatttttctttaaagaaaaaacaagtgaaaaattgtaattaaaaaaattataaataaaaaaatatttataaaaatataaaaaatggtaaaaatgtaatttgtaaaacaattaattttggggggaaatttgataacagttatatataaaaattttttacaagtataatatatatttatatatatatatatatgaaaatacataaataaattaaaaaacaaaaacaaaaaaaaaattaaggaaggctactccatacatactctctaatgagtgcataaattaaggatatctaaccaaatactagacaataaaccttcaagctatatacaatgtaaggatgtcttaaacaatataaagacttggtttcaaaaaaagaaaatagagactaaacattgaataatcaatctctgtaaagtgatggatagtactatagtctaaacacaaaagaacaatccaaaataagctttcatagctactgcttcttcaattaatgtcaaaatctcctacaaaacacatattaaagcatataatgataatagacataaactcaacaattatataataaaattaaattaattataatttttttaaaaaaacataaattataataataaaaatcagaatcctaa

SEQ ID NO: 28164 - DNA, 1257 bp, Cannabis sativa
  modified_base (314)..(318): a, c, t, g, unknown or other
tttaacgaccttaaaagtccagggaacatgatttggtacatatcaaattcggggagaaaaaatcctaattagcctaaaaaatattaggcagtgacaactatatattcaaacaagaataaaaaagaataatatgaccaaccatatgtaaaggatggacctaatgaaatatcaaatcccaagatatataaaaggccaataacaatctagagatctcccagatctaactatggagatagagatccatgcttattagagtttttcccacattgctaatgtgtggaaataaattatgatatataagatgaatgagctannnnncccattgccaattggttttgagatggaaccccattcaccttatccccaaattctaacaatgctagccaagcaaaagagacattaactaatgaagtagcatcgcctatccactagaagataaggctaaaatcttgtattataaataaaacatactctactgcaataaccataatagactggtgttgtaacaccattattgaaaatgaaaataacaaaaataacacaataaaaataaataaaatccatacggtagatccacaattactctaagtaaaccatgatcccaaattgacattgacgacccaacacccatcaatattcgccccacctccatctctagagaatagtgaaacctcatatctatcaagaaatcttgcataatagcagcactaagcaaaaaaaaatagatggaaaatcaccaggactgccacgatagtaggaaactagaccgtcagacagcaagaaaccaaaaacccaaacgacaacccatatggcaagaaacccagattcccgaatgataaaaagcaaataggttggaacctcggatggtctattaaaccagaatctgttagttaagtttagtctgttatttttcttctttgcaaactatctgtgaacttcattctgttatgaccgttagttgtcagcattagtttgtttttcttcagcttgtaactgattgtaaaggcatataaataaagatcaaagcaacccatttcgagttaagcttttcttggcaatattattttcttgctctgcatttgctctgtttctttctcttctggtttttgccttgataaagtttctacagggtatcagacgccattgacgactgtctctaatggcctccactgaaaacacctccggcgttcacttcgatcgtacaatcatggctactgctgctcttccttcaacaaactggaatcccttctcgaactc

SEQ ID NO: 28165 - DNA, 2814 bp, Cannabis sativa
cggttacccatccccgcggtataaatttctatctctaatcaacgctggtaaaatttcatgaatttcctagtgagtataagttaaaaataaattttataatataattacttggtagtttattaaaaatatattttggttacaaaataatattttactacatatataaatagatttcatattaagctctttcgtatattaaaaaaatgatcattctctaatagtagggaaaacaattagagaatctaaatacttttattgacttatatatatgaatttttttttttttttgtgcatgcacattaattatttgatgagaagaaatatttgcttgaagtgcaaatgaattacttggtactagaaatattttgtgcaagtgttgttcataaaaagataaattattggttcacatgtatatatagttttgtaatgtttaaaatatatcttgatttgtttttgcttcttcttattttggtgtatttaaaaaaatacatataatcaaaaaatatgtatttttttttaatttgataaggtatatcaatataaaaatatttaaaattaatacgaaactaactaactaaataaataaaataccaacatttaagagtgaggattttatatgttttgaaaaaaaataaaagtttgagaatcaatttactaaaaaataaaaaataaaatttaaggatcaacttgccaaaacctatatattttatgaatatgctctacaaataaaccttataattatatccatttacttttttatgtgcacgagaaacaaatatttaaaggcaaaatagagtgaaatagtaaaaagtaaatgaaggtataaatttaatatatttaaatatagtttaaaacgttacacaatgtgtaactcaattagaaagaaaattatttgatttaaaaaaaaaaaaaaagaaagaaaatataatagcgagtctatttagtatttcttttagagatggaataattattattagtctgtttcaaaaaaataaaaaaaagaataattattattagttaatactattttatatacgtgcatgaaagtgtttgattgatgtggcagatgttgctaccaaattatttctttgatgtgctcaacataatcaccaagtagcatctaattttttttttataataattaatgaattaaaatatgtagtatttatgatggtctattattatggtgagtatttgtctaaatttagcatacttgtgttgtggtcttgttattacatttaattttagactccaacgttattattggtcgagtacctaaaacccgttttcatgttaggatcgtgattaggagcttgcaagggttagcatagggatagtagtatctagattagtggtagctaattaatgccatagctaaatcctagtatagtgtattgagataaggagaaaacgattaacaagaattaaggattttgcatggagataagaaatccatttaagataaattgacttcgttgatactagtgtctttttgtttaattacttaaactaggttatgtaggggtttgtttgtggtatagttcctctaaatgaaaaggtctccgcaaatgtcacttctagaaagttgtttactcgtagtttgcggaatgatagccgagtccggaagggagttctcggatgtctgtcttgtccactctgggtccgatcttcatgaaagctagcttcactccaggatggagttcttgttagctagttgtctttcctggaagggtaattctagatagtcaacttcagtatactctatcctatcgagaagcatctttagcgagtgtctttagtccgcgagtctggaagctcgtatatgttcccggaggctctgacacttaagctgacgtggagacttcgcttaaagaggagttggttaagttagttaggaataactaacttaacaacctcgtttcttgcagccaccgaccgactttaggatctttatcctaaggctataaatatcacccttgacttgttatttcggggagtaagatcacgagagatcagaactctgctcatatgagattgaaagtttgagtgagaaaagattgagaggtgtagagagagaggtgcagagaaaaaagagagattgagtttgtgttttgtaaggagaatcttttataaatgaagaaaattcttgggcgtaagtgtgagagttgaaaaacttggtgagaactcaatagagaatctcgtctcgactgtattgtatacattcttgctcaatcaataaagaaggattacaatggtgttccagaactgaagtagagccataaatcacatcgaactatcaatctcgaactagtatatatcttggtgttgatttctttattttgtgcatttattgcttctggtttcatatactttgtttgctcctgttttacattcgatcattgttgtcgatttgataatcttgtcattgctaatcgtttgattgtttaaagtttagttgttttgattctgcacatttagtcgtaattttcccacaatgaatagtggttatggctagtaagcgcctagtatcaaaattgagtttcgagtaactagttattttaggggatgtattcgtagtgacaagtcatatttgtagaaaccggtttgttaagttttctttgggggactaggtccgtaggttataattgcagaaatagagattgtaataaccaattgtccttgtggggagtgtgtccattgtaactagtaatatttgcaaaaactgagtttattttaatcagctatccttggggatgtgtataattcatcgagagttgtgaaaaactcgaatcacgacattatcacgagatgata

SEQ ID NO: 28166 - DNA, 1100 bp, Cannabis sativa
tggattcaatctcgtatactattcacctagatgaccaagtcacgctatagccctaatttggacatgagcacaactcgttgacctgccaaggccagatctccttaatttgaaaaaggccattcgacccataagcgaagagtctatcaagacaagtttagatactttcatgagaaaattcgagatcgggtaattgaagggtcatttatgtagcatctggacctcccttactcgaaaccctccaaacacgaggtcccacaatgttagaacatgtcctttgtgtcatactggtagagcatgtaacacacgacacctgacatctttatctgcttgaacgaatagatctcgcttcgtgaattgggcctcactaaagtggcccaaagtcaataactattgtattttaccccatcagatggcctatataattgatccataaaaaccatactgggtccaggtatgcccatatggggtccttccctataaatagaacagtatcccttcatacaaagggttgaaaatttatttcttgggagaagatttgagaattagggttcttcaactagagcataaacacttgtaagaaatactttgaagcttttctagctcaataatattgactcgtggaccgagttcattaacactcgatccgggcaaaaatcttaatctcttcttctctaatttacttctttcttaagcttgtttattttataattagttttcaaaaatctcagtaaaaattttggtgctttcattgacagttgaggaaagaattgctaaagttatcatctagaacgatggttgcaacctaaaaagaagtggtcaaaccacctacatgagaccctgctcgagatggtgctagggatggcaaggaaaatgctgctaacgacaatgaaaaccaactcttgtaagcaattgttcaagtatttgtcgtgggggacagggaaacatcggaggtaggcactcatcctcatccaaaagacccatgtcatggggaacaacaccttgatgactctattgaccaagatgagcaggaggatcatggagatgacccgaaagatggtcataatgaaaattatagcaaagaatacgaagaagagtactac

SEQ ID NO: 28167 - DNA, 2880 bp, Cannabis sativa
tcacaagtaacattttgttatgactaaaagtcacatttagttacaaaaaaattatgttctaattaaaaaattgacactaaaagtaacagttttttgtagtgtataaagtcgccctctaaagtgtctttattttactttgtctttttttatacatttttttaagtagtattaaatataaattaacctaaaaaaataaattaattaatctaattatatatatcaatacctaattaaatttataggagattatagtttattatatcacacataaaaatatcattttttatactaataataatattattacttttaaaaaataactttatgtatatggatatgaacgttatgtcgcatattaatcggtcatcactagtgcaaaatgcgacaatcatcatttgaattagctggttattaaacaattaataagctgtcattattcatttttttatctagtactactttataatttttccaaggaaatatatttgattaatcaattattggtactcgatatctcatcaattagtgaaggctcagtttcggtcaactatatatataattaataaacatacaccacttatatatataaatattacaatataaaaataaatctttgactaattcagaaaataattaccatttaagtattctaaaaagtaataatacacacttaattattatcaattataatgtgtaatttttcctatttatacaattccggatccatatatgataaggtgcgtaatttgtattagataatatgtaaattaaaattgtgtttatcgatcatgattatgaatagattattgccataacacttcaaggggccaatatatagcacaagaaaatgacagtttatgagtgattattagctatttttattttacatatattgaataaaaatatctatgtgggagttgatatatattgaactacttataccatagcgttggacaacttaaaatcttctttaaggatttttttggttaaggaattttacagttaaatttttttagagtaatattggtttatatatatatatatataagatataagatctttataatatatggaacatttctaaaaatgagtcttacctaatgattgttattaaatataatttactataaatattaaacaatattgatccataataaaatagaaattttttttttttttacttaatttagttacttaattataaaataatataaaaaatattcttttttacactcttatcaaaaatatatttatatacataatattttaactcaaactcaacattttatttatatttttaatttttttttcagccaattaaaccatcccaacacatatatgatgtaaaatttgagatttaatttttaattaaataaaaaattcaaaattcaaaatttaaattttttttaataacaatccttcataaataatacttattaaaaatacatccattcatgaagtctttccgtttggggggcttgaaattataaaaggattctgaaaattaaaagaatgaaagaaattataaggtataataccacagctcacaaatatatggtaatatatatagaaattaaagaaagaaatcaagttaaacatggaaactatatagtaaaactactaaatggtggttagtattaatccaagaagcattggccggtctacttatatagtgacacttaatttgttaaacttttatttattattacaaaaatatttctcagtgatcttgttgggaattgatttcatccactactttctaaaggtcacgtaaagaaaatgattattgatataacgttaaatagttaaggtcttttttttttcttaatccagctaagtacttcaatattattttattttatacaaataatataatttaaattaaataggtatatgacaaaatgaattagtatttagaaaattgaatttaatttaattagtcaagatgtaacatttttaaaagggtacgaaattcgatagtatatttaactatttaagtttgtatatatgacatttcatatttctgttgttagtgatattgttacttgtattaagaattcattgttgttcagtcctaatctggtcatagtccatgttcctcgtgagcttaataaaattgctcatgtgtgtgctagggcgggtctaagattaaacaatgagtatatttggaatggttctttaccttcctttgtaacctgattcctttgtatttgcttgttttaataaaagttcaggtttctaaaaaaaaaaaaaaagtttgtatatatgacatttagatgttacatgaaattaaatttaaatttcaaatactaaaattgcttaccttatctttcaaaaccaatttaaagaaaagattaaaatctaaagaaaaataaaaaagaaagaaaataagatatttttatctggttaggacgataataggtgttagttcgggagttaatattgtattacaaaaaatcttttttcatgtctaacaaaaatagcggtagacatgaattatattttggagagttttcatgtttgacattgttagacattaaaaaaaaatcatcatgtacaacaatattggacatgaaaaattataaggaatgtgataagttagaaattctaattaaaaaagtttactaagatttttggaaactgaataaacagattcaaaaataaataaaatcgtaattaaataataatagacaagtaatttttacgtagttcgagcgttaatgatccctatgttagacttttatatgtatgaaatgaaaatatgtatgtgtatataaaaatacggaataaacgaatatctgcactgtataacttaaggatcgaaatacctccagccattgattctttgagcttcaatcccaacaagctttgatctgcaaa

SEQ ID NO: 28168 - DNA, 3940 bp, Cannabis sativa
  modified_base (3875)..(3878): a, c, t, g, unknown or other
ttcaaagagagagataattaaatcaaaaaataaaaaaaatatacttttttcaacatgaaatgtatcacattaattttaaaaaacatatttattttaaaaactaattaacttataattttttgaataaaaacaatgcttttttggtccttttattttttttttaattacaccatgaatgctattttttactataaacaaaaataaaattatatctaaacaaaatatttacaacatctaaatatataacattaatttcaagaaaatattatttaaaatttaattaattttttagttttacattaataaatatgtaatattttagcataacaattttacaggcagactattataattaatgatattgtgtgtgatacccataattctatagaagagacaggtggcacaaccagaaagtaatcaccatttcaaaataggcctaagttggatccagaacgggcccaatcccaacaaaaattcaaaacttcatctatgggacatgccactctcccaaaattcgaaagcctccatagccttcaaggacacggaaggactgaagacctcttaatgaagataagggcctacctgaaggcaggatgcaaaggatgacattcgaaagcctaccacaaatcaggagtcggatgtctaccgcagggtgaatatcggatgtctactgcatgatgaaagttagacgtctaccctagaacgatgtgtcctcctctctaacacaagatcagattttttctcatgcgtcaaactatagtaatgcatgtaccaccaatacccctttttgtttgacgactccacttacacctttgtctgtccggcgtgatctccgtgcaacatgtgccttataccaagcgttctgctcatcaatacagaactatcgccccacgagcctaacattcttagtgggcctcatagtcatgtatattgtttatttttctcctatagtgggctaacttttaagaaaaatccaaatggatcacgggtatgcctagatccaaattctagcctatataaacctcgctatcccttcatgcaaagggacgagatttttagcacaagctctgctagttttattctaagctttattcttctacaagaaatacctagagaaaccatcttagagtgcgggttagggccccatatagtagagttcatttgtaacatgcttcaaagcctgaaaggccaatacactgactcgtgaactagggataattaacgctcgaactacgtaaaagtcctccatcttattcacttaatctctatttaattttctaaagctcttatttagttagtttccaaaaatcttgacaaatatttcggtactttcattgagagttgaaggaagcttaaaaccacagtacacttgtagcagtggtagaaaaaactcctcaagcagatgttgatatcatcatgggtgatgtaaatccactccctcaagggcacgcccagctgagtcatgcgagggatggggaggcttccaaagctggcgacataatagatgagcccacccagtgtaaggaacaatttatcaacaagaaccctcacggtgaagaagaggaggaagaaaatgatggagaaatcaaagacagctactacaaggatgaatactattacgaacaggacccagaccttctttgagtgtccaatgagttacataaaactcagaaaaagctatccagcgagaagagttttctcaaaaatggagaaaatgatgactcgcctttgggcttgttagggtttatcccatgaaaagcttgtaaagatatttctggttattaataaaaattgaacattgtgatatatgcattaatgttaaattattaatatttattaaataatttttatgtatataaatatcaaaaaaaatccttattcatacatgagcatgtgacttgtagttgtacaaagaatgaagatcacctagccatgaataaaacattcaacaacatattaaagtttaagaatctttaatcaatggttgttagtgcagtttagtgatgcccgttattcggtgcaagcaatctcaatttagattactaatatagcatgacatctaagtgaaggtgttgtatataatagataatatatattgcaaggatcgatatgaataaagtagtctttatcaaacttaccaattactataaagacctaattcatatcataaagattatcaacaatagatcgacctaaatcttaagtaattatgaactcatgttcatgttattagtttctttgattcactcattaaagtttctcagagaagaagtttcttacaacttttatttttggaatctaataatgtagatggctgggaacatgatctagtgttctacaattatggactcctaactgttatacctgaaatttgactacttaccagaagctgacacatgtattacaaaaggaatgaatcagctgaatgattataatatttaattgcattattaaatgcggcttaaataactcatttcaattaattatagttgacaaaaatattcgaactcgctgccacataagcatatgcgagataagaataatattaacaaatgtaattaacgagacaatatgtcaatcttgggataaacagagtatatactaaaagtatacaagaccatatatgaaggagcttgcatctcattgacccacatacttaggagtaagagcttgcaacttattgacccacatatttgtacatggagaaaataactacattcatccatctcgccctctacgcgacggaatagacacctcgctagtatcattataatacaaagagcacggtgaggagaagcatatctgtactaagttgttttttctatatagatggtgtagaaggacaactcacatttagcaagaaacaacattcatagtcagcataactgtttaaggataaagacaaaagagcggtcgagtagttattaaccattattccatgtgcataaaaatgaaacatgagaaatgtctacatttcatgagcagttgtaaattattagatcccaataaaaataactgtcatcctatacatctataaataagcgcagaatccaaggaaaaagggacgacaaacttgagagaaaaactgtattttacatttattaagagaattgtactatgtatccagataatcatccctaataagaaggactcgtggagtatgtagattttaactaaaaaatcacataaaaatatttggtgttcatttattattctcatcaattccatagtatatttattacgtaaaaggcttgtatatttagttagcagaaatttgcgcaaatattttggtacttttaagggtgttcattggatcaaatccaatgtttttaggcctttccagatccgatccaatcatatattagatgttggattttacaatctgatccgatccaattaatttccatcattcaatcgatccaacatccattggatgttggattggatcgtttctatcgattggatgtatttcatatatatatatttatttatttattttgggtttatccaatattttagacctagtattttttggatcaaatcagatccatccaatattttaggtccagtatgtattggattgaactggatccatctaattcaagaaaaaaagaataaaattttaatgttaattttcatatatacatatagatttgacatataataatataaaatctaattactcatccaaactaaaagaaaatactatttagttcgattgcatgttggatgtattggatttttagacaccccatccaccatccgatctgatcctattggatatttaaaaataacatctaatctgatccgatcacaattagatatccaatgtttggcggcaggttgcaattggatcggtcggttctcattggatnnnntcgatttatgcacacccctaggtgctttcattgagagccttagtgataaaaactcagaaaaa

SEQ ID NO: 28169 - DNA, 3156 bp, Cannabis sativa
tttttttttatcttaagaagtttccttattttatgccaactgcttttatctttaactagcttctaaattaatccctgttttaattcaagagcacacagaaagaaaaaaaattaaagtgtacttaaagatataataaaaataaaaattaataataattaattataacattaaaaggagtgttaaaaattaaaatgaaaaacagacacatcaaagtggaattcatagtgtacaaatgattctctcttttgttatgttttgttttacatcacttattttaatctttctaattaataataataccaattatttaaatttattttaagtgtcttgtactattacacaatttataaaaattttatatttatatatatttgcatttgcaatgttaatatatttgcatgcatttggacttaggtataaacttaattaattgtttctttttggaactatatctaataaaaaaaactttgttgataaactactcctatatatatacatattcaatgtaatattaataatttaattttagcaaaccctattatgacactatatacatatgtattatgcaatggatttgtccttttttgaaaaaaaaaaaacaaataataataattaaattatgttaatataattatatattaatcttataaatataaaagtgaataaaatacatacccaaataaaattaactcatagacacacttgttgtggtgtgagcccccagtaaaaaaaattattagaaaaattaaatatatttttttaattaaattattatacaacaaaatagtagaaaaatctctaataataataataaaaaaattaaaaaaaaaataaacataaatatttttttataacaattaaactgtcactttatatgtaaatatgtgatcattcaataacattttaaactaaaatttatagtgatgaaattagataaaaaaatataattttattaatattagatatttatattattaaaaaaaatattaaatttatactgtttacaaaattaaaattttaagtatttatattatttattttatatatacaacaatatatatattgatgtgtgtatatatatatatatgcttaattatattatacataacatggtgaatatgtaattaatgtacaaaatgaattaagtaggcaaccagcaaaacctttgcccttttggaagaagataagagtaaattaataacattatcctaagctctttgaaaattaagttaattatacttaattgcttaattatatattaatgagtaacatcatgacttccaccaccacaacaactaaaccttaatatttttttaaaacaaaaaaaaaaaaaaaatacaacaatgagtgcactttttggttattattatgattaaattaatgtatgatcaccacttagttaattaagtcatgattattcataaactaatttaattaactaattaatcaattaaattaattaattatgtgtgggccaagccagccggaatttgagaagcacttttagttaggtgaagaaaaaataaagaacatggcaaaagtgcaaaaatattaaccaataaggttttgccaagtgtataaatttcctttttagtggtgaggtgaggaccactactagaaatactaaaaagagatttagtataattatgttttatatagattatcagtaattatttacaaggcgctaacgacactagtagtgtttaatattattggaaaatatcatatcattattagtgtaattaaatatcaaaatttcacatattataagttaataatattataggaaactactaatcactcatgtataattggcaacagattttatgatgtttgacaccttaaaatgctgagttaggtcgtaggcaccagtagtatcttttggacctttggactaagtaagccttatgcacaggcctgacccacatatgtctagtgtcgggcttggtgatatgatatttcgggtagtgctaggcacccatattagcacattatagcatttctctaaattgccctaataacaattcactaattaatcaaaataattatgtaagcattaataaattattaatctcattataattattgaaataagtagattaacccctccattaatttttcttttataggcataaacacatgtacggttcaagtatacatagagtcaaattagctgagggttttttgttcaaatttaaggtgtttttattggtcaagtttattctctttttagattattattattattaattaattaattattgtcttaggataagttagtttactttccacaaaaataaaaaaataaaaacaatctcaatttatttattaaaatatcacataatgcaatcctagccacaacaactccattaattaacaacacaaagtgtttaggcacttaattgtttcttttcattgactttttcttattaattaaatgtgttttaactaataaaaccaatatagaaaatgaaccataattatgtcaattttgtttttgttttttttttttaaaaaaaaaaaattacttaaacaactatttttagtaaaaattaattttatatttttacatttattttgtttttacatttttacaattgtctataaagatacaagaaaacaacaagattatctcaagaaagtaacaaaaaaacaacatcaaaacaataacaaaataataaaagtataatataaaaatacattaaaaattatattttatgtaaataaaatcttaaatatagtaaatatatttaaaattttatgtataactatatgttattatttttatatttgtttgaaataattctattttttggcaaataattaaaaatttaaacagcacatataattattaaacctaactcgaaaaataacacacatacttttttgttgctgcatgtggttgaaaaaagaggttattattattattccaaaaatgataggcatggaattgggacgttatataaaagaaggagaatttggtaatttactttgggaagcccaaaaccacattctcctttttatatagttatagatatattatattatatgatgtgtatatatatctctatatatttatatagtatatattatttggataaatttatttatatagaataaatatagggaaatttgattttctatgcttagaaaatc

SEQ ID NO: 28170 - DNA, 1236 bp, Cannabis sativa
atcaagagtgttattgcaatttttttctatgacccagtatattattttagggtcaactatgctaaaagcacgtgtcgaaatattctctttcacaacggtgttcttatagttacaacatatcatctctataattttttttttttaaaaaatcatatagttgatggtgttgaaaatatgtttgaaattttttctaacacgtgtagctagtagactagaatatcaattttttaaaaatttaccaaaataatattgtacttatatataacgaaaattattatgaaaaagaatatagagacatataattttgagcgtaggaattaacttagagattgtaagtaagttatttaatattcctctaacaattagttttaaataaacatatttaatatagggaaagaagagttgatttttatttttgaaatgtagaaattaagtagagttgattgaaagaaaagggaaatggttttagattttgttttatcttttcgatataaagaatagaaaagccgccgattagatctaggacaggcaaagaaacaattctcctttttcttttttttttttttttttggataaattaacggaacaatattaattaagatcataattatgattaatttgtttcattttattacgcgagctttcagattagcattatgtaccacgtggatcttggtttcaagttaattataaagtctacacaccaacttgcgcagtggacttttttgtaataaaaaaaataatagataaataaaggggatttttatttgcactgcataaaattataaatacactttattattaaaaaaaatataaacttaaataagtattaaaaattactcttgatatttttttttaaatttttttctcacattattttatgttaatttcaatacttatattgattttattttcataattttttctaattcatgtatatatattttttatttttttttaagaaaatttcatataattttttattttaattttttggtcataatatttaaaatataatttaattttattttatagttatattttttatgaatatgaattggaagaaaaaatttaagaataaattatataaaaaactaactgcggtgcataagttataaataataaataagtgctcttccataattgcagtaccgtatcaaataggcaataagttcactgttcattcatacatactagaaaagaaatatattttatatttatgtaatatgcatacta

SEQ ID NO: 28171 - DNA, 4244 bp, Cannabis sativa
taagctctgttccagtttggatccatttgaatgggttaggattgcagtattggggaaagaaaaatctgagtgctttggttagtactttaggcaaaccgattatgatcgataaagttacgcaggatcgaactatggtgaaatttcctcgggtccttgtggatatagagatatctgatgatcctcctaaaactatctcttacataaatgaaaagaagcaattggtggaacaaggggtagaatatgagtgtctgccttcgagatgttcagcatgtgccaacttgggtcacattgttgctaactgcaacagagagaaaaagtttgtttggaagagaaaaccggaagcagagataggggcaaagaaggagcaggaaaaagaagtttgtgtaaatggggaagatgctggattgacagttaataaagaagaaaatggcagtggtatgattcctgtggttaaggagaatgctaggacgagaggacaagacaaatctcaagctagcaaagaatgggttacgcctaagagaaaggcagtgaggcaaatggagggcaaggaggtaaatgataatataaaaggtactaagtcaataaatggatttgctgctctgcaggtggcaattgaagatgagattaaggcacttgacccactttcttttactgattgaagtcaataattttatgggttggaacgtgcggggcatgaataaaatggaaaagcaatctgctattcttgatatttgtaggttaaataaaattggttttggagctttgtttgaaaccaaggttaaacatgagaaggttcaaggtatgatgatggagaactttcccaattggaattttcattctagtggagttacttctgggagaattcttcttatttggcaagacaagtttgttcaggtgaaggttttagaagagacaaattagctggtgcattgttcaataaaattcagtggtcagaacaagagttttacaatcacggcagtttatgggagcaatgacatggaggttcgcaaggagctttgggacaagcttgcaaggtttgggaatttgattgaaccttggatcattattggtgattttaacgctatgtttagttaccaagatagaagtggagggaggcctattcggaataaggatattttggacgctcaagcttggcttgccttgggtcaagttgaggaattcaaatgttcgggatcgttttttacttggacgaataagcatgaggtgggagacaggatctattctaagctagatagagttttcatgaacaacatctggctaaatgaattcccaaatgctgaggcttgttataaatgggaggtaatatcggatcactgctattgcattattaggtgtcaggtgcaaaataaggttggactcaaaccctttcgttttgggattcactggccttcttaccctgggtacaagcaacttgtgatggattgttggaacaaagaagtagcaggaaatggtcttgataagataatgagaaagctttttcggtttaagcatgctttaaaagcttttcacaaagctgaagtgggagatgtagggaaggattacaaggaggctaaggaaaccttttgcatcattcaagaggaagcagccaaatttccaaatgatgtgattttacagcagtcggttaaggaaaagcaaaggttatttttgacagcaaaggacagaatgtcgttggctgttagacaacaaagtaaggtgaactgggtcaagtttagtgatgaaaattccagctattttcacgctataatgaggaaaagaagactagaaaatagaataaccactttcatgaaaggggatgaaattatagatgactatgaggaagtggtgaatcatttcattaaacactttgagaatttcatggggagtaaaagctcagtgatcaacatcatagatgaagagagtgtgaagcaaggtaactgcctgaatttggagcaacaaggtaaattgatcaggtctttcaataaagaggatgtaaagaaagccttcttcagcatacacccctaaaaaagtctagggctagacggatttggatcgggtttttacaaagatctttggagccaaattggtgatgaagtctccttggctgtgttgaagttttttgctaatggccggttgcctaatatattaaatgaaactgtcatttccttaattcccaaggtggataacccttcgtcaggaaaggattatagaccaatagcctgctgcaacactatctacaaatgcatctcaaaaatgatttgctccagattgtctgaagtgttgccttccattgttagtaataatcaaggtgcgttcatcaaaaacaaactgttggctcataacataatgattttccaggatctcttgaagggctatacaaggaagaatatttctgccagatgcattatgaaaattgatctcagtaaagcttatgacacggtcgactggaattttgtggaagatttacttaggatgctctgctttccatctcgatttatcaactggattatgacttgcttgaaaggtgctagttatcatctgcttcttaatggaagaatccaaggctcctttagagggaagaaaggcctccgtcaaggtgacccgatgtccctgttactctttgtcctagttatggaatacctcactaggttgctgagctactactctagtaaaaagggtttcaggtttcaccccttatgcaagcatcttcgtttgaccaatctgtgttttgcggatgatcttgtcatcttctgcaagggaaatatcaactcggtgaggttaatctttgaagctttctctaagttttgtaatgatacaggtctgtctgctaactcctctaagtcccaaatttactttggaggagtgcgggaagatataaaagctgtgattcttaatatagtgaagatagaggaaggaaggtttccgctgaagtacctttgtgtccaacttagaccgactaaatggaaggcttctgattgttggatcattcttgacaaattgaacagaaatctgaattgttgggcgagtagaaatctgccttttgctggaagggcgcagttgattcactcggtgttgcttggaattagaaattattggatgagcatattcatcattccttccaaaataacagcagccattgacaaaagttgtcgtgactttctttggggatgatcggggaataagagcaaactccaccgagcttcttgggaaaaggcgtgcctccctaaaaagcttggaggagttggttttcgggaaggaaaaaaaatggaacaaggctttgttggctaagtacctgtgggcgttttctaagaaggaggattgcttatgggtcaaatggattaactcaatctatttgaaagattcaagcatatggggttatgcaaagaaggatgatgcaagttggtacttcaagaagattttgagtataagagagtacttggatgaggctaaacttcaacaagctgctaggggagataaattcagcatcaaaaattgctataattctcttgtggaaaaaactctgtttgcctatgcaagtgcaatttgggatactcttgtgatcccgaaacatagattcatattctggtagattgcaaactctcaattgcttactcgggattatcttcatcgcataatggttaccccaaacaatctttgtcctgtttgtgaaactgaagtggaaacacatgatcatattttttttcaactgctattacacttctcaggtttttgtagcagtcaacaggtggctgggggacttccattggcctcgttcgactgttgagatgcttcagtattgctgcaacgcaaccagagatctgacaaagcgcattttaaatgcggtcatggctgctgtgttttattttttgtggaagaacagaaataagtgtgtgtttgatctaagttgtatggtccctagtaaattgagtttggaagtgagaaagtgcagttgagaattgtttgtaagggcccttttaaggagtgtgagagaaacgattatttaattaaggttgtaaacagttggtaagtagtttttgggctgttgctggtttcctgttgcagcagccgtggtgtgttcgggctggctttgagccttgtttgtttttggcagttttttgaataaaaagttcctttagttccaaaaaaaaaaaaaaaaaaacttttacaccattcttcaagttcttcatgaacttcccacttcttttagctttaccaagacatcctaaacacttatagtaaaatatgga

SEQ ID NO: 28172 - DNA, 1322 bp, Cannabis sativa
aaaaaaaaaataaagaacataaagtacaatgcttagagaatgtcatatgacttatgttgtaatttcttttatatatatttattatatttataaataaataaattattattataaaaagaatatagactcttgtgtattcttttatataaatatatatatatttatagatatagaatatcaaaacccatcttagacatcatggcacaaaggaaagaccattccacccgattgtacgctttactaaaatcaagcttcaaagccataaaaccatctctcccagcttgatttcacttcaggtagtgcaagacttcaaacgctatcataacattgaccgtgattaatcggccaggaataaaagcactttggttcaaggacaccacttaatcaaggagatgcttcataagattagtcataactgtcgtaatgatcttagagagaacattacaaagagatatagaccttaaatcactcgtgcggtcaggatatttcttcttggggattaacaccacattagtatcattaaggtccattggcatcacctgagtgcgaaagaattgttgtaccatgaacactacatcatgaccaacaatatgctaatatttttgatagaaatctaaattcataccatcaggacctgggaatttatcaggatacatttgaaaaagcgccaccttaacttcactttcagtaaccggccttagaagctcttcattttgactattcgaaacagacgtaaccacacaatctaatacatcttcccaatccgacaaacccaccataaaaagctcctcaaaatactttatcataacattagcaagaccagtgtcccaagagaccatattaccgttatcatcacgcaaactagtaatttgattatttcttcttcgcttactagaagtggcatggaagtacttactgtaaaaactcattcattgaataaaaatttacaattttaatattctagttgttctaatttctttgctccatttgtcattttgctaagcaaagaaaattacctttttttgttcaatcataatattgtcaaatcctattttgatatggttcatatagacatttggggtccctattatgttctaactgttgagagttttagatattttattactattgtggatgattattctagatatacttggattcatctttttaaagataaatctaattcttagaatgttataccaacttttatccaacttatcaaaacccaatacaatgataatattaaaagaattcaatttgataatggcaaagaactataattccctaaattgtgcacttctcttggcatcatacatcaccat

SEQ ID NO: 28173 - DNA, 1048 bp, Cannabis sativa
aaaccattagtcagtttacaaattatttttttaaattggacgggttgcacttaaattttaacagcctgaactttagattgggttagaaaatatacaggataaaccacccaaatcgaccgatgtacaaccttagtttggactattgcacaaagtcctattttctagaacctttttttttttttttgaaagaaaatgcttatttttttctatcatacatacatacataaaaatgtataattaaaagtttatgaacgtatttttttttttttaaaaaaaaaaaatagttatgaaattgtagttttattgtacattattttttggagactttattatttcctatttttttttatttataaagggtttaattttaaacttttgcacaaagtccttaaaaaatttaggccaacccgagggaggtatgatgcttgaggtggtggctcgagatcatgtagggaaggtgttgtggttgtgggatggtactaagcaattattttttgctaatgctcttagtagggaagttgcatcttgtttgttgatattagaatttgttgcagattaaagcgtacaatgtgattctgatatagtgtttaaagatgacatatatgggattgaacccaaagtgagaaattgataattatgtagttaattgtaaaaattgtatgaactcttttataagatgtaatttttcgaaggtttccaatttttttgtttttttaattttgttcttgataatttggttaaaaattacaatatgtggtatataattgagacttccttgttaccaacagataacattggtttgaggcctaatttgttttcatccatacaattacgtttcatattttttaaaacggaataaaaaatctaatgaatatttatgcttaatcaaccaaatatttatgtgatattaaatatatttttcaatattcttagaaaaaaaaacataaataaataaataatgcactcttttttggaaagaaacaacatataattgtttttgttcatttattgtattcttacacatgcatgtgcaacatgtttttggctt

SEQ ID NO: 28174 - DNA, 2768 bp, Cannabis sativa
gcggtagcattcgcgagccagcattttgtcacctcgcactactgccacacctgtcggtgtctgaaacttcaaggataagtgcttaattgaatggattgcccctagaccaattaacgttggtcgacccaacaatatcttgtaggctgatagcaggttgacaataagaaattcttgcgtaatattggtggataaaggtgcttcgcccacggttaatgggagctcaattattccttgactggcgacactgttacctgtaaatccacatagatttaccatacaaggttttaatttagctttttccagccccattttcttcagtgtatccctataaaggatattcactgaacttttgttacccactagcatcctttttacccttttgttggcgagctagatggtaattaccagtgggtcgacgtgaggatacttcaggtgttttgcatcttcctccaagaacataatcagaggttcttcaatcttagctgttttagaaggttctggagcaaaagcagattgctcgttcttaacttcttttacatatcgcttttgggcattgttactttccacagtaatatgtggtcctcctgagataaccagaatatcctcttctttgagaggagaaggttgtaatctttggttgcctaggttattaggcggattaggctagttttgtccatcgccttgtcgcttcacatattgcctgaagtgaccccgcacgataagactttctttctcgtctttcaactgacgacattcctctgtcgtatgcccaatgtccttgtgatacttacaaaacttggttgcatctctcttatgtcttgcatgcctcatgggctcaggtttacggaaagcgaccctgtgctcatgtccgagatagatattttttcgagtttcattaagcttagtttaaatagtgtatattggcacgtacttttcgtgcttcttttgtttcttcttatccttggccgattccttgaagtcatctttcctttcagagcctcttagattatcagccttcgtcgagacggtacttgtcgagatagtgctaggtttacttcccgagccattctttaacaatttcatctcttttcttgcttcctctttttgaaaaaacacctgagctctttcattgaactcactaatgttcttcactagacgaccttgcaagtcatcccatagctcgcctccagcagttgagagatcattcgtgatccctacttgaagggtagtgagctggatactgtcgttcaaatttcttactctcgcagtagctatactgaaacaactcaagtatgccttaagtgtctcgcctggctgctgctttatgtttgtaagagaagacgcttcgggtcacctatcccttgctgcctggaactgtttcttgaagtccttagacaactgttcccaagaggtgattgaatgatgtgtaaatttgttgaaatagctgcttgctgccccaactagcaaggtagggaataaaatacaccgtacactatttgcaacattgctggcttgcatgatagtgttaaaattattcaagtgcgcgactggatctgtagtcccatcgtatgatgagacatgagggttcttgaatccctaggggaatttagcactcatcatatttgggtggaaaggctcggactcctcgttcgagtcgtaaccaggaagtttcccaaattcccatcttggtacctcctaaacttgtcttctaactcgttgattcgtaattggatatgatcctcttgcttttgatagagttgttgacaaaggtcaggttttctctagttcaattgattacggagatccgaatgttatggatcatagttactcacatacctcgtccttgagtaactttctgctctacttgtgcccttactttctcgatcagtactacggcgagttctatctcctcctcacgtagattcactatgagttcttgtaggtctagaactggaacttgcctcgtcatgtactagccttctcttctaagaacaggttgatacatgccccttgctggggtttgtatgtgctctttccctatcagtgcgagaaggacgttgatgatgtctcgggggcaacccacatgtcctaggttgagtctcaagatctctctcattgtcacgagggatttcttgttccctagcttgaggttgcctcctactcgcaatcctgcaagaagatttcgataaatcacggtttccattcccctgggttgtgcgtctctggggtcttcgaggctcttcttaacgatgagcgtggtcatctggttgctcatcatcacgagcatcctcagtctccctaggttgttcttcctgagcgttttgagggtccccctaagttgtctcctgcctcctggtttaggtgtcgcgatgtctgcctcatggcctcctcacctcaggatcaggttggttttgagcattattctcctgagatgccctggctgtcgcttcctcctattccaactcaacatttcgtcagtttgcctcctccaactgtcgcttgagttggcgattttccaactcaactaacggaacatacctattagggtcatacgaacccccacctctaggagtgccaccgccgtcattgttgggaacttcattcccagtttttgggttttggccaccttcaggttggcttctctttgaacgtgtcaatcgtgtagatcgagtttttcgtgagttgggaggcctttgtgagcccaccgactcttttccagggcggtgagttatttcttcaggatgagtattgtcattttccctgttgtc

SEQ ID NO: 28175 - DNA, 3791 bp, Cannabis sativa
  modified_base (1032)..(1043): a, c, t, g, unknown or other
aaaaaaaaaaaaaaagctacacaacttatttaatggcagaaagtgggtgacccttttaaaaacatttttcctttttcactcgatctagccaccttgtggaatgcatttaaccctttctttctttctttcatctccaaatatctctacataaattaattcaattaatgcatctttttgtacggccacagttgatttcaacttttttttttaagaccttatatatatatatattagtgtattaatggaaaaaagttggaattgcagctcaatgaaacaaaaacatatatatggtaaaagagtgagatgtagtcgaaattggagttcaaattctatgattgtcattaattgtgtcatgccacttacaaacacatggagcgcattttgggcacactttactatttttgccttaatgacactgtaatcccacgaattggtgttttcaaaaaaaggcaagaaaaaaaaaatattaactccagaattttgattattatctggctacctagtacatataaataattatgtaattttttttttggtaaaatattgtatgcatttcatcatttgaaaactagctatacacgaattatagataaaaaaaattaaatcatttgtttcataaattattattccttatacatgcctatatatgcagggatggtttaattattttgtagtaattttgggtttattattacaaatatttttaaaagcacctacgtacgtaatatataatataataaactaattactgtaagtgttttgagaagagtactatttggggctaaattctctatgattaatcgacttttacttaattttctaagttaaaatttttgtggtactctaaattattgaactaatatcaaattaatttaaggtgacatttatttttcacagttaattaccaacatggattgctaatgtatatatactttgtacatatgacacgtttatattggtatacctaatattattatttaaaaattataaaaaaaaatcaaaatttataatattttttatttttataatttnnnnnnnnnnnnaaatgaattttaaaataataatattaagtgtattaatataaatatgtcacgtgtacaagagtgtacacataaacagtttaaagtggcagttaaccagataataccttaaatttgctaacaatttagtagtttggaatgttttaccgctaaaatttgaacttaaaaaattaaatacaagtgaaacgatacttgagaaggtttaaccataaagaactcttacaaaaatacagtagcgcataaccttacttagttagctctttggtaccgctatggttcgggggattacccaaatttgtgtgagtcttcgtaactcctttttagcagatatgcctatcaatgataatctcattttatttttaaaaaaatacataatataaactaaaattatcaaaggaataataattaaggacaagcaaaacaaacagagaaagttattagtcaaagaactaactacctttattaaaaatagacataaatatatatcttatattggatgtgtaaaatctatcaatacgttaaatataaattatatatgtgtttgtgcgtgtgtgatgagatttatataagtgggtggtttaacaaagtgtacagatattgaagaatattactactaaaggttagtgtttatagtgattggtgatggaactaggcgctttgaaactgaatcatattataataaatctatatctgaatttaattaatcaatcatataatttccgtaacatatagttttaaaatggtcaaaataatactaagactttcttttcgttatactcttagaagatattatagaaaacaaaagaaatatatttacaaattagccaattagttagctagagatataatatataggctatgtaataggcatgtggaaatctgttaattaatcacgtgcgctaaggcactcgacgtgcatggtgtggtgtgcatgtagatatatggtagtgagcgcacgtgaggtctctagcggcccaaatatttttcattacatgtcttattggtttgggtttaattaaacaggtggtcctcagcccaattttatgtcctactattggactagctagagtctctctctcattctctctctctctctctctccccttttagagggtaactttgagaagagcatgcattgcataatgcatatggatgtggatgacgtaggaaattaaactaatttcatcacctgggaataactttggtaccccatattggacaatagaacgagacaaaaacaatcaaattacttcgagaatatatatgttgtgagtttgtgttggactttggggtaaattctaattaatgtgttacttaatttagtaaatcttaattgtaagcatatattgaagattgtaatttgtttgtttaggctcggaagtggcttttccactcaatcaaatcattaaaaaaactacaacatcaatttcattttttttcttagcgcaactttttcttcatcaacaaattagtaacgcacttgttcaaaaaaagaaaaaaaaaattagtcacacacgtgacaaaactcttaatttattaatataaataacaaattagggttaagagtgcatgacaacaagaaaatgcaaatcactgaagaaattaaagtaaatttagctgatcttgaattattattagtcttttgatcactgtccaatcaatcataatctatctctctcctctctcacggagataaagtaattaaacaaaaaaggaaacttagaagtgggccattaaaagctgagcccagtgaaaacagaaggatcaaattaataaaccatattttagaatattgctattggatattagtggtaactagtacttttaaaatgtgttattttgtgattagctaacgatatttcttaaaaattattacattaaactatataaaattcgagacttaattgaatcaatagcgataataatacgtaaaaagatattaggcacaattaataccttttagcatttctaactaaggttaattatctgttaaggaaagggaatgcgtcagcttattagggtccactacactaataaggattttttttttttttaacttaagtggtaagcctgttgggattgataacaaacatactcattagggtaacaataccattctcagctttgttacaaccaaatgtgaacttattcttcttacctctctctctttttctttatttctttttctctattccactctttgagaaccaagttgtctctctttagtactttggaaaactttttatataaatatatatatatatattgcaccatttatatgtacaactatacatatttttacaactttttgaaactctaagctttctttcgtatataaataaatatatttctataatatgggttttatattggctttttggaatgctctttaagtaatggtacacttctttattagcaaatatatcgctcttgctcttttgttaatgtgtatatcaaactttatacattatatatttgcattctttataacacttggcgtatattacttttaatttagttggaatattttctttttctcccctaatcatttttctttgattcttaatttcctttcttttttctctgatctgcttttttttctttgtaaattattttgtgccctgaattcgggaaactaattaaatttatacaaacagtttctaataatattcatatgatgtgatatctaatattttcagaaaaacaattgcgtacgctttaattattcagaattacaatattattcatata

SEQ ID NO: 28176 - DNA, 2729 bp, Cannabis sativa
cactcatggtttctaacaccacccccaaacaaaggggtgattcttttgtcccgagttttccaaggagaaaccaaaaacgagtgtgtgagagactttttgttaagcagtatggtacttgatctgaggagggtatgaaacgaatgtcaagttctttcttcattatcttgtcatgaacaaagtgtatatcaatctcaatgtactttgttctagcgtgataggtaggattggaagctagtgcattagcactctcattatcacaccaaatgacaggaacacttggtaacttgactttcaattctgtaagcagtgactgaacctaggttattccagcagaaacatgagccaatgctctatattgtgactccgtacttaaccgtgagacaactgcttgcttttttgatgaccaagcaatcagtgtatttccaaggtacacacaataaccatcaacaaatcttttatcatcagggcaacatgcccaatctacattagaatacccttcaagtgacagtctttcactgtgtcgaatgtgcagcctatgatgaagagtttcctataaataatctttttgctccactccagtgacttgtagtgggagtttgaagaaactaactcaatttgttcacagcaaaggcaatatcaggccttcggtgacacaaatactgaagagctgctatcagacttctgtaggcagagggattggttagccactctccatcatttttcaacaaagatttgcccgaaaccattggtgttgggtatgatttcaggtttaccatgtcatatttcttcaacaagtcggtgatatattttgcctgagttaggtacattcctgttttatctcgatgcacttttatgctaaggaagaagtggagctatccaaggtctttcagagcaaaaattttgttcagttcttggacaaacttgttcaattttgtagggttattattagtcacaataatgtcatctacataaattagaacaagcatgaccactttaactgttgagtaaatgaacagggaactgttagctttagaatttttgaacttccaatcattgagggtgtgcttcaatctatcaaaccaggcacgagatgcctgtttcaatccgtacagtgacttgttcagcttgcagacatgatctgacttgtctttatcttcaaaacctggtggctataccatataaacatcttcttctaattttccattaaggaaagcattgttgatatctaattgtttgacttcccaatttctagatacaacaaggattaagaaaatttgaattgtggttgacttgattactggactataagtctcaccaaagttaatactaggcctctaatgaaacccttttctaataagcttagccttgaaccttttaagagttccatcattccattcttttgattcaagtgcttcttcaatacagcttggttcagccagatttggattccattttgcttgaccaaggtagacttttggtttaaaaatgccagccttggcacgagtcaccgtgggatgagttggtactagctgttgtggtgttggttctttagcctcttgctcttgtatttcatgttcaatattaggtacatctaaagtgtcaagataatcagtgtgtgtgctgctaatatcaacatgttcactaacctcaagtgtgttattggttggtgttgcttcaagggaactttgtgagtgagaaattgtaccaacaagaagtggatcaacaggaggtgaagtgtttgtgttggcagcaccaaagaagtgcatgtttggcaactgtgaccattgtgaattgtgaataacagtttgttgttcatgggcataggtgtttaggaagccatgtttgaaggaaaatcctttttattgaatacaacattcctagagatgtacactcttcctgtggaacttaagcacttgtagtctttgtgtgactcactgtagccaaggttcacacactttagtgagtggaattagaacttgtgtgtttgataaggtcttatgcaaggaaagcaagttgcacttaacacttttaagaagaaataatttaattttgtgttaagcaacacttcaaagggagatttttggtttaaaacagatgtatgtaacctgttaattaagtacacaactgttttaaaggcatcaacccaatacctaagtggcatgtaagccttagccaagagcgttaatcccatctcaattatatgtctatgtttcctctcagctctaccattttgagtgtaggtgtgaggacaagggtgagtgaaattgatgccatgttctagggtaatgtcactgaaatattggtactcacctccccaatctatcctaatggttttgatggttctttcaaatcaattttcaataagtgctttaaagtgtgaggcagtaagtgcatccaatttggatttaagagtatatatccaaacatatctgctaaagtcatcaataaaatggatataaaatctatagtttgtattggatattacaggagctggaccccaaatttctgtatgcaccaggttaagcactttagaagcacaatttgatgagttcttgaaaggaagagcatgagatttcccatattgataggcatcacagaaatgaaagttttcattgattgatggattaatattaacaatttctaagacttgtttcaacaccttactagaagggtgtccaagtcttctatgccacatattactaacagaaactaattgctcattaacaaca

SEQ ID NO: 28177 - DNA, 3400 bp, Cannabis sativa
tatgacttaaataaatctacatttttttgataaaaaatatactgaagtctgttcctgtaaaatttagttttctttaatatatttttttaatatctatatgaattttttaataaaaaataaataattttttaaatcgtttaattagttttaaaattttaatttattttttaattttcttaatcattcaaaatgattttttcttaagatctaaatttattttttaagatttactaaaaaaaatattgaaatatttcttatttttattttgagtgagtacaatcaatttgatagtgtcaaagtttaggagacaaagttactaatttacaaagatatgtcatcatttaaatagaataatgggagagaatctaacggaatgactaaatttctgtaaatgtaaaagttcaggggaattcttaataagtcgtatattttacagggcaaaatcagtattgtcaaaagtttatggggcaaaattactaattattctgttatatataaagaaaaaaaataatgaataaatgaaaagttagtttcagtgtgatctataatgtcccaccaaatttcatagggtattgtaaacaaatagatcttacaaaaatacccatgtttatttacaatttttatatttttactgtcatattttttttttttacatttttattataccaagttttcaaaaataatgtattaaaactttaaaattacaaaaatgttatgtttcaataaaataaaaaaaaaaacaaatttagaagaactttacaaacaactataaacaacaaaaagacaactacaaaacaacagaaaaatataaacattgacctaattgtattatacaaaacaacatcaacccctcaccatgtttttgtattataatatttttttacttaatattgacaatttgatttatctttttgtattactacattatttttttttcttcatgaaattcgttgttacaacttactttcaatattttttatctctctcttccttttcgagttagtgacaattaaaatgacaatttatattttaaaagtttaataaatagttacattaataatagaaataaataaaatcttatgattttaaaatagagtatataatataatgagtaatatataattaatatgtcaatatctactattgtacattgtatcaatttttttttttaaaaaattatcattgtatttataaaaaaaaaatgtgtcaaaaaataaactaaatgtatatatgtatctacgtctaaaaagtaacacacatacaacaaaaaaaattatcaggactaaactaaaaatatacaccataaaaaatattgtgaaaactacttaaaagcaactaaaaatgacataaaaataataaaacaacacatacatacaataaaaaaaaattatttggaattaactaaaaatatatatactacacataaactaacaaacaactgtaaaaaaaaaaaacaaataaaaacattaaaaaataactttagcacaattatagaacaccaaataacaacataaaaataactataaaatgacaaaaataaagctataaatcaacaaaaaaataacaagaaatcaaccttctttaaatatgtaatccttcataaatcaactatgaataaactacaaaatatctaaaaaaaaatattactttttgttatacccatattttgagtagtaatatggtgttgacacgtgtaacatagctggaatacgaaccaactcaaattatgcatcaataaatgcattcagatgactcgcctcaagaaatatagttgatagaaatactcgaactcaccatcttgtagataatggtgagacacgagtactaacttctgattgatgaaaccagcgagacgaataaagaaagtcaatctcaagataaacagaatacattacagaattatttggaatgtgtagatatataatgagtttgtagctcattgacccacatacacgtgagtatgttgaaagaataaagacaacaacttcaacatgattcatctcgcttttgtcacgctgtaatagatgtctcacatataccttactaaatattaatagaagaactcgaggaatactacaacattgtaatgaccacttagctttaatatgagaattagtagataattaaggtttaatttagaattagacttttaattattaattatgtaattatggagatatattttaattctaggtgtgctaattaggttctatgtaaaatattatgatttttatattttatgtcatgtaacagaggaatgcgacgtatggcctatatagtcactttattgtagtttagtattttaaaaatatcaggacgatttagttagacatttagaatgtcaagaatgtttgcagtttgtgttcggaccatattgcccctagattctaagttacttcttaaggaagtaaaagggcaatttagtcattttattatttatttatctttaagtgttttgagggaatttgtagtaagtgaggtatcattagtctagggttatgctgaatggaaattaaggttgttatttacattttcctcaaaaattcaaaatcaaacaaaaaaaaaaaaaatagaaactctttctctttctctcgcttaggtcggctaccacctagagccattgaggcttgagtatttcagccaatttcacagtaattcagagggtttcttctagggaaattcataagaatcgaagctcaaggtaaggtagttctcttctccttctttgagtttttctattttaggttaggttagaatgcaattttgttagttttagttgctgtgttgattaattttgtttgaatgttgattttgctgttacttttgagttattcaagttgattatgggctatttaagtagttttatttagcctagacaaagtttcagcttttaagctcaaactttctcctttaatgccgaattctatttcagaggttattatttggttttattacttaaattatgtttgttgtggcctaattaggtggtctgaaaggtttgaatccatttgggataaaattgaatttttggtgaggttttttaggattcctacagagaaccgattaaccaattcgggctagccctatagaactgattagttgtttccccaagcagaaccctaagaaccgattttccattttgggagtttggtttaccggttctagcagttttagaatcctagtttttttatgttttagcaatacttagggtattgtcatattatccatcgataggaaaacttttagttttgacagaaaaatgatttagcgtgtcacttatcagctttatgaatgttgtgactaaggggcctctaaactgccacaacattcacttatcagcgtgtcacttatcaggttgaccggcacacatgaattaggatcgaggtaagattagtataat

SEQ ID NO: 28178 - DNA, 1415 bp, Cannabis sativa
aataaggcaaaatatcggggcgttacatcattgattgaaatttaactcatgctattttttgtgctaaatttaacataattttttagcatgagtcaaatttaacacatatgttacactatcattggagtttacttttctcaaaatgtttaaaaaaatggcaatatactatttttatagtactctattgaagatgcttttatgatttaaagtccgaaaatataagagcatctctaatggagggcaataaaatgtgttttgctatattctagccatttgaaaaaaaaaattgaagctctaatagtagtgtaaaatatatgttaaatttagtacatagtaaaaatttgacacaaaatataatatggccaaatgttattttttttatttactcatttgttactaattaaaagctttttgatattttatttattcattaaaatattttttttttttatattttgaataaaaattaatgagtacatatgttatctttagagcttataacactgaaaagagtattatgcactaacaatacattttaatatttctcatataatatatatagcaagaaaagagaaacaattatcaatgaataaagagaaagtagtacagttgagggttgagaatgaaatggaaagtagttgagaggaaattaaaaggtgatgattatcaaaattgtatgttgaattttccaatcaatatttaatgtaaagggtttttcaaagttgataatgaggtgggctagctttcttatttttgactaattaaactccttttccttaccaaaactttaactagaataacaataatataaaataaagacagctactatttaattttctttataatcatatataatgaaggtatagagaactctataaattatgcctgtaaacctttttgaagttgcataagtttttgaactattttaaataatggagataacttaaccaccttgtaatagctgtgttaaatttatattattgacttttgataataaagattagtgaattgctaaaatgtattattaggtatactcttttttttttttggtgtcatatcgctattagtgagtctcatataacgtaaaaaaaatagcttttaaagaatatcgctaaacaaccgtaaggtaacacttatagaaagtgttaggcaccactagtgtccaatagcaatactctaaagattaagagtggcaattgtgtgtttacggatcgtgttcgtgtcatgttaagactcgtgtattgcatgtacgtacagacttcacccgaacatgacctttttaatagttgtgtcacaaaataaaattcaaacaccacctctttataaattaaatagtcaacatgaccgatccatgtagcctgtgtataaatagataatatttaaatacgtcaacctattaatctattaatgatcta

SEQ ID NO: 28179 - DNA, 1846 bp, Cannabis sativa
  modified_base (1802)..(1808): a, c, t, g, unknown or other
ctctctctctctctctaaaaaaatggaattttcaaaggtgagaatcattattttttcattgttctccatctcgcgcgcccaactctatcttttttttttcttttgttcgagttctctctctctctctctctctctaattttttttcaggcagtggtggtggtctggtgggatggtggtggttcgatgtgcttttggtggtacgatgggttgctgtggtggcgatatttattgttgttattgttgtggcggtccgaagggttgtgacggtctgaaatttaaatttatatatattttttatttttttattcttttacttcggttcataactaaaacaaaaaaactaatttgtgtaagtgtttactatttgcttcggttatgaactgaagcaaaaatcttttagcgtttgttattaagtgaaacaaaaaataaaactatttgcatttacggttatagcatcagttacacagactgctacaaattctttatatgtcacttaaaattgaagcaaaataccatttttgtagtagtggcattaccagtagcaacacaacttatctcctaaaacgttcaggtatctttttgctgttcacgatgcaaaacgaaacttgaaacttctgagcatgatcttttttcctgcgttggtttgactccgctatgtggtagcagttggggtggtcgatgctttgtcgaggtgtagatggatcaatgcatgatattctcatttttctctttgataagctatctcgggaggcttttgctatactgatgacaactctttggtggctttaatatgatcgaaactcagtcacatgcaatctcgattagatgttattccagaatttgccaattatcacctagtggagtttagggaatacggtagacagggccttcatttggggttgggccttgcacactcacttgtaaatcgacctaatcgatgaattccaccaccgcctgagtcctttgatcttgcgactgatgttttgatggtaccaggcaggggttttgtcggtttggtgggagtgatacaagatgctacaggtgtggtttaggcggcatggttatctggtgtgttaggtgatttctctgttaatgtggcagagttgcttgccattcagttgggtttgtctcttgcgcatcaacatggtttctgtatctccattattaatagtgattttacagtggcaattagttgaattaataagcttcacatgaattttagtcttctacctattttatttgatgtctattctttattagttgatgttggtggtggttcttgcatcgttgttccgcgttcggcgaatggtgttgcccacacactgtcaatctctattaccagtttagaaaattatgtttcgacggatgcttgtccatgatttttgagtttttctgtaataacggatttagttcaatgaattatgtcttttttttttttcaaaaaataaaataaaatgctctcatattaattcaaagagttaccctacaatagacattaaaaaaggtaatagttagttcctctaggcgatactcatttggtatttggtatttaccgaaatattatattttacaaacttataagtattcacaactataatataatatctaataatctcttatatttaccattcagtttcccatttttctgaaaaaaattaaaaaatcttctttttttctctttcgtttttgtacttcttcgaacaccattttctttgtctaactctattcctcgcacgaggcacttactggaaaagtagtttctctccgccacacagctccagattgttgggttttatgcccnnnnnnnaactcatttcaatattatcagatttacttattaatata

SEQ ID NO: 28180 - DNA, 990 bp, Cannabis sativa
tctctctctagagtcatggctcgcaacaaggtaatcgatacaaattcatcttctcagattaatactgtttctttcttctttcgtcgcttgttttttttttttgttttaatttttttctcttcaagtaaatttctggtatcattttcgttaatacttgtgtaagctaggtagacagcaatcgagactagcttgttaataatttttcatatcattctcgctcgagtcaactactacttactctgctttgctttgctagggctttctgtaaatttcattttgtattttgtgtttattaggaaacactgcttttgttgatcgatgttggcccatcaatgcacaatgctttgcctgagattgaaaaagtttgcttttccttgattcaaaagaaggtaacttttttttttttttgggtggggttgaacaagtgctatggttatataacatttttttagtttgtttttgcagctcattttcaccaagtatgatgaagttggagttatcttgttcggaacccaaggtttgaatcatcccaaaccttttttcaatcaaataacaaattagtctgtgatatttattgttgtgtattagaatgattatatgctttttgtcggtacttttttaaataaaagaattcactgattacggatgttggtactctcagatacaaataatgaattgacaaatgaagtgggtggatatgaacatgtggtcgttttaagaaaaattggagtggtggatgtggatcttcttgaaactttacagccactccctagaggaactcactctggagattgtatcctctgaactactattcttttttttttcttttttatcttttgtgggggagttgcttaacaaaatactaggaatttatttctgaagccatgcactgaaacctgcttgtataaatttgtatgtgaatatcattaccagcgggaaattcttacttacagctggtcgacttacaattgcttgcgttttcaatttatt

SEQ ID NO: 28181 - DNA, 1723 bp, Cannabis sativa
gcttgattgaatctttttaattacattgatttagttttctatttttttagccatatttttgtataaataggagttcaccccatcaaaataaaatactgagaaaaatctcgttcactctcccattatgttcttctttttgttttctctcttctcttatttcttcctctattctatattattttataacacaatataaatagaaaactaaatcgcgcttcgtgcggtgtaatccaatttttgtaatctttttatttatatatttttttatacttattcagtgatatatctaaaatattatattttgatgtgtgcactacaaacaaagtaatactattaaaattagacacataattttttatttttaagatatataaaaagatagtgattttgtggcaaatattaaaaattatggaactaaaaaagaaattgcatgtgtttttctaataaaacaaatgaaaaaaaagaataaataaaatgagcttgtgattgatgatgtagttatttttaaaaggctatttagattttttttttttttttgctttaatagaaagaaacaatttaactaatattatgaaattttttacattttattttggtggtgtcagtggaatgtcctctccccaaaagtgaatttagcatgacaactgtaaaagagagcatcacaacattatctgtttttaaaactgaaaaatgagaaatcaatattaaaatgttactaatagaatattttatatgaaatattcaattaaaatgattaattttaataaattatgtaaaatatgaaatttatatcttaaatataatgatgaaaacagagttatgatccgtatgtttaattattccataatgaaatctttgtttgtcttactattttgcaacaactaaaatgataagtatcatatgaagttggttgtgtgattggaggatctttaaaatcataccatgcctcgcgcgattattattatcaatgaaaaaaaataaaataatttaatatttatatatttttttttaattttcagaaattcatgtattaagtaattgttaatatttttattaaataagtaaaatattataaatcatgatcatttgctattttttaactattttaaatttactttaattttatttatttattcttataattattattagatattattatcaattactgtaaataaattgataacatattcattaatttaattacatttagaatctattctatcattatttatatattattattgtatataattgaacgtttttaccgtaattttttatcaatattgctaagtttattaatcactcacataaaaataaataatactaaagatatataatctttaattttaacattcacaatagtatcacataaaaaagatatatatataatatattttaattgtttaatataattaataattgtaaaaatatttttaaataaaaattctaagaaaatatattttataagtgaagattaaatagactttatttatacacccaaaatagttttctaaaacatatattatcaaacttattatttttttcttagtgttttacacaaaaattataactaattaagcaagattagattaaataataaaaatattttatttaactaccatatatgaaggtttaaaaaactaattttattataaataaaaatgaatattaataaatttacttatattatatagtgtagagtaatttgcggcataacctc

SEQ ID NO: 28182 - DNA, 1340 bp, Cannabis sativa
acaaatctcctaaaatgcactcttggagtcagtgccaaactccaattttctatttccatatctaaaaatagactcacaattacatatttactgtccttcacaccctttacaaattactaataagcccttacactatttcatagtgtaacactacacaacatatgaagggtaaaagtgccaaaagttatgcccagctctttacagttttaacagtatttgtctatcaaaatcatgaaaaccaatttacttaaccgaataaattcaaacttctcctaaaccaaatgccggattactcatacaattatcatgtttgtacataattaaaatggaaaacccaacttttttctgaacctacacgcattcacatgcataacacgaagtcacaaaatgagttaccatcaaatttgtcattctgagcaaccaccattggcgagccttcaagctgtacaaaccaaaagacgataataaagtatatcacaatcattcattcattcaaaataataacaataataatgataataacaaattaacaacagaccttgcaagacaggagcttaatggagcaccctttaggctgttcttctactctaacaagcagaacggggcaaacctcaaaggaaaagaatttgattctatacacataacacctgaaagtgttgtcatcaactctttctattctctcagcatctaaaaccgagtactggctcgccggtaaactcatatactcacctgaagcaagtaattatttatatatatatcaaaattagaaactctaaaatgcaaaaaaccgtacctagtaaacaaaatcggaaactaatatgctattctaacattacttagtggccgtttgagctgctgaaccggaacggactcggtccgtcgagcgccgaaacgggctctgggtttcgaattggccgaaacacgaagcgaagaagacctcgaggatttggaagaagataaacccaataagacatggttaaagctgagagaactcctagggtttctgcgcgggtacgaaatgggcccgagttttacagaggtggaagaagaagaagatgatgatgtggcgcgtagtgccatccaaagcttctggaaatatttttttttctccctttttgatttcagaaagaaaaaataaaataaaataatgaaaaagattgtgtttgaaaatgtgagaggtagagaatgctagttagtcctgtgtggcgtattttagattcacatacttctattttgctaaggtgtacgtggcagtagttccatattccaagtggttttaataatggaaaaattggagactgtaggattgcgtgtaggtttaaatgagttaaaaaggtggc

SEQ ID NO: 28183 - DNA, 1085 bp, Cannabis sativa
aaaaaaatattggattagatcggatgcccacctctagctggtcaggctaaagacttttcaattttaaatagtgggatgcttcagtacatggatcaggttcgtgttccaactagtggcgggattagaaaggaaatcttagatgaagcccatacctctccttactcgttacatccaggtacaaccaaaatgtatcaagatttgaaaacctattatcggtggcatgttatgaaaaagaatgtgatagattatgtatcccagtgtttaacatgttagtagataaatgttgaacatcagagacatgcacatttgttgcagcttaattttgaccctttcagagtggaagggggaaaacatcactgtggatttgtggttagagtacctagaaccatagtattatatgattcaatttgggtaatagtaaatcatttcactgaatcaacactttataccggtgaaaacaacctatacaataaatcagtataagctatcacacattattattgtcaggctatctaacaattattatatagcatcttttacttatgtagatttaatcacactaaattaacatttatacaatattatcaatagcatctttacattaatttattttacactagttcaacatgaatatatgattgttatatttttaatttagatcactttgggttcttttaataaaccgtaaaaaagtcgtattgtatttaaataataaatattattatgtctaaataaaataatatattatattaattattatgaccaaaaattttaatacaatataaattgtattatttgatacataacaaatagtccgtattagcttgtattataatatttataaaggatccagtgtcaactccaatctccgacccggatccaaggacccagaccagacacgaactcgaaccccagaccccaaactgacctagactgaatccaggaattggacccaggactcagactcagacccgagacctagacaagtcctggacccagacccagaccggactcagaccgcacccaagacccagacgcggacctcggacctagacgagtcttggaccctagaatcagacccaaac

SEQ ID NO: 28184 - DNA, 2909 bp, Cannabis sativa
ataaaaaaaaaaaattatgtgtatatttgcagtcgtaactaaaaaaattattttttgtttttaaaaattaaaagttatttttcgaaaataattaaacgtgtttggctttaattttttaaaatagttattaaaaattaaaatacaaaaatacaaaaattttcaaaacaatatttattttctcttttaaaaaataatttactttttagtcaatattttttctcaaatttatcttacatcattatactcaatattctgtcatattattttttttctccttcttctttcttatcattttctctcttattattttctctcccttcgctttctctctaattattttctcatgttattttctctcttcattttctcacattatttttacacattattttgtctctcatcatttttctctcattactttctctatcattattttctctctcattatcttctctctcatcactttcgctctcctcatttttcaattcgggttcggactgtggccgaggtcgagtcgaaggtgagggtccaggactagggtctagattcaggtcttgatccagggtcggggccaaggataaggtttggggttcgggacaggtacgggtccgggtcaagggcttaggccaaggatagggttcggggttcggggcttgcatcggggcttgcgtcgcggtgtgggtccagggctgggggtcgaggccaattctgggtcttggaacgggtttgggtctggggtctaggtctaggacaggttcatgtctggggtcggggacaaggtttggggtatgggttggcaccggggtttaggtctagatctgagtctgaatttgggatatgttttggtttgagttcgggtccgtcatttggggcgggtccaagtctagggccagggtctgtgtctcagtctgggtcgaggaagtgttttgaaaacttcaaaatctattttttactaaaacacttgtttgaaagaaagaaaaatagaaaacaatatgtttggtctagctcaccgtaaaataaaagagtattattagcaatttacaagttctcttctatagcatcacttgttgttaattgagttttgcaataagtgcaaagtgcattaaagggccagctttgtggacccctcaacctgaccacccttgtctcatttcccactgccccatgtcccttagaacatggaggaaattatggcagttttccctgttctcataaccttataaaagatctctctttctctcttctaatctccctctctctctctctctctctttcatgacaacactaagcacttcctagttcttgaagcaacataaattagccatcaaaaccatacaccaagtgagaaaagaaaaaccataacaagaagttgaacaaaagaaagaaaaaaaagaaaagatgagatgagtagtagtagtacaaaagaaaacccactttgcataaccatcattgcaatcaaattcaactaggaaaaaagtagccatataatatatccaatatattagtactactacttatactactacttggtaagttgagcagtgtttgtttctttcacatcatcgaatcttttattatatcagaataaaaaaaacagagactagtagagatcaaattacaaaagggaagagcaaaatggatattgagttggctaagtgtgagtgctgtggattgaaagaagattgtacccaagactatatcacagatgtgaagtctaaattcgatggaaaatggctatgtgggttatgctcagaagctgttcgagatgaggttagcagaggaaaaagtagtcttccttttggtatggaagaagctgtgaaagctcacatgtctttttgtcgtaagttcaaatcaaaccccgccgttcgagtggccgatgggatgagacagatgcttaggagaagatcaggtgatttgtctcatcatcatcatcctcatcttctaattcatcttcttccaagaaatactcaagatcaacaaccacatcattgtattaattagcagctaattggggggttctcatatatacataagtaccctctaattaatttcaggttacaaataatatttatcatcatagtttaactgcttgttggcctatcatggtttaataagtctctttctctctccctctctttcccttcatctctctcttctcatctttttgttcatgtgtacaggacttttatataaattgaagatttggttcttttagttttgattatatttaagccttttattcatatcttgaatttgtcaagtgcaaaaattcatcagtctactctacatatgcttcttatgtttcttaaaataataagaaagatttaccataccccattcattcctatattattttccttctttggaatcatccaaatcatgagtactataggaaagcaatcaagagaactgttttctgtgtctttgtttttcacttcatttcctttttccacttctcatacagaaaatctaagacacacatgtttgggaaattctaaccatgtaaattaaaaattcttattttaaagtcaataaaaagaaaaccttttcagcctggtttgaaaaaaagaaggtaaaatgattgggtttggaatgtaatgtaacaaaaaaaaaagaaaaaagaaacatgtaacaattatttttcttggtgtgtaagatatttttctcagccagtctaaatttttttggcttattaaaaacaacaaaatgaagaacatatctagtccaattctataaataaataaatgcagtattattacaagtcaacctcccactttcactacaaaggcaattaattactagttctactatgaataatatttgtaccataaacggctcaattattcaacctaatgtatgacttttctcccccaccatagtctcagtggttggaagaaataaatatttac

SEQ ID NO: 28185 - DNA, 2127 bp, Cannabis sativa
ttatagaattttccaaaaatatattaattggtaataaataaaattaaattgactaattggcagtgaagatggtgaagtgatcgactgtgtcgatatatacaaacaacctgcatttgatcatccgcttctcaagaaccacaccatacaggttttcacttttctcacttatatatatcataccattaacatgtatttttgtcaatatatataatattatcatgtattttcatgagtttttgttaaaatctaaaaactcatgtgacatgattgtgcatacatatacataactatatatgtgtgtctacttttacataacagcccagttcaattcaaataaatcaagtaaaaagtgaaaacgatgatgcactaaaagagttacaaggatggcgaagaagggagaatgcccaaagggaacagttcccatacttattaggacaccaaaatatggtccaaaaccacattttaataaatctcgttatatacccacacagactaataatgagaccctcgcttttgcaagtgatggtcatgaggtacaattattaaattaattatgtctattgtgttttaaaattaagtatatattttacgacatatttatatatatatgtatgttgatcaaattaaaaaaaaaaattcattgggtgtggttttcgtgcatttatgtcttcttatatagtatgctgaagcaattgtgtctggtggtccatactatggtgctaaagcaaaaatcaacgtatggactccagtatcacacggaacaatcagtgttgctcaaatttgggttatctcatctacaaaagtatttgaccaacttaatactgtagaagctggttggattgtatgttcttcgatccatactaataaatatactgtttaatttcaccttttttttttatggcccctgcagccaaatattaaattaactttaagacatataactttttgaaattcacaggttcgtccaaatgacacaaaaacacaattcttcatttattggacagtaagttttagatttctctctcttttctctcctattctctctgtatacctattgcattaatttatattatataatactttcgatttttacgatcagagtgatggctatagaagcacaggttgctataatcttgaatgccctggttttatacaagtaagcaggagtttggctttaggtagtgtattaaatcctatttccacctacaatgggcgacagaccattatagatgttgtcttagaccaggtatatatgatcatatgtgaaaaacttaattataacatataacattataagaataataattgatcaatgtatgtttatgtaatgtagcacacagagagtggacaatggtgggtgcaatttcaaaatgagccaattggttattggcccaactcaatattcacaacattagggaatggtggggaaactgtgagttggggtggagaaatttataacgacgtggcgaatggtcatcacacggaaactcagatgggaagtggtcattttgctaatgaagggtttggtagagcaagctattttagtaatatacagtacatggataattccaaactttacaaggatcccgacaaacttggcattctggtcaccaaaccttcatgctacgattttcaacttggacaagacaaatctattggtagaggaacttattttttctttggtggtcctggttattctgacaaatgtccaacttgatcaattttttttaacatatgtagatataataagctcgtgatcttcatgagctgttaatggtatatatgataattcatcatataatctgctatgttttgagctttaatgtacttctcttctcatttaaaattttgtgatatttttccaagcaaatttctgatgttaaaaataatgaaattgttcattacacgtaaccttttgctaggccagctagttacttttctaatttgaaagtaggaagtaggaacaacaataaaataaaaatcccctttgaaattggatcgctcatattaggctgcttaaatgggccttgtgtaatagaaaaggggtaagttgaaaaatatcacctttattaatcaattgatcaaatttacctttaattttatatttaattgaaacatacctctttt

SEQ ID NO: 28186 - DNA, 3002 bp, Cannabis sativa
ttttttttatttgtttgaaaagtaaataaactattacatacacacgtagaaaggagtgagttttggagttgtgaatgagccccctcatcatcttctccacccaattcacgtaatattaattattaaaatattacaaaaatgatttaaaaaattattaataatattttattttattatttttcttttttttcttcgaaaatacatgttatctgcgtttctagcattgaacacgtagtccaggtcagcatttaagacccgttagtgggaccctccttagtggtaaagcaggccaagcccacctggatatgtccttctgagaaccatcctagttccgtacttgcaaagtcttccgccttcgtctgaccgagcccggaagacacctccggtgccgcgggcctagagggacaaaatattgtgttcccaaagacccttccggtttccctatttattcttgtacatagataaggaaatgtcaactgtcagatcacgccataatgtcgtatcgtgattgaaaaggaaatttcccataacaagtgtggtgtagttatttctgaataatcatccaccattaacagatacggttttgactcaatcaaccaaattctaatctgtctagtcagcagatcgtgggctgaacctcatgaaaaagcccaaagaccttgtttaattgtaaacttcctagtagagggaaaaagagaaaatcctaatgtaatcctacaactactataaatactctatcaatctcatggattaggggttgaactctcaaacgtactttgctcaggcaaatgtacgaacatacatcttgtgtattccttaaacaattttcaagtaaacaacttattgaataaaattgactcgtggactaaggccaattaatgcctcagccacgtaaaaattgtttggttctttttgtaatttctttttttattattatttcttcagttcttggtatttttatttcgtttccaaaaatcttgggaaatatttttgtacttgcattgagagctgaggaaagcagtgagattttttgcaaattacgtctgagtaatcaaggttctcaccataacccaatttggccttcgttacactggtccaaatactagagctggaggttctagtgaccctcaagaggtgtttagtcgcgagcaaggccgtcaggacgaagaaaataatctagatgctcccgtcgtggaggttgcagaattaggagaaagtagtactaaggatgttgaagttaacatcgatgatgcgtcaaaggatattcatgaagacgacccttaggacaaagccgctgagaataatgttggatagaaaagccagtctgatgagtcagaccctgtggtcatcttggtgcgacaacttcaattaaatgaaaagaggttatctaaggaagatcaattcaacgagatattacttggcaatatgaccataatggaggctgtaatgaccgcgttaactcagacgactcctgacgtactggcccctccaacaaaaaatgcacctaagaaggctaatttgaggaaccctggaacttcaggtgcttataaagataagggtaaaggaatcgctaccgaggttccaaaaaagactccttccacgaatcagctcaagaagtctaaagttgttgaccaacctcaacagaagaggaaaggaaaccacgcttcacggcatggagaccaaaccaattctagaggcacggtcatgcagaaagacaaagcagacactggaacttagaagctggagactcaaagaaaaacaccctctctcaatgattcgaacaaccatgacaaggaggttgaagaattgcatccagtatcggatgacagtggtggaagtctttctataaacgacctcctaagaaaactggatgctaaaaaggaaaaggctaatgctaaaaaagcaagaccccatagaaacgatctgaggaatcacatcaacgatcacgtttgcagaagagaatccttgagtgataatactcaatgtcttgaacgtattgaagagttgatgaaaatcactaatgagatctctaggaaacaaagcggtgttgtatccgactctgaggaataagatacggagtcttgtgtgaaaagaatcattgatgcaccattactggagagttttaggatgccccagatggaattgtatgaaggacggacgaaccctagggaccatttttccaaataaaatcgcatcatgcaagtagcgaaggccaacaatgatgctaaatgtttgtgtttttcattaacattgagtaagtccgcagaggactggtggaagaggttgtctctgggatcaatcaacaacttgagagacctacaaatgatgtctaggaaacagtttatagcagtcaaagattatgatttggaatctagctccttgacgagcgtaaagcaacaacaacgagagagtctgaagaaattcatccaacgcatgatggatatggctgccaagacaaaggtcacggaagacatgaaaatggtggctctaacatcaagacttacaattggatccctactatggggagatcttcaacgtaaaagggcagacaccctaagtgaattcttaacaagagctcaaggattcatgaacctagaagacgcttatgcccaagcatatggagtactttccacaccttccaccaaagtaacaaacacctaagcttcatagatcatgtctctatctatttaccctccgccaactgctttcactactcccacggtatatggaccaagtatttccgtacagccagctgtacaggctagtttctccaggtttggggctgcacaaaccagatacagtgccgctcctagacaaacaaaccggaaagcggaagctccagcatctaatgtgacccactcgagaagtaagaggagtacgaagggaccaaatcgggagtgagtctacgaagaagggtaagacttaagaatcgaggtacaccaagtacacaagtctcatagatacttgggaaaatatataaaaggcaacctgtaacatggtac

SEQ ID NO: 28187 - DNA, 2704 bp, Cannabis sativa
aatcttagcaaccaagaaattcactatgtcagaaaatcaaggaacaataaaattctcacttaccccaaacaattcatcatcagaaaattaatcattgatttgcactgctttctcatatctcagtttctcccaccttcaatctagacaagtgatcaactactagatttttagtacctttcttgtcacgaatctctatgttaaactcttgaagcaaaaaaaacccatttgattaggtaaggattggcatccttctttaacatcaagtatttaataacatagtgatcaatatatatagacaatcactttgttaacaatcaagtatggtctgaacttatcacaagcaaatacaatggctagaaactctttttcattgtggcataactcagttgagcatcattaagagttttactagcatagtaaatagacatgaataccttatcagtcttctgccccacaattgtacccactacataatcattggcatcacacatcaacttaaaaggccagtcccaatttcgagctactacaataagagcaaaaataagattttcctttagaacattaaaagctttcaatcattattcctcattaaaattaaaggaaactccattcattagcaagttcaagagaggtttaaatactttttagaagttcttaatgaatcttctataaaacctagcatggctaagaaaacttctcgtacctttgactgaaaaatggtggtggaagattttcaatggtagaaattttagctctatctacttcaattcccttgcttgaaactttgtggccaagaacaatgccttatgtcaccataaaatggaatttttgccaattcagaacaagattagtctcttcataacgttgtaataccgcttctaaatttttcaagcacacatcaaaagaagaccaaaaaacaaaaaaatcatccatgaaaatctcaatagtcttctccaccatatcaaaaaattgagtcatcatacaacgctgaaatgtagcaggagcattacacaacccaaattaatgacattctttgaaaaggaaaagtaccatagggacaagtaaaaatggtcttctcttagtcttctagagcaatagaaatctgatggtacccacaatagccatctaaaaagcaataataactgtagcctgcaagtttgttaagcatctgatcgagaaaacgcaaaggaaattgatccttcctagtagccttgttgagcttgtagtaatcaatacacactctccatcccaaaaaagttattgttaggatgagttcgttatcttcatttttcaccattgtcataccatccttcttaggaatgacctgcactgggctcacccatgtactatcagagatcaaatcctccacattattatcaagccacttcaaagtttcttttcttataccacctctttcatggttggattcaactttctttgagcataaatataaggtttgttgtatggttctaggaggattttatgcattacaatagagtgactgatttccttaatatcaactagagtccatctaatagcaatcttataggatcttagcaccctcgacaatttctctagttcaaccagacaagtgagcaaaaaaaaaaaaaaaagaaatgtctcattatcacccaaataagcataccataaatgatctggcaaggtctttaattctaactcaggtggcttcttaatagaaggcaacgatctttcaagccattatcacaactcctcatatttcttcctatagtaaggaacttgaaagtcaaccttatttacatattccacgacttcaatgtcatcaagatcatcaacagaggataaaaaactagaggcttctaagatacaacattttcaaccacattagcaataaaacaatcatcatttcccttcaaataattgatggtcatgaaaatattaaagaccacttcttctccttgaacccgaagctccaactaacccttctaagcatcaatgagagcccgacttgtagctaagaatgatcttataagaattattggcacatcatcatcttcttccacatccagaacaataaagtcatcaaaaaaaaaaataattcatctacttttatcagaacatgtttaataatactccgtggatgcttgactggtttatatgctaactaaagagtaacacttattggcctcgcttcccccaaactaagtattctaaacacaaataaaagcatcataataatactcgcacccaaatcacataatgcatgtttacattcaaatttcccaattgtacaaggaatggtggatcatgaagcttttaaggtaattttctttgtgaaaattcactacatttttcaataagagccacagtttcataatcttcaatctttttttttcttggaaaaattttatttcatgaatttcacataactaggcatttgttctaaggctttagctaaagaaatgttgatgtgaaccttttttgaacacatctaataacttatatataaaactgtttatctagccaaatttttctaagcctatgaggatatgggatttgagaaggttgatctagtgccactggtagattcttttttgtaatttgaaagtctttaggaatcttcttatcaacttcaccaaaactttcaaccacataattcttctgactcttgtcctattgtatccctaactattctacttcttaccacttctcaaagtaattattt

SEQ ID NO: 28188 - DNA, 2134 bp, Cannabis sativa
gagaaattgataataaatgttatccgtcatcgactatctttgatgaatggtgtaaaatttgactaaaaaaaataagttaatgctatatttaggttaaattttataattgtgctaaaatgcattatgttgagtaattaaacacagccaaaaaagaggctcggacaggagtggaaattgtcgcccgtgatgataacaggttgtttatggagggtttcacgaaagtttacaatgagaaattggatccaagccttgtagaggccttaagcatgagagagggcttgagttggctcaagaataaaaactgacagtaagttcttgaaacggattgccttacggttgtacaagcaattcgtagtcatgtagaaatatatttttttttttggtattgtaattcgtgactgtagatgttagcttaagaagttgagaaatgtctcgttatgttttgtaaaacggtcaaccaatatggtagctcatagtcttgctagagcttccatttgttaccctgatcgtatgttcagtttgggagatgtcccaactgttgtgctacctcatttggtagctgaatttaaaggttaataaagttgattttcttttcaaaacaaaaaaaaaaaaaaaaatacagctaaaaaacgatagcaatgtattagtttcaaaaaccatagaataataaaagtttcttataacaaaaaaacacaagtaattgagcaaatgaacccttaacttttatgagattcagttagtagacattgtgtttatgatctactcctcgaaaaacaaccattatatgcttttaatcttcatttctcataatatgtaattacaaggcttgaattgcaatgcttcaacggtgattcaaacaaattttacaatctcatcctaagctaaacactagctcgaagaattctttatagaaatttagcgagagagggagagagagtttaatctgtcaacatctatttacatttgagccttggacaatgagcaatggtcatatgagccttagttgctgatgtggcataatatatttaaccgaatagagtggaaggatcttgaaccaacttccccaaatccaactttgatttaatatgcttatgcttgaaaagtaaaaaagcaatggttgcttctaccactaatagaaaaaaggattattatatcgatcaatgcatctagtcagagttatttaccggcacaaaagtcaactcttactattttgcttcagttggtaactgacacaaatatttgcgtcggttgtaactccgacactaaaacaaaaaatgatgttaaagatgaatttgtttaaaacaaattatagataggcatttagcgttatttagcatttgaagaacaagtggttagcttcaattgttaattgactctaaagtagttagtttctattgctaaccgatgctaaagacattttcttttactataaaataaaataatcatgagttatgagctttagaaaatttaaaaaaacctttatataaacctaacattaaaacctaaccctccgattgcccactattctttctctctcttcctctatatttatttatatacatttctctctcttcctctatatttatttatatacatttctctctctctctctcgatgagaccaccactttagatcccaacagccagccgcaccacttcgactctggacggacaaaacccaaagctccacccaagggcgaagccaagataaaattaggggggtcaataagtaacacttatcaaggaaatatttaaaaagattattttcactcataataaatccaaaactcgtttcttgcatataatttgttaagcactactgtaacacccgtatttgaaattactaaactcaaaagctaattccattatattataattaattaaccatataggtcgggatcccgagttacaaacacagttgaaaaccacacttgctattacaaaccccctaaacattttttttaaaagaaaaccaataacaggcaacaacaaaagtaactgaaaatattgaaagaccgaaaccctccaggttgcactgtcgcgatatgtacaatcactgccgagctccatcccactgctcctccagctgagctacccttacctacacaaggtagcaaactgatgagtcaacagac

SEQ ID NO: 28189 - DNA, 2085 bp, Cannabis sativa
ctgatatacacgagaatattacactttttgccttttcattaaggaaacttcatctctaacagtactaatattaatcctgcgggatttaaaattttgaatccaatgtaatctacgaattgtattggataggatcgtatagattgtactgaatttgattaaatattggatgatcacttctacaaaatatacgtgttgttgatttttttttttaaaagaagtataagtgttgtaaaagaaaaaaaataaaaaaatcataattgcgtatgctacacatgctttgtaaattaacacgcaagccctttcaatgctaataatgaataatgaggtcccataaataatggtgtgtttttgctacaaattagattaggtagtagtagttgtataataggtgttaatttcatgtatattattaattaatttgtggaaataacctataaatagtgaagatgggtctatccatttctaggcatcatatataacataaagatataatattcaataccattagcgagttggttagtggtatctgtggttgaatagatggattgtcttctattgtaacgatagcccgtgaagaaacttggtcacgggttggcattggttatgcatgttctgacaaatgttgcctcaagttgtggacctctctctctccactacccaccaaatcacatttatatacacactagaatgttttgcttccccattgaaattaccatcttctgagagcgctcaaatcagtttcttttattcaatcttataaaattgagaaatgataagtgtacccttttaagttgtcaactcctacaagaaataacaaactattattcatgcatttaaatatttaatctcacatatttgaatttaataaatcatattataaattactaattaatagtaaaatgatacatcaatataccttaaaatattaaataataatactatttaaaatatctcattaattttttttaattttattttctatatttacattacatcatcaacttctgtatattatataaaaattctttattttatgaatatactatttatttttaaaaactaaataaatatatataataatattacacatatattacaaaaataaattaagaaaattaatataatatttataacttaataaattattttcttcaactacatgtagtgcagtgtaggtaagcactgctttcaactaaatcttttagatataatagctatatttaatacgaacattttttatttcttagctaattaatttaactattaattattatagctacactattatgtgtgcatgagcctagttgggaggtcatataagttgccagtatgaaatttgttgggaattctttaaaactgcctccagtcttgtggtgccacgtggctcctgaggtgattctgatgtgtacactaggtataactatctatattattagatagacataatcctaattatctcctaaatatcattgagagaatagagatgcatattattatggagtatataaagtgttaggacaattgtcacctagcaattggagttagtttttttcttatgccttcggttgtattaattctactctaactttacacattgtataaatattattgttgtactctaagaagaatcctcttcttttttctacctttcctctactttactctttgttcatttcttctctttagattatggtaaaatatttgacatggtaacaaagcagttcccaccattgacagcaaatatggggaccacttctgatcttaatcctattcatatcacacttgaacgctgttacaattgcaagcaaaaaaatagaattggagtatttcaacaataacctttcggtgaaattattagacgatcacaacttcatgtaatggaagcatcaagttctagttgtaatcaggggcaataaactttagaaatacagcagagggaattcgcgaccacaatttatctcagatgcagatcgagcctcatgaatacattcttgcttttctagagtgggatgttcaggaccagcctcttgtttcctggcttctttcatcaatgttagagagcttactcatgaggatggtttggag

SEQ ID NO: 28190 - DNA, 1486 bp, Cannabis sativa
tgggctatatatatcattcaagcccatcttgtcttcgaaagaattgaattggttagaaaataatgatttagttagggtgtctgctagttgattctttgttgaaacatatagtgttttgaagatttcatgttgcaccttctcccttatcaagtgacaatctatttcgatatgcttggctctctcatgacaaacaacatttgcagctacatactgagccgacttgttgtcacaacagagtagcatagggtcttggtgttcaattttaagttcttttagaatagacaagagtcacaactcttcacatgttgtattggccatgactctatattgagcctctgctgagatctagaaacagtatgttgtttcttgcttctccatgaaatgattgaagaaccaatgaagatacaaaaccctgtagttgatcttcttatatcagggcaagctacccaaccagagtttgtgtaggcatgtatcctgacctttgtatcagctacaaagaacagtccttgtcctggattgtttttaacatactgaagtactctttgagcagcatttagatgagatacccgaggtgtagacaagaattggcttaatttgttaacagtgtaggaaatatcatgtctagtaattgtaagatactacaattttccagcaatctttctctataaagtggggtcagccaatttctcttttcatcttgtccaagtttcagattaccacctattagtgtactcgtaggtttgctgcctaaaaatccaagttctgcaatgcataaggtctttgagaggcaaagatcccttgtttgatctagcaacttctaagcctagaaaatacttgaactttccaaagtctttcaacttgaatctgacattcaatctgattttcaaggcttcaagttcttgcaagttgttgctagctagtatgacatcatccacatacaccaagaaagataaaacctccatcaaaatgcttgatgaatagagaataatctatagcagaatgatggaagccttgattagttagaacactagagaacttagcaaaccactgtcttgaagcttgctttagtccatatagtgatttttgtaactagcaaattgggtttggtggcaactcccccttaggtctatacccttgaggtagagacatatacacttcttcatttagatcaccatgtaggaaagcattgtttacatcgagctgatgtaaatgccaaggaatttcttactcgaaggttgctgcaagagtctaaggaaggtactttcaggtatcaccctctctgtaagagccttaatctgattagtctttgctttgcggatgatctaattttattttgcaaaggtactagtcaggttgtgaatcacttgaaggtttccttgaatgattttagtaagagcactggtttatccattaatcttactaaatctaatatctactttggaggggtagatgaagcaaccaaaaatgagataaccagaatgattga

SEQ ID NO: 28191 - DNA, 3692 bp, Cannabis sativa
aatcttctcatgttagtttattgattttattccttacacactattgtttgaatgtgttattattgaaattatttcttttcatgttgtcactaacaatatattaataacttttaatttttcaggataaagtaacaagtataggaaagtgaggaaaaaaagatagctcatgggaggaatattgtgcattttctttatttttgtaacttggaagatttatagtattaattatgtgttgatgtttgtatatataaaattatagtggtatgaatgtatatgaaaaatattttaattaccatttataaaaaatttcgttggagcaataaattttatttgctttcaaaaaaaaaactgtatatatatgtgaaatatacatattatataggcagtattaatatacatataatataggcagaatatgtatgtattaaaaaataagactttttatctcggtttttgtagaaaaagtgggataaaagggtatattttatcccagttttttcataaaaagtacaattttctcccacttttttcaaaaaatcaggataaaaggggtactttttattccatttttttaaataccttttatcccactagcatatatcccgatttttattttagcgaaaacggagataaaaagccttaaaaacttggattaaaggccttttcttggataaacttttgaacatgctcttaaaatctacgtccattcttggggagacaaaagtaaaaaaatcagtgagcaacagtgacattggatttgcaaatggagtagaaattaaaaaagtgggtttagaccagaccactattcgcaaagaataatgcttgccttcaaaaatctcttgtaagaatcgcctataacgactagaagtttcttcttggcttgatttaatcagatgatcttcaatcttggaattattcacttctaatttggactaaggttttgaatttttggatttgtatgggaataacagatgtttggtatattttggtgctataaattttggacgataaatttctgaaccagaatgggacatctccacggaagaaggacaatcccaatttctagatgaagtttaccaaactaggggtttctggaatatagctagcataaactatgccaaacaaaaaaattgtatatgaaccttagatgttgaaccaaatgaagtaatgaagcctaaggcagatcatcactcgagtaaaatcaatggaagaatgaggtacttactgtgtgaaattaaaaggcgggtttgaaaaaagtcacaagaagaatatcaaagatggaaatggaggaaaataggttcttaccattttatactttgagcccagtcacagtaaggtcacaagatggaagatctaacgactgggagtgagaagaagtggaaacggtgggtcattttgaaaaaagaggtcatgacaaaaatactctttataatcatttaaaaaatacttttttattaaaaagaactttttaacgggcaattgttatacccgaaattcaattgtcgttttaaaggaggacacgtgtcaaactggaaggaatacgaaccaacaaatgtaatgataattatatttgaaatgaaataactcattaatgtagaattgacagagtttttttacaacttactgaccgtaaggtcatatgagagataaagatataccaattgttgcctcgtacattaacgagaaactatacatcgttatatgtacaaggcgaggcatcaaccttattacgcattaggagatgagacatgataactggaaagacacttagtgtataatacatattatacaaactaagtataacaatcgggtaaatccaaacaacaaatagcgaggcacccatctcgctataggaaggcgcgcccatgataccttcaccaacaagctccagacacctttcagtggagttcgtggccccatcgagtcagagctctctcacatagaagttggcacgcaaatgatgttgactgctgaggtacaccatgtgacaaagaactgcaatttttagatggagcataatatcttcaagcgcaggaacgacgaggcttacattatcaacctcgaaaagacatgggaaaagctccagctcgctacaaaggttattgttgctgtattcccattgagacatctctaaacattacgatttacagcatatttaatacacatttatattgacccagtaaaagtggacccatcacagttgtgtgattttaaaatattaactacatttattttacatggtatgtaatcaaaccccaagatttcaggggataattgttgtaagttatcagtcaactataaaattaactgccttatgatgtaattataaataggagcaagttatactgaaaaaaggactaaataaaatcactagagaaaaggcctaagagctatatcagaaatctaataagattgactcatggactatgcaaaattttaacggcaaaaccacgtaaaaacctttgtgttcttatcttttctttttcgttcgtaatttctatgcaagtttatcactacttagactcaaatatagttaacaaaaatatgtgttaatagtaatgatttactttcatgtaatataaatataaaacgatgaatattgtttattatgttgatttggatgtgtacatattaatttatgtgttatttgatgaatgtatatgatttacgaaaattttccatgaaaacattctatttggattccttttgaaaatttaagcaacttttgtttttacggaactcaatttcgataaaaaatgagagagttatggtagtttgaatttttgggtccatagggtgtcatcgagtgacaccatgcgcgcgcaggtgcttggacaagaagacttgtacgtgcgctgagctcaaaaaattcttgtctgaaggctgggtgtaacgtgcatgccctgatagcatgttaattacaagctaagttatgcccacaagttgtccaagtagtggtcaagtggtggtgcatgttgaggtgcatgctggtggcatgttgattcttagtttgtacgacaatgggattttcataaatatcttcaatattgtccagattgggacgggacttggtattcgccatttatttgggtctacaaatacgatggtgcaatcggattggcgaaactatgtgatttggtatatggttcggccatatgtctacaaagccaaaaatcatgtatgttcctggtaaaagggcaaaagctcagattctctttaagggggtaccctggtgtcagctctccaccaccccctggcaccttggtgctaagtgagctactagtagttagaagggctagtaggacaaccatatgaggaccacgaggggactcatatgtctccatgagttggagtactcatggacattatcgggtcgacccggtagtgcatttaagaagctgacagaggttaacatgtacgttttttcggtatgccacttgcacaggatgtggcccaaacattccaagagagattgtggtgtgccttggccatgagtctcaacacgagatgacacgggtagtcattcatgggctagtttgtatacgcgcatgggacggatgcaccatgttggaaagggacagaggtctaatgaatgccactagtttggtggcttgtctcaagggcttgccaacatgcgtggaggcatggcgccttgaggattggtccatggacatatgggagtccttgggcga

SEQ ID NO: 28192 - DNA, 2964 bp, Cannabis sativa
acgaatgatttctttgggccatgtcaaagacaaattttgggttgattttcgctatgagaggcttcctgaatactgtatggaatgtggaataattggtcatccatataataagtgttctgtttttcttgagaaactggacaatggtgaagaaccggccttggaataccagccctttattaaaggttcgcctctgccaacttcttcttatgatcgctatcgaactgatttcgctaagggtgatgcttggcctttgctgacacgactagccaagaaaagtttcactgcggctgtccctcaacttcacctgcgtggtcacccacaaccaaggcccttatatgcaggagagtcatcgcatgctactgaacgtgatgatctgaattccaattctcctaccaaccgtatagtccaaactccagttgtgaaaccaccttccatttgctttcagccatctcttttgcataattctaccataccttgtcccacttcctctgtaagccttgatcgcagatcatatgtacctcacggccccccaacttcactgatctatcatctatttatataccaattactaccaatccttctccctgcaatgcctttgccacataccccctacatgccaataatagtcacttcaacacacttaccacttgtgtctaattccactacacatcccgccactgctgtcatgaatatttctgggaaggaaaactcaagcccaaatgttcaatctaaacgacagaatgaaagcctttctcttagacaaacactcaaaagatgtagagggaatattgttaatgatcacgaatcaaccttgtcagttgatgagaatgagcgccttcgagtttctactgatttcatggattcggttggtgatgaagacttttcagcggagactgttttgcagtcccgcaggcagccatgagaatcattagctggaatgctcgtggtttggggaaccagagagccattcgtaaacttagtttgcttgttaaagagcaaacccccactatactttttattatggaaactaaattagcttgtaactctattgctcgttttcgtagtcttttaaatttcaataatggtttagaagttcctagagttggtcttagtggtggtttgatgttactttggaaagatgatgtggatgtatctttaaacaattttaatgttaatgtctttgattgttacatggctttccacaatggaccttgctggcactttaccgctttttatggtgctccttctcttgctaaccgaagacacacttggactctacttaaacgtttgaaagacattgctccattacttccttggatggtaataggggattttaatgaaattctttatagtcataacaaacaaggggggcacttgagaagtgctaatcaaatggatgaatttcgttcggttttggattcatgtcaattgaatgaacaacaatttcatggggatcctttcacttggattaaaggaagacataatgtggacactataaaggagcgcttggattggtgttttaccaatgattcatggaattctcactttcaacccttagttacttctcatttggactattattcttcagatcacagagccattgctgtcaatgtccttgttattggctcaaaacagaacacttctccaaggaaaacacggttcagattcgaaaaaatgtggctgaaagatgaggaagctgccacaattattcggcgtaactggtctgctgatattgcaggaaatgttgctggttttttgaacaatttatcctcctgtactgaagctttacagtagtggcactctcagaaatttggccaaatgaagagagatatctctcacatgtagaaatctgttgcttctctaaataatgcagcagttcgatcgccatctcatgtctctcagctgaaaaattcagaggcgattcttgatgagttgcttgccaaagaagaggaatattggcatcaaaggtctagagtggattggttgcaatgtggtgatcaaaatacaaaattttttcatgctcatgcttcatctaggagggcaaaaaattctatcaaaacattaattactaatcatggagtctcagtcagtggcaaatcagatctgacccgagttatatgtaattactatgactctttatttgcttcggatggagtcagtttagatgctcttcacaccgtgctcgatgcaattcctgccaccatcaccccttcaatgaatctctctctcacccgacctttcacaagtgatgaggtagttgcagcattacattccatgagcccagataagagccctggaagtgatggaatgtcagcgatgttctatcaaaattattggagcatagttggtgattctgttacagaaattgttcttggaattctgaatgaaggtactgacatgtctcaacttaataagtccataatcactttaattcctaaagttcctaatcctactggtatgagtgattatagacctataagtttgtgtaatgtcatttataagctaatatccaagacaattgttctccgatttcaaaaagtattaccgtttgttatatcagagacgcaatcagcttttttatccaatagacttatcactgataacatactggttgcttttgagcttgttcatcatcttcggcataaaactcaaggaaaggttggttttgctgctctcaaattggatatgagcaaagcttttgatagagtcgaatggaagtacctggaagctgtaatgttgtaaatgggatttgcttctcaatgggttacacttatcatgaattgcattactaccagttccttttcattctcactcaatggagaagttgttggacatgttcaacctcatcgtggtttgcgacaaggtgatcccctctcaccttatttgttccttatatgctctgaaggactctcaaggctgttacactatgaagaagctattgggaatttggatggattacgctta

SEQ ID NO: 28193 - DNA, 2521 bp, Cannabis sativa
attaaatatgtaataaaaaaaaggagaaagtaatgataatagtggtagtgaacaaccggctcagtcgatgcgaggtggaagacgagggcccctgcgctcctccaacaatgcatcaactcttttcttcttttcccaaaagcgaggaagaactttttcaggcttgggatagaagtcaagcttaagattctggacattggtctgccaggccatgaagactccattgtcgaaacgcttattgcagtgctggcaggtaactagggtcaggagggcatctcttttcgccttagccgcctccttctgagcctgctccctgaaatcatgaagctccttcacctcaacggttaggttagttatcgtttgcaaatcagccttgtgcaactcttctagagattttagcttggcggtcagttcttgcactgcttccttggcatcccaaagctcacgccttgccttggtcacggcctcatccctggttttcagtgcatcgtcctttgcctatagctccttggccttggcctttagcgcctcctgatgactccgctacaaaagagcttccctctgctgggcctcctctcggatagcttttctctgcgccgccaagtcccttagactcttcatggcctcatccatgcccctgaacttggacatgatgtacccatggtcaatcagagtctttgagagacgacaagtctctacagaaatctggcaaaacaagaaaaatgtataagtatgtgaggccaagcaccaaaagacaaggccgaagatcactgacagaaacttaccgcggtcatagccgcactgatgtcctgaatctggtagattgaattcgtggaagcacaggccgcgtatctctttgccaaaagttgggtcagattggagacgaagtggcttgtcaactctgaggcaaaaggagcaagagtgggccagatgaagcagttgaaccagtctgtcagaggatccatgtttaaatcccaggcattcccagagtactcactgcgagagagagattgtcctgggcctcccttaggacctttttcaaggcctccacctccgagttccccttcatgtattctaccatagcatagttgtgcttggcaatccagagttgctttctttcctcgtcagcaggaatgggtgttaggacaatactactgggaggcacagtgtactcctccgcctcaggtgggatccccgagtcagagctgggaaccggagtgtcgactcttctgggattcttggtagcctcgaccgccaccatcatgcctttgtgtttccgatccagaggggtgagaatctcaccctcctcttcctcttcagcctccccgtcttcgtcaatcagaacaatctggcttaaggggaagctggaaaaaggattaccagaagtcacctccaagtcttgtgtttgaggctaggctgggtcgggactgtaagtctgggaaagagtagccaaaagctcgtccattggcctagctgcttcaagaaacaaacaaataagtgttagagcggtgacgggaaactgtgcaaacaagaacaaagtagtaaaattaatcctacccagaaaatctaattcaaccctagcaaagtcctgcactaaaatgctggcttcgtcatccccaagaaagttgtctgaggggagaaaccagctggaagatagataggctgaatgatccagcaggataggtgcgggaggcccggaccccatccgggaccggcctagaaaatgacctaagttggaaaaataaaaacccttggcatgatcgccccatcgagtaaggggcattctaaatctaaggagacgttcctcaaattctacaggcctacatcgagaataatcttgagcagagggcacatgatgaacaactaaggaagacttaccggatctggaggtgctggcgtcaagagccccagtgttgggaactgggagcaatagcttaggccgggaaggcacctgctctctgctagctcctacccgaagagccctcctggcagcagcttgagccttaatataagctaactcatgttccctcctaaagaggtacttctagtatcggtcctccgctgaggcaataatgtcctcccgaagcacctttttagcattcggggtgcgaatattggaacaaagaaccttggataagttgaagtcgttcaccgactggctctccgtgataagcttagccctccgtccttgtcatatgtggagaagaccttggcgtgctggaggaagagttaggtaggggcggtgcggtgcatcgaaggaaccctaacccactccgtgagaaattctaggcgttccacagcttggaacccggaagaaaagaaaaacttatgacgatactcctttacattcttttaaaaattataagggactgggccctcattagcaggatgggctcggagtgtgaaaaaactgtctttgaacctatccccttttttggggatagacacgaattcgtaaaaatataaaattttggtcgggcttggtgaagcccagcctctagctacataaaaaatgtacaagcct

SEQ ID NO: 28194 - DNA, 3463 bp, Cannabis sativa
gaagacgaagaggaaaaagaaaaaaaaatagttattttatgattttaaaatattttttttgttttttttttatattattttaattttttttaattaaaattattatttaaaccaataaaaaatgaacacttcatttgggtttaacgaaaagggaccaacggactcacataaaatctgacattggggactattaccgccaattttttagattggggactaatctgcatcaactctaagttttgggggacttttgccgcaatcatccctactatttattatatatatttgtttaaaactatttatatatacttaaaagttagggtttattcatttttacattttaaaataatttttttatatatatttttacagaaattcatttagcaatccacataataactaacggaagaatttaaattgcaaccaaaatcagcatatcaatccacataataattaccggaacaattcaaactgtaaaaataataataaaaaaataaaaaagtaatatttcgagtgattccgttgaaaaattcataaaatgtaatattattttaaattgttagccaaagaagtaagtaattataataaagttcaacattaccattaatttattctcctaatattttgtttttatttctttttactttttcttttttgacatttcaaaatttaagtaccaaataaattaacatgcctttaattatgcacttcttaatctttatgctctttttttttttcttcctttggctgctacttaatcttaataagagataatcaaatcaactaaaagaaaaaggtacatacattcatttatattctttttttctttctataataatataaactataacaaagtactagcaatgtatacttgttagaattgactaatcaaatcacttttattttatttttcaaaattagttttctataaaatttgttgattatttttatcaaatattctttttcttggtgaaaacgaatatttatattttaatattcttgattttttttatacttttagtttcaagtagcatggcatatgcatttgtacaataaagcataatgctaaatatcatactttttgttctaaatttgacattggcattattagcacttaacttaggttaaataaatatatattctattaatctcatcatataatcaatgtatatcgaaatactaattttgttgctcatgatatgactagatgaactttcgtctagatcatttcaggtctagtggagccttcctctatacttgatattatcctttataatgaccgtgagatctaatttttctatttataaaacgttttattttttttttaaaataaaaacatgtaagttataatatactatttaacccaccataaaatagtgtgattcgtaatcatatgtgtagcctaatagttttatacttcttttcacaaacaaaaagttccaattttgaatttccgtctcccaatattaaaaaaataattttctttaaagaaatgcaagtaatttaaacaataatattattattattattattatatagattccacttccaatttgtcatatatttagattttaaaccaattacacattaaatcaacttagttatgtttggtttattgtaatgataattgtaatgaaatcatgattataattacaatgtttgatttgttttaaaaagtgatacaatggaattattacaatgtaatgatgattacattatataaggaaatctccattacatgcaaaaagctatgtattgataattacattacaaaggattaaataaaataaaactaaaatgactcttataccctctttttatacaaatttcaaaaataaaatgagaataattttatcaatttatcacttattctaatattcattttagcaaaccacacatcataatcaatttacattattattcttattttattacaatatactattacattcttccaaaccaaagatcactttatttgtattttgttgcttaaaaaaacacttatttgcattttggttttgttggtgaagtttcttttaagggttttctattaaagtttttttgctttaatattgtaatataatgagaatggtaataaaaagagtttttagcggttaaactttcacaattatcgtttcacttacatttaactatctaagcttaaattttagcggtaaaatctttcaaactactaaactgttaacaaatttaaggtgttatcctattaacttccatcataaattacttatgtctacattcttgtaaacgtgacacgtttatatgggtaactgtgaaaaatatatgtcacacttaaaaaaaaatgggatgttgtgtgagctttcaaatgaggtcatttttgtaaatgtcacatatcaaaactaaaacaatgcattagacattaatgcttaacacaataaaaggagtttgactatttaatgcttaattattaaattaaaaagaatgacataaacgaaagcaatctttgtactcatttattcaaataaatcttccaataaagaaaaaatataaatacttaaaagatatgtgactcaaaatgtttgtcacaaccaaagtctacaactattttcttagtcaatttctacaaaggaaataatgtccttttctaacctaaacaaattgacacctcatttattaaaactaaagaaaagtatcaaattttagtttgatttattttttaaaataaataaataaataaaaaggaaaaactttactaagtcaaaagaaataatagtcacatattcaaaatctagagtctaaacaatttgtgattcaaaatatttagtgatgggtacacacatatttaatatctctaatattagtaaattccaaactaattaaccaaaaaaacaatgacacaaacaaaaatcactatcaaaaaaactcaaaatcagaacataactaagctttttgtactttattgccacgtgtcctataatgattggaaccacatgtttgggtcccacgtgagtagccgtcatgccaaagctcctggagataaggatagcgcgtgccatccacgctatctcccgactcgtagaggtttaggacgtgcgttgttgcacgcgcgaacactgcgatgactgcttggtgttatgacgtggcggcaactcattgattagattgaccttaataaaatcattcgaactggtttcaacacttttgtcttgtagtaaataattttcactttgcctatttttttattaatttatttttgattaatacgataataaatgttttttaagaaaaaacactcaattttcaataaatagatttggatttatattatttaaataatttattaattgacctaatattaatcattttgtatagactttccaattattattattttcgaataatatcacatgaatttagcattatataatatgataaataatatgaatttgttatttatatttgtaataaattttgactttttttt

SEQ ID NO: 28195 - DNA, 1738 bp, Cannabis sativa
  modified_base (1492)..(1498): a, c, t, g, unknown or other
ttttgtaaattttatttttgtttttttgtttttatttaaatgagcaataagaaactcacatgagagaaagtaggtcagggtccaccatcagggtttggagcaaggagcaggggtcaagtttaagtttggggtctatggtctgggacagggttcgaggtctagctcagggtttggttacgggtctcaagtctaggtctagggtccgtgttcgtgtttgaggtcaaagttggggtccaagtctggtgttcaaggcctaggtctgggtatgggtctagctttgggtctgagattggagtttgggtcagtacgaggtctacgatccgaggatagggttgggtccaagttcgagaacacggtcggggtctgggatccagagttgggattcatgtctgggtatgggttgggtatagggtcaaggtccaggtctaaggtttgtgtccaggtccaaggtccagtccgaattagagtccaggttttaggtttggggtcagggtcctagtccatggttggggtccgtatttgggtccaggttagggacaagctaggtcgaggttgaggtccattgattgtgtctaagtttagggtccaatccaaatcggggttcatatttagggtgtggggttcaggttgaggtttgggtctgaggtttaatgtcaaggtctgaggtcacggtctgggttcggggtacatgtttatggtcggggttggggtcggggtcgaggtcaaagtccaattttagaggtccaagtccaggtctcaaggtccaaggttggggtgcaggtccaaaatattaatgaaaagaaataccaatagactttaattgtttagaaaaattttgaaaattattttttttctttcaaaatttttgttcttaatttaaaaattagaaagtgaaagcagctttgtaaaacatattttttgattgtttttcattttattaattaaaaaagtaaaaaatttattacaaaaatgttaccaaacacaccatatatttctcttttataaagaaacaaactaaaagcatgaacacaagtatatagcacttgcataaataatattattttagctaatccaatccaatcagtaggattcaatccataaagtgtagatatccgcacttatgtagattagattgaattaaaaaatctaagatccgtactggtgcggatctgatgttgattgacatataaaaataactgatctaatctaatccacgcatatttatatatattttaaaaaattatatgtacaattaaatattttatgtaaaaaaaaaaatagttaaaaatctaatacatatcatgaaacaaatatgtttcaaaacttaatcaaaatatcaaatatatatttacattcttatttaaaaaaacaagaatacaatcaaatataaaattaagtatttctttatgcgtacaactttttttcttcttgttttgaatttattagtttttggtttatttatcttaatttgttgttggagacataaaccaannnnnnnttattttattttgttgttagttatctgaaaaaaaaaaatatgttaataaatattaaatattcaatattaaaaaataatcaatctaaaataactgatccaatccgtatttttgcaaattggactggattgaattttagttattatgagaattgaattggatctaaaatatgaaatcgcacttagcacggatgagatgtattattagtaaaagggttgagatgcaaaataatcctaaatttg

SEQ ID NO: 28196 - DNA, 2144 bp, Cannabis sativa
gtatgatatattatccaatgtcatgagttcaaatcccatgaaactctttttcaatgttttttatatatatttatgagggctccaaaatctaatttgtcttaggcccatatattctcaaggtcagtccaggctagttggcatctttgccaccaaattttatcgacacttgggaggaactgaccttgaaatttctctctaagctcttccctcctactaaggtagccagactgagatcatagatcaacaatttcatgcaacatgacaatgagtctctatatgaagcttgggagatatacaaggacataattagaaagtgtcttcatcatggaatagagaagtggatgcaagttcacaacttctataatgggttgactagcaccaactgtaccctttattgatgttgcatttagtggagcttttatgaggaagagtgcaaatgaggcatatgatctggtagatgagatggccatgaacaatcaacagtgcccatctgaaagaagccaagaaaagaaggtagctggtatgcatgaaggggatgccatcaccaaactgacagcccaagtggaagcattgataaagatgatggctcaagtggtgtgtgaactatgtggagggcctcactcttatgatagatgtcaagttaatgtgaacaatctgccaatggagcaagctcaaaccattggatatttaaaagatgatccctagccctaccttgatggacgtcgtcagtatcatgatccatagctatcaggtcagaatcatcaaggcttcatcaaccagagatataggccaccattctaatggagtactcaacaacctgcccaacaatagaataatagtggaggggctaacattcaagcagatctattgctccaattcatgatggagactagagctttcattaaaatcttggagaatcaagtgggggaattaactgctcaaatggccaaccgtacttaaggtaattttcccagtactacagaggttaatccaaaagagcagtatcaagtaatttccttgagaagtggaaaagaatatgaggggccaacggctaagcaacaagtggttaaagagaagcatgatcaacaggcacaggctgaagtggataagaagcaagctgaagagcaggttactgatgaccagccgggtattgaagctacaccgccaataagcattaagcaccatataaaaattccctatcctcaaaggctctgtaagaataagctggacaagcaattttcaaaatttcttaaaatattcaagaaactgtacatcaacaatccatttgtggaggccttggaacaaataccaacctatttgaagttcatgaaggatattttagccaagaaaagaaaaatagaagaatataagatggcgacacttactgaggagtgtagtgcaatcctgcaaaagaaactactacccaagcttaaagattctaatagtctcaatattccaggctcgatagggagtttgatggaaacaaaagctctatgtgatatgggagcgagtattaacttaatgcccttgtctagttttaaaagactaatattagaagaagccaagcctacagtagtggcattacaatggcagaccattctttgactcatcctcgagatataattgaagatattttggtgaaagttggtaagtttatcttccatactgatttcttaatacttgatatggagaaagatgaaaattttcccatcattttgggaagaccattcttggctacgggaagagctctaatcgatgtataaaaggaagggggaattaaagttgcgtgttcaagatgaagagatgaattttaatttattttctctgattgacattcttgcttgctgtaaggtttaattagtgaaaggttgtgacgaagtaactatcgagaagaagaaaaggaagtgcaaagaatgattttaaacttttcgacgttgtatgaaaagactgatgtgtggaaattgtgacgataaatcccatcttatggatagcttcaaaattagcaacattggaggatacttttcttcatttggtacaagcgttcttatggatgcaagaggtggactttatcccagttgaattttgtaagaggaaaccaacgcatctatatgacgctaacaacagcactcttgagaggcacccta

SEQ ID NO: 28197 - DNA, 3553 bp, Cannabis sativa
tttgagagaactcatcagagaattaatctcgactgtaatgtacttgttcttgctcaatcaataaagaagatttggtggtgttccaaatctaaagtagagctatagagcacatcgatctataggacttgaattaatatatatatatatatcttggtgttgattttatcattttagtgctttaattgtttttgaatttcatactttgttcattctttttttgtctgattattatttgtgatttgttaatcttatcattactaattctttgattgtttaaagtttagttggtttgattctgcaccatcagttataattttctcataataacatttataatatctatatctagtactatatgtcaattaacttgagtttgattctttagagtgtaaatatttggcaatgtataaatttagcttgtgctgcctagtactcaattaattttatttttaatttttcataccaaaaaaaaaaattctacaaatagttttttttttttttacagcattagtccaaatgaaccacaacagagaatcacattatcaagttttcattttctccagcagatccatctctttttctacaacaacattcatccttcataactaacaattaatctttcattttctccagcagatccatctctttttctacaacaacattcatccttcataactaacaatcgtgaatagtgtaaaggtctatgcacaattctacaatacaaactctatgtttagagatacaacattactaacactaaatacaactcaacaataaaatatacttacatatttatcccaaaatacgtacataatttcaaaagcaaattaataaaataaaatttgaatgttttttttgacataacactgtacttttaggttgtaaaaccggttagaaaaagcattgcaacctagatgaatagtaatatttttcttgtcttacttgaggtgttggaaacctcaaaccaaaaggaggttctacataaaaatcatattctctaatatattatccattaattgcttgttttagggcataaatcccaacaataatctcccacttgcactaaaagtaagtgctacttattctataactcttatagacgttgtatctcattcgactgttcaggctaattcatatgagcgagaccctccacataatatagtttcatataaaattaagtctaataatcaagataagtccatacctctttaggatcgtcaaacttctccaaaagagacgctcctaagcccttgattcttaaattctaaaaatagcttagtcactcaaaaattactttttcctacactcttcaattgaataaataattatcatcattgtaatgtactcttcaaactgagtccaacgacatataacatgactatatttgaagtttaaagttttaaaatcttacctaagcagtgcagaatgacgattggtggtggtagaaattggtgtacctaaaatatcgccataaagaagcttagtatatatcaaaatgactctcttaatgagtagatcacggatgtacaatgcgttagcccaaacaagcactagaatcgccaaaaaatgcttctaaagaggcgaatatacccaaatctcataggaaaaaatagcaacgagatggaaaaaatggcttagtggagattgtactccttcagacgccaattccaacaataccaaccattcgtcaaatggtcatcgaagttggcttcattgttgatttgaagttttgacggtgaaactttggagctttcgcacaagcatgtcttagcttcaattgctatcaaacttggggtgtgaggtccttgcgggttggtgatcgtgcaactctagcacattccgaaaatggtagcctagagggtggtggatctaagcttgggtgatggtggttatggtggcttttatgagagagaaagtaaaagaaagaaagagatgtcggggagagagaaagaaaagcaagaaaaagtttttttatggtcccacaccttttatataatgtgtataactcttttttttttttatctttagcacttatttatgttcttaatatttagatagttttaaaataatcttaacttttttatatgataatgtacaacgtagttatttaaaacatgagaaaaattgtgaaaaatttagaaaaatttaatacatcaaaaacaaggttcaaataatctattacacacatgcctcttttattttatacacatgtgaaataaactgtttgaagttgaacactacattctacatagtaattttttttgaattttttaaaattttgtaggatgtcttagataactacaacatacacgatcataaaaaaaaaaaaaataaatattatcatgactgtaaaaatattgataagtgtatcagtgcatcctctaaaaaacttcataaaaaattaatctcaagatgataagagacaaactgactgtgtataatgaaaataagaggagtggcaattataaactcttagtcaactttcgagctcgaaaacaaacacatgtcaaaatatttttttcatagtggtattctaaatagtttaccgtctccaaaataggtttaaattttaggcactgtaaatttttgcaattatattatgctggtaaatttttacaaaattctgaatagtctatagtattcaaaataagtttgagtttatttgaatacaataaattataatattaagaaatttattatagatactgtaaattattaagaattttttaaaaattacaactataacaaatattaccatacaatattttaattatatttttaaatacaaaaattaattaagataacaaaataggtgattgaccatatataatactactcaagacataaaaatcttatcacactaaaaagaaaagcgtggctctacataaagatagtactagtcgaaggaccacttgtgcatttatctgcatatatttcaaacactaagaaagaaaaaacaccactcggcagtccataaaagaaagtagaggcaagactttgtccaattattggttagccgaaaactttgtccgattattatttgacaatattgctaaggtgctggttgttctagattgtttgaccaactcaattgatcgataataattagaggcaatagtgttttccaattctaaattaaaatatgttgtataatactactaatagttgtttaccactacaatttacaaaggtaacattaaatgatatcaagaactatatactacttcatagtaagttttgaatataactagtactcttaataattttttaaggacaaaaattattttacctcacaagtatagcatttgtagacttttgttcttgacatattttgcttaacaaaaatattccccacaataatacttgtgcacttttagccattttatccaaaataaaaaaaaaaaaatcagaataaaataaagttaatagagtgctcacatggcagtaggagcgtaaataaattgggtcaaatttgatccgactatgatctgatctgatccagatcatgcaaggatctgtcccgccctgttccgctagatcagatactcggatc

SEQ ID NO: 28198 - DNA, 2937 bp, Cannabis sativa
gtcaaagttcagggggaaaaattattaattagccaaaaaaatatcatatgcatgtataagggccttaggccgaacaagcttcataccaaagcccataatcacaactattagacttttaaaaatgagtttttactccacatactgaaattttctactttttttcttttttattgttggatagatttttttaaaaaaatactgtgtattttttatattgtgtactgtattaaagtttcactgttgtttttaattgttctattttatttttttacagttattttataaaaagatagtatttttataaaaaattccgtagtagtaaaattgtaaatttttacctaaaatccaatatatttgtaaaagctcgtttaataaaccttactcaataatttataccattttcattttataattttacaaaaaaaatgataaattaaagtttatttttataaatagacaaaaaatacaggtagttgaaaaaaagaagttttttttttgaaagagaagtacaaacacgacacctacacaggactaggcttattaatctcagcgagatgacgagcaactaagggctcaaccccattccaactggccgacgctttggacaccaaagccaacttagctaacctatgagcgagaaggttcgcatctctacactcaaaacaaaactcagcccgatctcaactacacttcaacattgaaacctcaactaacagattatctgcatcaaaatcccttattagagttattaataaggctaactgcattaagacaatctgaagccaattggatcttcttcaaaccaccagcagcaacaagcttcaaaccacttatgacagcagccaactcagcagaaagaacactaaggggacgggcagaataaccagcagaggagcaaagaacttgaccttcatggtttctaatgaccacacccgcacaacaacaacctcccacagtatcaatacctgcattcacattcaccttccagactcccatctccggaggaagccacttgttatccttcttgacccttctttaagtgttgattttatcttgaacctcactagctaaggaactacaccaatccaccaccccacttgctggcatacaaaagcctccatggagccaagcatttctttcattctaacattgccaagacaagatcacaaataaagtgaaatcagaaggaggcatctgaatcaaacaactttccaaatcttcctaaggatcctcagttctgatttgtttgataaatttccataaaccacttattgacacttccaaatactatggaccacatcttcattaaagctatttccacaacgattgcaccttggattgggataaattttcctgtaaaataaaacactattagtgggaagccaagaatggttagctctccaaagaaaatatttaatttttggaggtactcttaatctcaaaatctggttccaataggactcaacccctttcatgttcgacgcttcagctttaagacttaaaattagaagccaacttgtaaccactcttgacactatactctctgttcttagaatagtgtcacatgatctcatctttcactttattattgcaagtggccaaagcaatgataaggttagcatcatctacattaaagttggatcaaataaagtgctcatcccaatgccccttccactttttcagatcaatgacatacatgccttcgggtaaacttggtttttaaatcactttaaaattcaagggccttggaagccaagggtcatctatcactatttcattaccatttctgaccctctatctaaaccctttctcaattatttctctcccccaaaacaggtttgtccagacccaagatgcattggagcctttctttgcttcaagaatagtacagttaggaaactcagaggccttaagcacacagctacaaagagaacaagggttccttataattatccacgcttgcttagcaagaagagctttattgaaaagaccaaggttttggaaccccaaaccacccctctcttttggaagatagagcttctcccaagtacactaatgagtcttgtttttctgttcactagatccccaccaaaacctagccaacaacctatggagattattaatgattttctttgaaagtttaaagcacatcatacaataattaggaatagcctgagcaaatgctttaataagaatttccttacccgccaccgaaaatagctctcttttccatcatttaagcttgttccaaactctgttattaatatattcaaacacttgtttcttttttcttcccacaaaagaaggaaggccaaggtagaaaccttgactacccaccatcttgacacccaagatttcagcaagagcaatctttttatttctttgaacacacttatcaaaagacaaaccagatttttaaaatttaaccacctggcccgaagcctccatatattggaataataaagtcttgaagcactggcactcctcttccatagcttccaaaaaaataagactatcatccgcgaagaatagatgagaaacattaaccccatttcttccaaagttaagaccacgaatgtttccattgctctcttccttttggatgaggcaagagaaagcctcaacacaaaacaaaaaaaaaggtgataaagggtctccttgcctaatccctctttcgacaaaaccttccctttgacttccccattaataaaaaaagagtaagagaccgatgaaatgcaattcataatcttgtctaccttacctttgtcataccccaacttcaacataactttctcaatgaaaatccactcaaatctatcataggcctatgccatatcaagcttcaaggccattttggatccatttttaaatctattcttcctcatataatgaagaccctcataacctataatgatatttgttgggaattattttacc

SEQ ID NO: 28199 - DNA, 1548 bp, Cannabis sativa
aaaaagatcttgaagtagtaaacataactgcaagcaataagaaagacgtagaatcttacactaaattcagtatttgactttttcgtaagtgtctctatgtaacttccaagtcccacagctgtaaaaagtaacaaagttagaccttctgtccacttctctcttagtatcagtgtggatattggcatgaattgaaactacaagtatggacttaaaactaataatttagaccagatgaaaacaatttgagagctgaccagaatcgacaggaccagcagtcattactgagactttttgcccatttgaaatgatgtctgcttgtaagattcttccaacatctaagggttcaggagcatacattggtttattggcacctagtgaagaaaattgagcaaattagtttactcatttataagacaacattatacttcaatagagattcataataataaaaacataggaaagaatgtgcaaagataaatatattagacaactatgtagttctaatagtagaattggattaggcaagaacagattgtacagctatgatagttaaaagtcaaaccagaaagtaaatgttaaaagtttacttgcctaagataatttcatctctgctgcattctaaagatacacgataccactggattgaacattttgaaagctgtggagcatcatccgagcaaatctggattctaagacaggagcccaggattcccccaccatctagaccatataaacgagttttgttctcctctgccctcttgcttaatgccagctgataataatgggaactcttcaaaatcaagcttatataacttcgatgtattttgttgtaacaaactaactagtttaaactacttaaaaggtcaatgaatgtcattagagacattaagaatgcatgaaaaaggggggtgaataaatgacaatgccacagactcaaaaccaaaaacttattcacaatgtttaattaacaactccttgtcccaaagatgctaaaaacatagtatgtgaaagtccaagaaataaatattggtcatcttttacaaggttaaaacgaaatattggataaaatatgcttgaaacagttaaaactgagatactatcaatttttgctaatgaagacatcctaaccaacatttactacctagatctagttatggcataaatattgttttttaaagtgaatgaaataaatattattatattttggcgtaaaccaaaacatttatgttttggcatagaaatatttataattaagtttcggcaatagcataatcccacattgattaatcagtgaatgaagaattaaagacaaaaagttaacgcaacgaatactccaatctgaacataaacctaagagagtcataaaaaaagttatctgtagagaacacatacctctttttgaagcttgactgaaaatataaatttctccctaatttgggttcgtagtgcacgaagttcgtgttccatctccatcacctgcaagcattaaacatttcctaaagttcaaaatgtcaatttaaccataattatgttttcaaaatcttcttt

SEQ ID NO: 28200 - DNA, 2409 bp, Cannabis sativa
atactaattatcttaccaacaaagcagcaccaacatgcattaaaatgtgaaagaagtaaacaaatgcactgtgaaatcattcaaggactgctgtcccaacatataaatgagcagagaggtgaagaagaaaagagagaaaaaacaaataatcttatctttaaaagaggaaattgtcaatgatctgtgattaataccaagtctagcaaatagatagaagttataaatcatcaaagaaactacaaaatctaaataaattaagtcttaagtgctcaaataataaaattctaaatagccaccccacagcaatatgcatcgccatattcctcttttttcttctcaagataacaacaacaacaatagcaataataatcaaattagaagtacttgaatgtgttttcatagtttaatgtagatttatttcaaattttatcggatgtctcacaaaggacaatgtagactaatctttgatataataaggtttttaaatttgaaccagagaaaaccagcacattgaaattaattatcaaattaatccaataagttacattgttagggcttaacttaaattatggcactgcttttttttttaggtaaacatcataaattgagtgtggtcaccactcagactctaactaattcctaaaatgatgaagtgttaccacaggtttcctttttgtgtacaaattcttccattacctattctcccatgtttctctctttctttatcacttgctacatcctctataatatattaatggttacaaaagagtatcacgaaaaaaaaaaatttccactccatcagtacctaccattaattaaggtaaggtgtacagaataattaggtgacctcgccagtaagggaaagagaactgtcacagacttgtaattaaaaaaaatggtaacttaattaaggagtacaaaataatgctgggcaacattgccagtaaaggaaaaagaataataacatacttataattaataaacaagtagcatgtgttcacattttatgatttaggttgagacaagttacaaatcataaaattcaattcattttttttaaaaagaccaactaaatcagtttagcaacaaatatcttgaaggtattcagcaatttatcgtaattgctttctaaaacagccaaaaaagataagaaaatcctacaaacatgaaaaatccatattcaaaccaccactcaaaaaaaaaaaaaaagcaaagatatgcagaatgaaaaaagaaactccacatcaaacaactgaaaaatcaaaatggtaatgttaaagtcgaactgcccaagccaaacacaagaaagactttaataaaaaactattatggaatggaagaaaaaaataaatagtgtaccttgctaagcatgacaacaagaaaaccatcttcggtaaccttgttctcggctagtgtcgtttcatctttcaagaccttcccattgtggattagcaactgctgtccacatgggtaattgtcctttccttgtatatcttcaatgttcttcttaacagccataatcttaaacacatgaaagccacatttcaaccaatccatcatttatatcaacatctttccaagccaaaaactacacatctctaaaaaataccatgaatttatattttgtactagtattataccaaacaacattgaacatttaaacaaatatgcctaacaatgagattaagtctataacaagaaataaaaacaaatgagagaaataactttatgaccataaatcaacaattattgaagcaatactacccatttgcaaacatataaaaatacatttacacataaaataaccaaattataagactgtaagaaacgtaattgactataaatacagaacaattaaaccaattactcaatcacaaaattaaccagaacaaaaagcgaatcagcattgcctttcggtggaagttcaaatcaattcagccacatcattgtgctataactaattttaattgggttaagggttgaaacaatcgcaaattcttcattttcattcagctttctttaacatagtaataataatttagctccaaaagaacaaaaaaaaaaaacaaaaatggaaatgagattactgaccgtatcggtaggctgaaccttgatttcgaaatgactgcccttgagagtcttgacagtgagcttcatatcggcgagaatggggatgcacgacggggttccaaaacgtcggcgtttaatcggagggagagagaagagaaccctagttaccacaagcaaaaggaaaggaactacacacacccaaaccaaactttaggaaaaataaaagaaataaaatgataaatatacatagagaaagaacctcttacatattttttattttttttgacaatgaacctcttacatattaaacaatacattttttattatttaaataataat

SEQ ID NO: 28201 - DNA, 2443 bp, Cannabis sativa
tatttttgaaaaaaattccgtgtgacagtatttttgtaaaagctaacttaaattccagtattttttgtaagtttcccttatttaaatgctatatttaatttaaattaacaattaatacacccaaacttggcctagcatagtggcaacctagtaaaagattagattttattagatttaaatgcataaatattatttaaatattttttttctaagtccaacatttcataagttcatctccttttttgctactaagaaaaaattcgtctattttttttttattattttctttcttttcttgtgagaaaaaaaaaattattaatcaagatataatatttaatttcaataataataataataaataaattttttcttgtatattatttgatttgattttaatttatttcttttttatatatcttatttaatttatttgttaaaaattattcactacaggtaaatttagacttgattgttttttgtttttaagaatttgatttattgtattattgaaattttagcaagataaaaattttatcatgaatgatacagctaattaaaaaaaaaatagaaattcattaagaatactttataacttatttcagatttatgtatatttattttattttctttatgttatgatatgtagcatataatttttttagattattttttttatttaaatatatttatatatttattaaggggcccaaaattttttatcatcttgggcccctatttcttcagggtcagtcctggtgtcgagcagccttccatcctttaagatctcatggttgcacagtaaacacaaataagaaaagcatggagacttacaagatccacatggagccttcttgaccaagggagctcggtcagctaaggcttcggacagcccttatccgagaaaactcaggcatgaggttgtttgaagcttggttaagaccgagcatcaccctcatccgcgcacatacgcatgtaaccctaggctagatattttctaattttcaaataatcataactaattaaatttaaatccaaattgagttatgtaaaagcctaaattaattaatttttcatctactttccagaaaaaatactcttagtacgaaataaaaattattttttgtcaaaaattcataattaataatcaattatcaattaagcacataaaccaacatgaacacatccaaatcatcaaaatcatcgttttaaactatattttatgaaagtaaattattaccatggctctcagacagttgttggaagttattttaccaggatctagatttagtaacaattatatttgattatattttataatctaacaccctaaacatgaatttctgaaaaataaaaaaataaacacatttaaagttctaaaaaaccttatgttattcgcgtttttgtaatcatgacacgtagattttaatcaagaaaggctaagaagtcattagctgaccagctccctcaattgatgctccgggaagataaaggcaccaacttcacgggaagagttttcgtgatagggagttccctgactactagcaacacagagggtatctatgagccaaagtatccccccgttccaggaaccaaagccatctactccgagaagagtatggattttcccagaggggccaaggaattttgagacacgttaaatcaggctacgcctttagcccacggaagctttgcctatacgtgtcagactatggacctagtgaccaggcttttttaggtacgacttcagaggctgtctcccacgacacgctatcatacagggcatgcacgtccttgtgtacctgaccaaatgatccaacggctaggaataagggaaattcaaaaaggagaagccctaagatgactcgcgcataaggcccaacctgtacgatctgacgcccttaaatgtcatatgggaaagatgccacctaccaatacaacaatcagattttgccccaacgatgatccatctaaggcagcacatgcaaagaagttggcttataaatacccccaaaaaagcacaagagaggggaggacccttttttttgggagagaagactcattcttcgtgatcctaagcaaacacattttgtattacacctaaaaaactccaaaatttcctactaagcttcctcttttttgagaggaacacgggagaaaggagttctagtacattgtatatctatttgtataaatagttaccggtcgatgagtctaataaaatggactcgtggattaaaaggatggtaccacgtaaaaatctcttatttgttgttttgtaatttactctgttattactttcttaagctctaaaatatatttagttgccaaaagctcagtaaacaccttacattggtagcagcataatattatggctcctttgttgggctttgtgccctaaataaaactctatttcaatgttatcattcaattatcaataaagaga

SEQ ID NO: 28202 - DNA, 3573 bp, Cannabis sativa
ctctgctggctaagggaactactgtcactgagtttgttgtaactgttgctaggcatactagtgaatttaaatcttcgtccaagcattattacagcttggcctccttgtacaaccctttaccttcctcatcccttctacccttcaactgtctaatagccttattacaactcttaataagacctttaaaattaccaattccactacgttcccacatacctaaacttctccacattacttgattttactcttatcagtaatagaagtggaatcctagctttcacgaatcacttgctcataagaaggattttttagccgaaaattctcaaatttaaaatgatgcttaccacctgagtaaatcagaggcttagtttccaagagtaacaaactatgattttaagtagagacctctagattagtgagccgcgcaagagagaattcctccaaccactcattggtatctaacgctcgatcgagacgaatttcaatccaatttggggagtcacgattcttctcccatgtgagtggatgaccacgcaactctaaatctcaaagaccaaagtagtgcaaagaatcaagaaaaccatcgattaaccaagaagggtaaggattacaaccctttttgtcctcttgacttgtaacattattgaagtccccaatcaaacaccaaagacccaaaccttcatcttttagagtacgcaagaaatcccaaatttttttctgaagactatgatttagttccccataaacactaatgagacgaaaagtaggaacccccactaacgaaaccatatagtccacattgtttttagaaaagctatttactttagcctcctcattatttttccaagtacacttataccatcacctcttccttggacctcaacaacaaaacaaccctcaaaacaaatttctttacttaaccagccaactttttccttatcacacaaaatttcacataaaaacactattatggatattttttgaaccacaagttcttttaggaattgaatagtctatggaggcccaagcccatgatatttctaactgaaaatgcttataatgactggcgagctccttctccaaggcttgccaaaggtaagctttttgacaatccatcaacttcttggcccaaatttgaaagcccaccaataaatgaattagacattttcctctttttatggtcagcaatagtcattacttcatgattccctccatttaaatttcccaccttttgactaccataaaccagcagattctttccattattatgagatgattttagctgactattcacctcatgcacaacttccatattaatgacaagatcactttgttgatcagatttatttccaccatgactattgcagtgacttgtttccatatcttgatttgaacattgatcttcctcggccttactgtcactgatcaccaccccagacttccacccccttattctcaactaccgcgcaccaatattttgattatatttttggaatttagctctcgtaaattccccatatggtttcatattttgctccacttgttgattacagagtcttccacaaaaacactctgaatggcttataattgtacaaatgaaacaaaaagtaggacagcgttcatattttaatgaaatccaaaatatagtaccatcttctttagtcacttgaagtcttctttgaagaagtttattgatatcaagagtgacccttatacgaaaataatccctcaaaacaccaataatattcttcggacatacttcaacaaatgaaccaattacatttcctactcccttaaaaaatctctctgctatacaccccagaactatatcctaaacttgcacccaaatatcaagtttgttcaaaggtagatcccttagttccaatccttcctttggtcgttcaattatcaattgcatatgattccatgtccatggacatccgtcaatcatcctcttaatatctacctcatagtagaattgaaataagtatagatttgactgtaaaattttcacaaacatccctatctctgattgccataaggctgctaaattattttgtataacttcaaaaatccacagttcttgtcggcaagaaacacccctcaagagaccaccaagatcaattccatcaccctcttctgcccccctaatcttgataccaccttcacctttatcttcaacctgaagtcgagaagtttcctaactactggaagctatcacacaagcagtaccacaacacgaaatcccaagaacacaagaacgaaagaagagacctcaaactttctcgaaaccaatcactataaacacaagacacaatatcaaaagacaagacttaattatatataaatatatatattaattttttctttattattttagattaatataaataagacatgactatagtaaggatagctaaaatgttcctatggtaaggacactttttgagccattgatgatccatttaatggttatgacgagccaggtgtaggataaaagtatagatgttagcatattatatagttttctcttaatatttaataataaaataatattgaaattttaaaagtttgttcatttttttttataatatcattttttttagaataaatgactatgtatgctttctttttttttttttttgtgagaaaaaaaaatacatgatccaaactatttgttaacaacacactcaacttaaaactattttttaaaaaaattaacttaaaactatttatattatattaataatatttaactgttgttaaaaaaaaatactataagtataagtatgtgggttgggtgatggtttttattttaaataaattagttaatactttttcaataataataataataataaacaaattagagaaatttaaagtatttttaatttaactaattaagttttattatcatttattatttgttgggtgcttttctattagtttttttttaaaaaaaaaaaaaaattaaatatattatttaccatataatattagaaaattctatagtgaacctcctaaaaagaatgtactgatgcaccctatttattttggatcgatccaagagaattttttaatctaatttttttatggtcgtatttattgtagttatttaagatatcctgaaattttttgagaaacaataaaaaatttaacacactaattgccaaacataaggttcaaacaatctgttgcatgcatgactttttaatttatacgtgtataagtagattgtttgaacattgttttctatattgtaacttattttgaatttctcaaaattttgctgaaaaaaaaaatagattaaaaaaacttttttaaatgccgaaacagtaaaggatgcttcagtacaccacctaaaatatttatttatttatttttctaaagatttatcatataatattggaagtattgtggtacactcttaaaatcggtttttgtagtatacaccttttttatatataaaaaaataataaataaataaaataaataattgttaagtttaattttttaagtaagtttttatttgttttgttttaaaaaaaaaaattattaaaatatattattttt

SEQ ID NO: 28203 - DNA, 1935 bp, Cannabis sativa
tagggcataaaatcccaatagaaccaataataaaacaaaaccatgtcatacagacaagactcaaacactcaaaaccgtgtcacagaaagaagactaaacattcaaaaccatgtcacagagacaagaataatcgcgataacaaaaattgaatcgcaatagcaaaatacaaccctgaccaagctacacttatgccaagacaaagtcagcgagtttggtccaacaattttaattattaaatatcaagttaaatgataaattattttaatacatgattaaaatattattatttaataaataaaatataaaattagaataatttatttaactggtaaaacaaaatgaatcaactataatgagttaaagctatatatatttaattatttactaattaaataatatttttttaataagtctaatcattaaaggtttaattaattaataaatagtcatatattgttgaggaaattagtgacagtattgattaacaaccaactgaaagtattggttagttagttaaatttattttttgttaagtcgttatgcttcctcgtatacttttctactattatatgtagcgtgtaatcttgtgagtttagtaataatgatacacactttgtttcactctctttctcttaatttctcttctctcaactttctctgttttctctgttttggattctaacttggtatcaagagcagacgacaatggcgacctctgcaaagaatttcatcagtcctactgtggttcctaccaccatgttcttacctccactaagattagatcaaagcaactattttttggcggtctcaagttcttcccaccatccgtgctcatgatcttgaagatattttactgcgtcgacatccaagacccaaaccttaggtattagaagcacctggttcctcaaacatgatacgtaaccctaaatttcataaatggatgcatcttgatcaatttcttttatcttggttaatgtcgttgagatctgacccaatgattggccatattgtgcactgtgaatctgctactgcaatatgggaaacactggagcaattgttcaatactcgatccaacgcccgaacgattcatctcatgccccttctccaaaacacaaataaaggttcctagtcgattgatgaatacatgttgaagatgaaaggctatgctgatggacttcgtgctgctgggaactccgtttcagaagaacaactgattctttatgttcttgctggagttggacatgaatatgaatccattgttgtgaatctgacctccaaagataaactcactcttcaagaagttcaatttatgctacaaaatcatgagatgcgacttgaacttactcattccaccgccctattggatctgaattctcctcaagctaatcttgctcaagccaagaaacaccaatccactggatactcccagactggtcgacctctaacttctaattactcgcacaatgctactcgtggaagaggcagaggaaatgatccttacagaggtcgtgggagctcaagtaattcccgtgtgattttccaactttgtgagagatcagggcatactgttcaacattgatacaggcgttttgatgtcaatttcacaggagttgaagatgctgctccaccatcaagtgaaactgccccacaagccaacattgctttctcctcagccccacctgatgatggttggtatctagacagtggagcctctaatcatgtcacaccagatgccaacaatctcatgcaaaggacttcctacaaagggaaggaaaaaaatggttataggtaatgcttctcaactctctatctataacattggcaatagttccttcaatgctgatcgaattctttatctgaaaaatatattacatgtgcttgccatttccaaaaatcttatcagtatatctcaattcaccaaagacaataatgtca

SEQ ID NO: 28204 - DNA, 5143 bp, Cannabis sativa
ttttctccatagtgattttattgggaattaatttcccatttaagtagtttttttgggaggaaataaattgaagcctatataaaggccttttctcctcttggacccttttactttcatttttatttcatgaaaagattcttagagagaaacagaaagatttaagaaatctcagagcttccaccgttgtgcaaaggaaaaatcatcatcctcattgtctccgtccagaccttgcttcaagatgcttcagtgagtaagtccctttaaccattctctttttctttaagaattctttatttttgtaattttttatccttttaagccattattggatgcaaaatcttcataccttgggtttagagagaacccaacatcaatggctgcacatgtacaataggatagataaatatagggtttttagacataaaaggttaagtcttggcactattttcctcattttggactttgggttttgaagaacatgaagcaacagggttttaatgacttttttttggtagaatacattattttagatctgttaggaaccctggccaacctatccgaaggtctttcccctggtcggctagttttatgttgtctgaatactctttacacaatctggatactctttgtgctgtcttgatgttcacccctttctttttgcacagatgaacctacacgactactagggaggtgaacaccaaatagactcagatctacttgagcttctctttgatgatctatccgtatacctcgggcaagtggttcttcatctcattcttttgccacctcttcgagcaattcatcagacttggaagtcaacagtagttttcctgaacctgaaatccaacaccactaccactctaagaaaattggaagagaaatctatggtcgattcatttgggaacataaccgaggttggaggaaatttcttcaagcttcttggacttatatagtccagccaagtgtcccagactccgtgcaaaaaggatgcaggtcttcctttgtgaagacaccagttgagactgaagtagctactgtagttgtatagtatacctgctaggatccaaatttggcatggacaaactacatattgtgcggccccttaaactaacccctatattgttgagttgatggcaagggagcaaactgctaaggccaatcaggttgagaggcctgctgagcttaaggaaggagctcaacctggttggaggccagtcagggactgtgacgtccgcacaaacaaccccttggggttacaacgaggctagagagtgtttgaacgagactgaattgctatcccagctaggggtgaatcatgttgaggaggagttgccagctttggagcccttggctcaaataggggaaccagagactacttgggtatctcccccatcgacacttactaaggaaaatttaaaaaccttgtatctaaaaatttagttaggggccttgacactgacctgctaggtgaagaatgcctggcacatgcccctccaaggagctggatggcgtagtctggtcgccacgctgagtagggggatatcatgtcactccactcatacttccagaatatagccaactattacgggatatgtccagcacaattgatgctgatggggatcaagtatttatcttccctcttcctatcgtacgcacagatgggttggtcgcaacctttgctcttcaggagcaattggtatttatacttgaaatccaacctgagccagggcgggtcaagatacttctactttagccagttgggcttcatttggttgggtggcagaaatgagtttgccatgtcaaagattggtggttatgcctaggactattttatggtctatggtgcagtggatgtgcatcattccttcaggagggttcccacgtttgactgatcaatacccacccgtagctcaaggatagagccaatcacatccttttgttgctcgcctaaagacataacatctacaaattggcgacaagagagaattttataaagtatggcctcaacccttctacgggaaagcctcaaggttcatttgataacctttctgagaagaaaaaattaggaaccaagaggaaagaggtcaagtttgtagctccctctaataatcattttaagaagaaaaaagagactaagagggagagagctgctcggaagagagtttcgtgggctgagtctttgagtgaggccctaagagtctgaaccggtcacgaaaacctagccatcagttgttgagggcaaggtacagggtattgtcagtgaaagtgaagactcttcttttgatgatgatgacattctgtacatccctccccagagtgatgcctccgggcaggcagagggtgaaaattctttactttatgctgaaattatgtctttcaaaattagttttctaacgaatactttgtgttcttgcagacatggcttctaagtgagggtagtttatcaagaaaaaacctacatgtgccccttgggaagagtccccttccaaagtttcttagaaggcggggtcgagttctaccacctcaggtcttcctttgccaccccctatgcccctttagccaaccagcctatggtaaaaagcttggacggacgtccttctactcccagaaggtcaagcaaagaatgccaaaaatctagctgggcaagtactccaacccgagcaaagaaggaaaaggaggttgtccataactacttggacaggtgcccggtccaggcagatgagcaattgtaagactcaaaaaatgagtctgttgaagtcttagcttctagtattctagagtagctttccttggtaagtaatatttttctaccagaagcgtatttgtatattgcagtacaccacctaacttttgcttcttcattgattcaggtgactttaaagtttgggctacttatgcttgcctcaaggggactggtgccgtcaccaagaagaagattgacgatcaggaggcctatgttggcgaggtgaacaaatagctattcactaccgaaaatcagataaaagagctcaagaggcaaattgaagacatgccctctactgcaaagttagaggaggacttggaggatgctaagaggcgggtgagggaattgacaggagagaatgatgccttgggtttcctgttggttgcttgggatgaggagattgccaaacttaagcaggagtctgaggtaatgctaacggagttagagcagacccgactatggagaaggaagagtatggcaactttgccatcagaaccttctacgagttctagaaacaaaatcctaggggtgatcatatcaatatgaagcctggctttcttgatggatgatagcttaaggtcatgaaatggaggcattcgaaccccctagggagaataccactgcccaagatcttgtcagccagcctgacgatgagaccgaccagcttactaatgttactggctagcctgctactccattggacactcctatcaagataccttcaaaattttccacccaagaacaagccagtgataacatgaactcttcgactccttttgatatgctagagctttaaagctcttatctttttatttttctgcacgaccaaaaaggccatgacatttgagatatatagccagccagcgaggcgacttttaatactagctttagtttttgtcaagacatatggctggctggggagactttaatctcaaacagattaccttttatgtttaacaaagtcatatttgcacatacttggccttcaatttttttgcattatctttgctttaaatttttttcttaagtattttcattgtgcttgtcttatgtcgtgcgggagtaggtgccccccaagtgattaagtaaacttatggtctcttggtcacttacaattaaccaagtgtttgagcctttgtctgtttgatttcttgggcggacctatttgcatgcatgttagatataatattaactttaataagtcaattattagaaagttatttgacacaatctgagtgaaacaattacttttattcatttacttttcttacaaatgtgttggtcctgggcaacacacatatattaaaaaataaaagcttaaatgcctcgagcttctttcaaaacaaaagtatttacatacttctacacgacatatcgtgaataagccaccacttaagagtgatatattattaatgaattcatgtgcggcataccgcctaggaacaggattagctccattttctcattttacaaactaccttattagtagtactttctgagatgctctttgttcgaatatcttagtaacaggattagctccattttctcattgtactgactaagtttgtatgccctcaaacttgtgatgtccataacttggtataccccttccgagtttgggccaagtacccttgatgtagggtcttttgtgtttcgaaagactctttgaagtaccatatctcctacagagaattttgtactcttgacatgcttgttaaagtatctggcaaccttttgttggtatgcttgtaaattcaagttggcctaatctgttttttctttgactttgtcaagtgattctgttatgagagtgttgttttcttcttggtcgtaggataccctcctatgagacggtggtcccaatttgatggagagcatttcttcatagccataaggcaatgcaaaaggtgtctgcccggtggctgtatgaacaaagtacttttagaagttgttcgggccaatttcccttttcctctttaagatgctttttcagtgtgtatttgagagtttttttacaacttctacctgcctggttgcttgtgggtgagaaactatagagaagcttttcataatgtcgtattgattgtagaagtcggtgatcatatcactgtcaaactgtttacctttttctaatacaatcttatatgggagaccgtattgatagatgatgttttcaacaacaaaatcaaggacattctttgaagttatattggctaatatttcagcttcagtccattttgtgaaatagtcaatgatgaccatgtcttgttgtactcctcctttccctttagggattttcccaaaaagatctattccccatacagcgaatgaccatggagactccatttgtatgagctcatttggtggagctcttgggatcttggagaacctttggcaatt

SEQ ID NO: 28205 - DNA, 2574 bp, Cannabis sativa
tggtaaaagttacttttaccagtgcagtagcgaactgcgctggtaaaagtgacatttcttgtagtgatactctttttaaatattttttttatgtattctaaaagtgagggttccaaaatttaaatagtcttaggcccatatattttctaaatcgaccatgtgcatttagttggtcagacgttgtgttataattatcagtgatgttaaacacaagcccaaccttttgtataagcaaactaggcttgtacctacttaatccaaggatcaattttttttcttctataacctattaaatttacattataatttgttaaccatttttaataatatattaaattaaaatatagaagactaatattaaattgtatctataggaaattataatagtgttgaacaattttcatattattattattactagctcattcactttttctctttatttttataatgtaatttaattttcttgattaagtggatgatttgtacttaggggagttgtttactttattgactaagaaacatttattgtgaaaaaagttaattaaaaaccctaatcatcttactataaccccacacgtgttatagcattacaatctttttcctttgtttattattaagtctatcacacgtgccaccatgcccacttctcatatctcattgtgctttggtcaataacactcaatattattattattattattattattacttacttacttactactaattattaataattagctagccaaacaaccaaaaaattacctaagcatataattaatatatagtgccccctgatcctgttccctcagctgtgatcaataatagataagaatatatataaatgcatttaaattgatattaattatttactaattaatacaataaataagtatttttgactatttttgatcagtgaataatccaagcaaaggacatgtggcctaaattaacctaatgcactatatattataagatcgtataaatcatgcctaataattccaatatcattaatatatatttgcttgactctccatatatatattaattaattaaaaagcaaaaataaataaataaaataaaaatgagaatgatgagtagatagatagacagcttataaagaggaaacaagttctttaatttcgtcacgcttagagatttgtatggcctacgtacgtataaatatatatatataattaattatagattaattaattaattaattaaggcatatataattaatgttaatgtgtttaattaccacgtaaaaagtgtaattagcaagaggtggacaaaaggaggggaaaagtaaatgggaaggtactactttttgatcccaaatacactcatcaaatctatatataaatatataataattaattaaatatttaattaagttgattatatatgcatgcatgtatatatgtgtgaagaacacctgtcatatatatatatatatacatattggtgagaaacaataccaaaattttagatttacagtcatcactaatttgtaatttgatcgtaaaatgtgtcgtttttttctttgttcaatcataaaattaataatagtgtcatgtagtgaatagtcttattatttttaaagataattattagtcaaatttaatatatatatcttttttatttgttatacttgacaaattatgatcgagagtatacgtacgttagaaaaattactttgtaaatgttataaaaaagaattattttaattataaatctattttgtcaaagtttctatctagtttctaagtatagctaggtaattaattattaattaatgaatctataattttaggtgattaatattctcgattaactttgataaattgatctacatttgtgcatatataataatcattaatttatgttatatacttagatctaaaatgaaatgagaatcattttatatatggtgtaattaaggttttgtctcttaaattattttttttgagataattaatatattaatggtcacattaaagccacatacatattataataataggagcatctatttaattaatttaaactaccttaactaaatataataatcttcaatattcaaatattaacactaaaaaatacaaatacacgtacgttctcatatattatcattaaagtattgtctatacaattatttttcacttaaattttcgtattatagtaaattattagtcctacatgatcagtcttaattacctcaaaaaattacttgctaaaatgaacaaaaaaatgtaaacaaatcggaaaaaattacattttttctgtgttttttctgtagtggtactagctattaatataggaataacaaaaatgtggtagttatttatgtacatacttaacatatatataaaggattaatgcataaactaaagttaaacatgaaattgaaaaatttggttgaaattaattgttggttttaaaataaaaaatagaattttaatgggccaattaaacacattcttgcttagtgattagaataattgatatgcttaaatcccccaaccaaaaaaatatatataattttatgtaacataacattggtatgta

SEQ ID NO: 28206 - DNA, 2170 bp, Cannabis sativa
catgtcttcatcagaatgaattttagctacacaaacatcctcgggaggtgtagatgggagcaacataataggatggacggggtgcccgcctctctgcctatcaacttgatccggcccacagagaaaggaacaacattgacatttcttgggctcccacggtctccaccaagtggtagaaaattgttacaaactatatccttaggcccaggaatcacactttggaccggcccagctggctccttactaagagtaaccggcccactcatagataaagtcggcccaaatgatctcggccctcttctctttttaaaacgcccatctttaagaacctcaatcggcccaccagtgaaagtcccagagcccatatccataccaacggttacatcatttaacaacttcaaagagcccacgtcatcatcctttttgtccaagagcccactttttaaaacctcatttggcccaccagtaaaagccccagagcccataacattactaacggttgcatcatttaaaaaattcaagtcctttgacccttctattgaccggtcaccatcttccatcatcaaacaaggacagtgaacagtagccttttccttgcgcaggttctctgtgacaccgcctaaccccgaaatgggcaaacttttctcagagccagcaggaaagctcttgggatgccactccatgcgcagaggcttttcgaggtttccagcaacacgagatgtcgccatcgccggacgcctcggacgacgactaaggttaactcgtttgcccttcggatcttccaccccctcagccgccgtcgctggtaacagaggagtgcgcccatgactcttctccaggccctccgagatcaaaccacgcgaacagaacgaatttggccccgagaaaacatcaagatacgaagaagagatggatagccacgggccatacatcggacactgaataccatcttgattgaacaccattaccggagaagacaacttacatcccctcctttgatgtcccaaacagccacagaagtaacaaaaaatgccgattttctcaaatttgacttgaacccacttcttagcccctgaagccaactcgaaaaaacagcctgaaaacagaggcatgttaacatcaatatccacttgcactttcaaagagtttccccacactgcaggtttgtcttcctctagatcaaccttaaccactctaccaactaaaccacccaacaggataccattcgcgattgaaaaatattcatgggggagattaagaagttggatccaaacacgcaggagcttaaacaccaccggcccgtcagttgccggagtccaaccttgaagaacaagcgtgtacccacgaatacaccaagggccattagccaaagcccagtctctgtcctcggccgagccaaagctaaatctgaaaatattaggagattttgagccttccaccattgccacaacagcaacctttttcttccaaactctggccacaaattccaaaacaaaggcctcctccacaaccataggagcaatgactttcccatagagacagcaggaggaaagtgccttgagagatgagtcactcggagacaacttgaccaaagtttcaagacatgaataacatttgcctttaagaggggaattagagacaatcaaggactccataaatacccgacagaaagccgacaaaaagcaactaatgaaactttaataaacttcaccaactctcaacaacacacagcataaacaaaccaaaaggaaacacccaagaggacacggcacaaaacgccaaccacacactttacctcacaaacagaaaacagagaataaaagaaaacaaggtcaaactcaggaatacagacaaagaaatgaccacaggaaacaacgataaagatgaggcctttagaaactactacgccaagcagacaacaaaaccccttgtgttcacattcactctcactctctcactctctcactctctctttcactctcactctcactctctttctcgaccattgtgagttaacttggcacttgaatatagggcacacgcattctcctatagccacctgaactagctttaagggattgattttcacatagatacatacacacaaatttaaatatatatactaacttatttattttagtaataaatacatatatagtttagtgcaaat

SEQ ID NO: 28207 - DNA, 6051 bp, Cannabis sativa
  modified_base (1680)..(1682): a, c, t, g, unknown or other
  modified_base (1714)..(1720): a, c, t, g, unknown or other
  modified_base (5405)..(5411): a, c, t, g, unknown or other
  modified_base (5636)..(5641): a, c, t, g, unknown or other
  modified_base (5764)..(5789): a, c, t, g, unknown or other
taatcaaagaattttcttgaaaattgtgtcaaattaaaacttttagtattaattatgaaactttataaactttacacaaaagtatttacaagtgtcaagatcccgttatttaaactttttaaaaatatttctattacaaaagtcaggttgcacagcaactacaaaatggaaaccccagatgtcctgagaccgaacactccaggtcgcgccgccatgacatgtacaatcccatcctagctcaagctcactcttgttcagccttcacctttcctttacctacacatgaaagtagaactgtgagtcgacaaatttagtaagaaaagcatataacatatcacataatacagacttgtatctaggtgcccatacacctatctacaaggcttaacaaatgagtaagaacgttccatactagggtacaaccactgtaccacatacactacgtacctcattgcacgagtgttggtaaggtttgttttgtaccctgagtgccactaagtgatataccacacacactctgtactttctcgttcttgtgctggtaacactgtaatgtactccttatacgatatacactacaccaatgcactctgtaccattcccgtacaagtgttggtagtgtaataattataacaagcatgcatatacattaacacatacatacactcgcatatttatatcatacacagttcttacatcctttccgaattcaagtgagttggctgacctttacggaaagtctcgtgctggatggatgccctaatcacatattaaaccggataaatcacatatcaaaaccctaatccaggaaacctaaacctacaactcaaggaaacgttatttctaaaagggactacaatatcctaggaaacagggaaacacccaactatggcactgaaatggtcaagaattgagaaaatgagttattcgggggaatctgtcaaaactggttaatcggttttacaagacatggcaaaccgattaaccggtttgcaccaggtttccccaacaactccaaaactcgctcaaaacttatctaaatgccaccaaaccttcctagaacacctaaaatgagtatacacaatataactcaacccataaaacccaaaaaaacacccagaatcaaaatgtgccattgatgactcaaacttgatcatccaaaaccagcattaagaaccaaacacaactcaacaaaagcagcattaagaacttaaaatcaactcaaaataagctcaaaattcgaaccaaacacaactcaaaccctaacagcccctataactcaaaatcacatatccaaaccaacatcaaagcttgaaaaaccaagagcaaatgatctaggggttacctaaactttgaatcctacttgaatccttactgaaaacacaaaattcagcagctaatccccttggttccttgctggttcgtagagagagaagggaaagtgagggtattttcttgatttttttgacttttcttattttctttgtttttctctaaaaggttaattaattaaatctaattattgttaaaaataacccaaatggacaggtgccacaacaccaagcagccacctaagtcaccatttgaaattacttaaataccgccatttgcataaacttaggcattttaaagtctaagggtaaaatggtcaaaaaccataaccccgctcaaactcggtannntattttctccaatatacatcccactaagaaannnnnnnctagacttacccatgtgattaaacaaaactcacccaactcggacagaacccaatttcaaacttagcatgctcaaactcaaagaataattaacaaaacttaaatagaaggatactagggcttaccttaagattacaccaccaaaatccctttgatttcttactgaaaaactcagagaaagagagaagaagcagttgggttcctctggttctttctagggccgaacaagagagagagataaagatgaggttaagttcttttcttaattttctaaattagctaataaatgaattaatcctttaattcttgtttttttctaacccaaactattcagattatgtggaattattccacaaaattccacttcttatttgtgtttctgcgaagcatgacacgtggcatttaatgagaaaaaccaagttaatccttacttgattaaggtccattgataccattctgtcacgaaaagacttcctggaaacgaggagtatccaaaaaggaaggatacgtgtttacctatttatgcttccctctatttcccaagcgtggaaggtgaaatacctctgccagtcctagttgggcttaacatggaagctcgctcagtttatatcgaggcaggcagttgcaggacctaaagtggatatcaaccctcataaggtatcgcgaaggttgacctttcacacatgccaggtcaccatagtgacaattctgcttttttttttggcaaggattggatcttgtctcccacattcgagcatggtagtgcgcataccaccaccacctttttaccagacagacattacgaacttctgcctataaaggaacgagcttggagcgacacgtgtcccctaattttaaaggttgaacctttgtgtgaaacgtgtccgagtggtacaaaaatggtccccattatccagctattgcatgcacgggcatgatgcaaccaacaagatcatctaattagctctaacattgcatgtaatttaccccgataacaagatttgagtagaaaccttaggtgggtcatgggcctgtccataacctccagttagcctatataaatacccctcacttctcatataaaggggggatcaaattttacatagctaaaactctatcaaaattgttgtaggttttcttctccaagagaaacttagggtacaggactagggtttgctacaaaaatattgtaaacacatcaataccaagaggataataaactgacttgtggctaagatttatgtaactaacccttagggacgccacatgtgtgcatttataatttagtttatgataataaactaacagtttcaataaaatgtgatttaataaaattttactaactaatctaaattataaaatcatggcataatcttttttatgattgtgaaccccctatttgaaatatttcaagacatgccattacagtattatcatcaaaatacatttaaaagtttcgaacatttgaaatacaattcttcacgactcagcaccacttgccaaataagttgatatgtacacttgctgagaagattcctgactcaaggttgtccaaatatttttatatgttacctacaccacatagaacccgtgagtcacaaagactcagcaagaaaagtaatagcaataatcatataatttattattcagatattatcatttatactcagacaataaggattagataatcgcacatactcgtaagattaaatctaaattaccactaatattagtcatagataaacgtcagtatatataaaaatatttagtaatatgaaattactgatttaataatataagtcatacctattattttataaagtgctcataattaatattcgtacattactcgcatttataagtccaaattaatacagatactcattttaaatcaacatcaatataaatattaaataacatgtcaatattcctttaataatacaaacatgtttgttacttcataaaataagcattttctattgttgcctaataaggcaaccttgattcccttacccgacattcatatatctcagccattgcatagtgagacaatcggtaacatataactctgccattacttaatgagacaatcggtaacatataactctgccattacttaatgagacaatcggcaacatatatctctgtcattgcctaatgagacaatcgacaacatataattcaaccattgcctaatgagacaatcgacaatatatgactctaccattgcctaatgagacaatcgatgacatataactctgccattgcctaatgagacaatcgacgacatataactctgccattgcctaatgagacaattgacgacatataactctgccattgcctaatgagacaattgacgacgtataactctgtcattgcctaaggagacaatcgacaacatataaatctgccattgtcgaatgagataattaacaacatataaatctgtcattgctaatgagacaatcaacaacatataactctgccattgcctaatgagacaattgacaatatataactctgtcattgcttaatgagagaatcgacaacatacaactctatcattgcctaatgagacaattgacaacatataactctgccattgcctaatgagataattgacaagtaagaaacctaaccacgcttccaatgatgtcatgatcttagttcactttaatagtaatcattgttccaatatctagatcataatcgagtcattatgataataatcatgtctccacataacaaactataagtacaaaatatttttcttacctttaatccagattcatgcatctcggccaacccaagtggagaaaatgtacgatgatctcagtcctatgtcgcaacaatggtaagccgataagtgtctatcccaaaatacttcttaatattcgcataaaataatctagggttttctaccaaattccatggtataaaaatcctaaagtaaaaattatactttggctctaacatctataccatattgtagagctcatcggaagcttcgaaacgttatatagaatgtctaaaacggacactcaagtgaaaagttatggccaaaatataattttcgatcctgctgaaaagaccgaaaacagttaaccgctttaaaatggttaaccatcgtagggacgaaaaaactcaagtttcaacttctcaaaatcccaccaaaacctaaccaattgattccaaacttcacaaaacacgtatataacatccatacaacaattcttatgtaacagaactcaaaatcatgcctttaaacaaaaagtaccattaaagctcaagctttgagttttaaaagctcaaacttgatttctacttcaaagctatagcaaaaccatcaagtaaacctcaaaatcaatcccatatcatcccaaaaacaaagttgtaagcacacagaccccacaacagctccaaaacacaaagtcaacttttagaacttaagcttttcagtataaaagaaaaccaaactcttacctcaagcttttcccccttcaaggattaccacctagttgctactagggcttagaacataagtttttgggttgaaaattgaagaaaaatgatggtggtggggtggttttatggcacgaaagagacagagaaggagagggttaggtttcttaagttttgttttaaaactttttatcattatatatgtgttgggattttatgccnnnnnnnaaacccatttcaatataatcttatttgttatcaataaaagattagaaattatttatgtttacatgtagtttttcatgtttatggtttatagttattcacaattacagtaaggtcaacacagtggaaggtaattatgattatatgcttcaaaagtttatgtcccatattcatcagtgaactgaatttacgcggatgtgatagtcagcgataaagtttacttacacnnnnnntaagtgttatgttcttttcaagacattggcaaagtatggtagtatcggatgtatggagtatacattggattgggaccgatattgatctcggtaaagacattataatcttaccgttgtatcttnnnnnnnnnnnnnnnnnnnnnnnnnntagatcaaaagatcttaatcctggtatggttaggtttgatctcaagagtattatttatgttctttaacttgttcgttgaaactcatacgggtgaacacatacatcttggaaacatgatagtacaattgagtgggagtgctaatcatatatatggaatctattgcttctacatggacatagaagtaaaatgatgatttccttcgagcttggcttaatagagataaaatgaagagctcttatttcagtaattatattagattat

SEQ ID NO: 28208 - DNA, 1944 bp, Cannabis sativa
acttaggatatttatgaaataaattaactaagtatatacatgcgggtactattgatagtagtactttaaatgttctccattccaagctctatcaaagactgagtgattcagatcagataattggtaagttgtgtcgctaatttttttagcgatgaggtaaagaccttcccaattgtcgctgaataagccatgcatagaattgtgtgtattgggcatgactttttgcaatacctgatctcctacttgtagacttctttctttaactttcaagttaaaatagcgagatgtgcgttgggtctgcattcttaatctgggcctaatcgtgcttttattctaagaaattgagttgtagcaactgattttctgtattggtttcgatgttgaaaacctctcttcttagcgatccagctcctacctcgattggaaccgtggctgtgcacccataagatagtgaaaagggggtttcacaagttgttgagcgaggagttgtgttgtacgaccataaaacttgtgcaagttcttttggcgaaatgccttttcatctccagagcaagctttaatcctacgattagagcttcgtattcagctttgttgttcgaggcaggaaattcaaaccttaaagcattgtgtactttaaatttgttaggacttattaataggattccaccgcctaaaccttcactatttgatgtgccatcaacatacaaagtccatccttctcctgatggtacctcaggatcaactcattcttctgtgataataacaacctcgtcatttggaaattcgagaaggaaatcggtaagggcctgacctttgatagttgatcgtggtttttatcttatgtcaaattggcttaattcagtcgaccatttgagcagtcatccttatgcttcaggtttggacaatacttgtcataagggatagtttgttagtacttcaataatgtgtgcttgaaaatatggctgcaacttttgagaagctaccactagtgcaaatgtcagtcgttccatttgtggataacaagtttcagcgtctagtaagcatttgcttacataatacacttggtgttgtctaccttggtctttgtgaattaacaccgagctaatcgcgtattcagatactgctcggtagattgacaatacttctccaggcattggcttggatagtatcggaggttgccccaagtgcattttcaatgcctgaaaagcttcttcttatttgtcaatccattgaagcttattattgcattttagaatctgaaaagattccttacacttgtcagaggatcgggatacaaaacggtttagtgccgtgactttacctgttaggctatgaaattctttaagtttggtgggagatcgcatctccaccagtgtttttatctttgctgggtttaccttaattccccattggtttaccttaaaaccaaggaattttcctgacccccactccaaaaacacactttaaaggattaagtcgcattttgtagtgtcgcaggattataaacatggaatctaggtgagtgacatggtcctttgcatgttgagattttatgagcatatcgtcaacatacacttccatggttttccccagtaaatctatagatagcatgttaactaacctttggtacgttgctcctgcatttattaacccaaaaggcattactttataacaatacaaacctcgatcagtgatgaaggaggtgtgctcctggtatggctcatacatcgggatttgattatatcccgagtatgcatccatgaagctaagaagttcatgacctgcggtggcatcaatacgttggtcaatgcttggtaaagaaaagttgtccttgggacaaggtttatttaaatcggtaaagttgacgcatgtgcgccatgagccattgggcttgggtacaagaacaggactagctaacaggtttgggtaaaatgactcccttat

SEQ ID NO: 28209 - DNA, 4067 bp, Cannabis sativa
atatcatccgatccaatccaatcatgattggatatccaattttagcggtcggttgacattggatcggtcggtttgtcattggattggatcatttctgaacagccctatatatatattttaattttttgatctcagttattcttttagtgtcagtttactaacagatatttaaaatttattataagtgttaattatgaattaacaccttacagttggggtgatttttaatattgatttttttaaaataattcctcaaattgatactaaaaagtctactttataatagtgtagcttcgtattgtggtggtcccatggaaagtgaagtcaatttgagtaagattttaaaagtataatattgagagaaattaaactgaatagtgaatgggctaattagaagggctactactaataattgtgtgcgtatgaaactaaatcatacattttgtaaaagtttgcggaccatagtaaccaacttccaatattttccatcaatgtcctgtctattgacatggtgtgagagtttttgtcctgttcttgttttatccagttgaagagtgtgttttgtttagattatttttttcatggctagttcaagtggggtaggtagtggaggcagggaagatgtctttagttttcagattgaagaagaagatttggcagggctaacaatcggacatgagggagaggaagaggggatcgacgacagatggtgtcttgtaggaagatttttgtcgaatcgtatgatagatttcgaaaaaatgcagaacattttagcctcgttatggcaaccgggaatgggaatgtttgtcaaaaagcttgaagataatcgcttcttatttcaattttatcatgaagtggacattcaaagagtcatcaatgggagtcaatggacgtttgatcggatgcaattaattatagaacgactaccggtgggaggggattcgaattctcttcatttaaatcatcttgatatatgggttcaaatacatgatgttaaaccgggatgtatgaaagaagtgacggtgcgaggggtaggaaatactatcgggaagttgttagagaatgatcctaagaatttcgtcggtgtttggagggattaccttcgggtaagggttactcttgatattaggaagccactaagaagaagactgaagctaactcacaaaaatggtagctggttttgggttcacttcaagtatgaaagagtccctactttttgcttcatatgtggtgtaattggccattcagacaagttctgtagtcggttattccagcaacctcttgatcagattatgaagccttatggtgagtttatgattgctatgccacaaagatcgtataagaatatcggagcaaggtggctgaggaatagagggtggacgccggtggcaaactccggggacaatgcacctggtcatagttcaaaccagtctaatatggaaactaatcctctagttggtttggccataagtcacgctcaggaaattttgcacaataatggaaaggatcatgctatgtttaatgatatgatggaaggtgatctggaaggagatattgctagaagtaatgagggtgaagtcaatgtttcaaaaaatggaaaaaataaagaaaaggagatagtgattggtggtaattctgaagtggctatatatgataataaaaaaaagaaaggttggtggtgaggaaagtgtgggtcacgtggggcaggcccatagtggtagtgaactcccaaaaaactctttagtggcgggccttggtatgggggctcgccaaacattatgaaaatattaagctggaactgtcgtgggctggggccgccatgtaacattcagttccttaaagagttgattgaccaaaaaaggcccaaggtgttatttttgtgtgagactttaagtaacaaggagaaagttaatatggtgagtaggaagttaggttttgaagggtgttttgttgttgaagctcaaggtagaagtgggggtttggcattattgtggaaaattgaggaagaagtggtgattgattctttctctgtgaaccatatcgattgttttgttcattttgagggctatcctaaatttcgctttactggcttttatggggagccgaatcggagtcttaggaaaaattcttgggagttgttacgcaccctacatgatcggtttcaagatgcttggtgtattatgggtgattttaacaacattttgcataattctgaaaagaagggaggaagagcttacccgacttggcttttggatggatttcaagatacggttcgccattgtggattgtgtgatcttgacttgcttgggcacaaatttacttgggaaaaaagtagagacacccctgagtggatagaggctagactagaccgggctatggtgaattttctgtggttgactcgatatcctgaagcaaaactattcaatttggtgatttctccttcggatcattctctgttgttcttggatatgctgcaacatgtaaaaccggctggggtaaatttttttcgtttcgaaaattattggactcggatggaggagtgtgagtcgatcattagagatagttggagtcgttcgggagggtcgcaaatgcaacaaaagctctatcaatgcggccaggatttaaaagcttgggggagtagtgttgctgggaacttttcaacaagaattaagcagtgcaacaatgaccttaaagtgcttaaaggtcggtgtgatattgaggggaaacaaatgtattcggacaccaaacttcagctgtttgaaactcttaaccagaaagaaatctattggcgccaacgttcgaagcaattgtggctcaaagatggtgatcgaaacagtaagtttttccattcaaaggcttcttctcgtagacgtaataataatattatttgtttaaaagatgatatgggagttttgaaatattgggattctggcttgggtgagttaatgcttgattattactcaagaatgttttcggccgagcctggtaattgggaagaagtgttgagttgtattgttcccaaggttgatgaggagcaaaataattttctaattagacccattgaaactcaagaagtcaaagatgcattattccaaatgcatcccgataagtctcccgggccggatggaatgaacccaaatttttttcaaaagtattggcacattgttggggaggatgtggtagcttgtgttcagaatttcttcatgactgaggagatgccggtgggtttgaatgataccaatattgcactgattcccaagaagaaaaagcctgatgacatgagtgaattaaggcctatttctctgtgtaatgttgttgcaaaagttatcactaaagtgctagctaatagattgaaaggattactccctgggattatttctttgaatcaaagtgcttttattcctggaaaattgattactgataacattatggtttcgtatgaggttcttcactatcttaagcggaagcaagttgggagggacggttgtatggcgttgaagttggacttgagtaaagcttatgatagagtggattggtatattttgacggctatgttatctcgattggggtttagtgataaatgggttcggcttgtttatgggtgcctctcttcggttcaatacaatattgtgagtaacgggtatactattggacctattataccaagtcgggggcttcgtcaaggcgatcctatttcaccgtatctgtttcttatttgtgcggaaggattgtcagctcttattcaacgctatgaggaaaggaagcttattcattggtgcaaagtggctaatggtgctcctgtggtgtcacatatgcttttcgctgatgattgctttctttattgcaaagctactgagagagaggttattaatgttcaacagatgcttcagatctttgctaacgcttcgggacagagggtgaactttggaaagtcttcggcttttttcagttccaatacaactagttacatgaaagcaaccatttgtgatcggttgggtattagagaagctgaagaaaatagcaaatatcttggccttcctagttcaattggaaggaataaaacagcg

SEQ ID NO: 28210 - DNA, 1547 bp, Cannabis sativa
  modified_base (27)..(29): a, c, t, g, unknown or other
actaatcagattgtaaagagttttatnnngggcataaaacccaacaaccctgataggcttcgagagataaattatctttttatctattttatttcaaatataatatatttgcatgtggtgatcctgagaatatggtacgataataatcataaacttttattctgctgtgtaccctatttagtactataaaactaacataactctaataaggggtgatttccagcggcgacaagaagatcgacagtggcagggatgaatttaagcttggtattcttaataaatggaggaaaaaaatttcccgaaaatggagatcacaaaccatttttcagaaaaaataaaaaaaataattattaaatgagtagttatgagaaaataaagagaaacaaagagagattcagtgaaagaggttgagagattatatgtgaaggaaaaaaataaaaatgagacatcttttttgagtttttcacagtacgaaaagaaggaagaaaagataaggtctttggtagtgtttttcttcattaacacatcgttggtagaagttttaacttaaaactataagtgaaacacatcatttctcatagatttgttaacttttgtgagcagagttaagtgtggcgacaaaagttttcccaccaacattttttctcctattgtccacgtttttgttatagggaaattttcccatcaaagcttttgtgggtgcttataaaagtctcattttttccaccaaaaatattgtacgaaggaggaaaactatctcaacttttacaggcgaatgactattaagactttggtgtagcaaccttatacatgctcgtgtactttaacacgataaagcactgtttcctagcgtgctacatcactggagaggtagcataaaaactatgcataatatgccaataaaattatcctttgatgttgcaacaatattaaagagttgccaaaacttctatttttatagtgatattagtgaatattgtcgcccctacaatgctcttcgttgtagtagactattaactttttcaatttgttttgtctctctttgattattattattattattatttgaataattagcaattttttttcttgaactttcaataatactagttttatcccctaaaatatacgacttgttaagaatcctccctgaacttttacatttataaaatttagtccttccattaggtttcatctaggggtgtgcagaaagtcatccaatccaattacaatcgatctatccaatcctaaccgatccaatagaatcgtatatacaatcataattggatcggatgagatgtaaattttgaaaatccaatccaatcagatcagattggttgttggatgagacaccgatccaatggataactgaccaaaccgatccaattatcatccaatggtcatccaatcatatttatatatttttaaaatatatttatagttttatatattaaatatattatatttaaaaatttatattaattaatttaatatacatttaacacataagttaataaaaaaaaattaaatctaaaatattaattctc

SEQ ID NO: 28211 - DNA, 1190 bp, Cannabis sativa
ctcttggccaaaaatctgaaggatcatttcctcattccaagcattccctatgaaacatccgccaaggtattgacagtgaacctccgactccgaagatgctgcattaactccacaaaatccttgtagtccaaccatggtatccacggctgcctccagaagttaatgagatttccagaggcagcagtagccatagaacctttgaaaattacctctctcgactgtaaaatacttttccattgatacgaatcgctattcttttgatccacacaccaaaaactatcgaacttgcagtattttcccagcaggcaagagacccacggtctttccttgttagtagccaaactccacgccaacttggctaacagggctcgattcatatcttcacatcttcttaaacccaaaccccccatagatttcggagtgcagatgctatcccaagcttttaaagccaaaaacttgtccttttcaacattcccaagccaccaatattttctcattaaggcatctaactcccggcaactcgaaatagggatcttattggttgacatggcatacacaggcatcgaagaagccacggatttgagaagagttaaacgcccaacataggaaagaagcttcagtttccaaccctccaacttcttgagcatgctctccttgagtgttttatagtcttcttttttccttcttttaaaattaaaagggttgcccaagtgcttctcattcccacttactggattgattttgagtatgtttaggatactctgtttcttggccgaactcaaattcttggaaaacagaacaccagatttagacttgctacacatttgacccgaccaattttcgtaagttgtcaaacgctcaagcaatttccttgcaccagtttcattggctagagaaaacaatattgtatcatccgcaaacatgagatgcgaaattggaggagttgaatgagcaatgctaataccatgaagagaaccaaccaattcagccttaactattagcttggataagacatcctgacaaagaagaaaaagaaaaggagacagagggtctccttgtcttagtcctctttgcgggattatctttttcaaagggcatccatttaagagcaccgaataggagacactagtcacacatgccatcaaaagtcttctactactttcattgagcccattcttaaggagaacctt

SEQ ID NO: 28212 - DNA, 2813 bp, Cannabis sativa
ttgactatttaaatacaaaaatttaaaaattggggacctaaatggatgaggcgtactcatatagagccaagagtgagtgtccacccatctaaaaaaattattagaaaaaaatattttttaattataatgtatatataagtaaaatgagattattgttcaaatctcaactaaactgatgccaataatatttttacaaatcatattattttaaaaatattaaaattacttcattttagaatttatttctgggctaataggttgctggaggcatttttgtgtgatgtagttagagaaattctaaaggctatcaattgtatttaatactatataatgtgtcatatgcttatcgatttaattaagtatatatattttaatttaataattattataaaaaattattaactccacaaacgttatttggtggtgatgttagaactagtgtctaataacaatacacatatatactaaattacaagaataatagctatgtactgtttgacatttactctgatacaattcaaattgtgtgtgaaatacaaattaaagtccaacaaaatatgattaactagataggcatcgcataaacaatacagaatcaatataatgatcagaaaagcgagaccacaacacaaaagatatcaatcttttgataattaaaagttggttttgctaatgaataagctattttattaattaaaaattataagacaataccagaagaaaatatctaatgtctaacttctccaacaattgaactcaaatatgaaaaatacgtgtttattataaatttataaattaataagatatattcctgatttatgaccgttatagagtttttctctctaaacttttaagtcattataaatgtaaatatcctcttctttttttactaatgtactctcatttatgttggtcgtgagtcgcgacgactttcttaatttgaaactgtttaccgagatttttagaaactgattataaataatgagaactggagaaacaaataattaaaagaaaaaaataaaaagacacaaataattttttacgtggttaagacgttaactagccttagtccacgtgtaagtgttattcagtaattctttagcttgaaaagcctttaggagtataatgaatatatgttctcaaatttgtctaagtaagttttataagagaattcaacccttaatccatgagatttgataggtatttatagtagtttgagaattacatttagtttctcttttccttctattggggagcttatagtgaataacacacttgggatgttttgtgaagtcgagccaacgaaggagagaatttgctgattaggcagatcaaattcggttagatttggtcaaccgcgtgtactttgtttgtgggcaattaactgtgaattaattgtttgaaatctattataagaagttttttcatttagcatgataagatcctctgtcgagatttgaaagttactgtttccttatttctgctcaggaataaaaaggaaaattgaatcagtcttctgggaacacgttgtctcaccctttcggcctcatggtaccggacttgcttcaggcatgtgttgtcaatagcagaaggctctatggtaacagagctagagaacgttcctagaaggacctgttcaaatgggcttggcccactttatcttctttgtggggcctactaatgggcctttaatatcaacctggattccacgtgtccattgctagaaacacatataacttagatgatcctacggaagtggtcgtaactagaactactctctcggagggtgagaacttagataacacgaatcttccagctcctggtgttccttctgtggccaattgtgccattccggaggtctcgcttgatgttcaacttgatggtactcagccgccaaaggactcagtccagccatagccatatctatccaaccttgtcttactttaatactttcatattttttgtgttatttgggggataatagttccccttttttacgtgtgtggagacaatattttatagccttgtctcgagagtttaagaatgtagaaatacttgattaaatctttagatatttgcatcttaatctgtcgagtttgctaagttttaatgtttccagtcttgtgaggttctagtttcaaaggcccaaaccattagatttttaattaaatgcttaaacttaaatatttctctctttaacatgtcatatgtagtccttagaatatagttccaatggcctgaaccttggtgccttaataacttgttttgaagaaaaatatttgtaagtgttatttactttttaaagattttgaaacttaaataaccaattaacttaagttaattaattattttagaattaaatttctcttggtaaatatcacttattttcaggactttttctaacttaaatatttaattaacccaaattaattactctatttataggatacctaaatacattggattaagttaacttgagctaaccaagaagcctgaacttctgtctttagttaacttgagtttaactacgtattatattagattgattttaagtataataaggcagtgacttacttctggttccctaaggttctaatttcaagtaatacttcctgtttttatactgagttgaatgttaaattattttcaaatataataagccagtggcttacttccagtttcatgaggttccgattttaagtgatacttattcctactcttacacttgttacaaatttagttgtaatgaggtgtgactttatagtgatataatgtatgctgccccctagtgattaagagttgacacttttgat

SEQ ID NO: 28213 - DNA, 980 bp, Cannabis sativa
tacccctacctagtaattacacattacgttacttccaaacacaccctaaattgaaataatatttggaatttctaatatttatatatgttgatcgtgcagaattctgcgccgagaccggatccgtacaagaaagatggtcaagctctggcaatgagaattaatggagataaaggagccttttataactgcaaattccttggatatcaagatacgctttgtgatgacagaggaaatcacttttttaagaactgttatattgagggtaccgttgatttcatcttcggcagaggaacatctttgtatttggtatatatatatatgtgataattaattaattaacctaattaattatataattaaattaaccaatattaagggtataattgtttaattggcagaacgcggacctatttgtgtacggtgaaaaaggactaacagtggtaacagcacaaggaagaaatgctgaatcagagaacacaggatattcatttgtgcacagtgttattcgtggctctgggaaaggcactacctatttggggagaccttggggtggcatgcctcgagtcatttatgcctacactgaaatgaccaaagttgtccaccctggtggatggaccatcaaggaccctaaagacgccgggtatatgcatgtctttaattataaacaataattaaaaattaattaattaattaatcgaatactcctaacttattattttcatataatcatatattaatgcagtaaactttactacggagaatataagagtacgggagaagggtcaaacgtagctaaaagagaaaaattcgctaagcacttaacggctaatgaagttaaaccttttattacactcggctacattcaagcttccaagtggttgctccctcctccaaaattggctggttctactaagatttccaggggtctaagaacaaattttaaaacagattcttattatttaaattaatagatgaaatat

SEQ ID NO: 28214 - DNA, 4441 bp, Cannabis sativa
aaaaagaacaaaacaatacaaaaacattcataaagaagtgcgaagcggaaaatacacacaaacatgttctaaaacatttattataaaaaagtctagaaacatcttcaaatttgaaataaaatatgacctttccataatttgaaaggcaaaattacgagaaacggttggcgggccgtagtggagtactatacgtggtccatccaagataagtttgggccttaagatcaacagtgggccacttatgtcagaagtccacttgtcctactcctacccctaatagtgacgtggcaaccaaacggcctctcacacatctctagactatacaaccacacaatgacaaatcatgacgacacgtggacacctaccatcgttgcgtcggttacatttctttgacttttgtcttagcttttttctttgttctgactgattctcaatcaaacggttggtatttaaaaatcaaacctaatcagaaatatacgacatgtcgttttggtaaagtcttgaaacgacagtcactggccattccggtctcccgttgcccttccattttatatagtatcttttatctttgttagctctctcactctctctcagctactctcaccagaaccttcttcaccaacaactctttctctctctcagcttcttcttcttcgatcatcatgggtaatgttactggttttcacagcttttcgtttctagattatgatatcttatccattttgttttattttgaatttttttctgatttttgttggtggtgttttttttttttttttggcatctgtttgcttacagggaaaatcaagatcggaatcaacggtaattttcatttctgtgtggattcattgatttatttacagatgttttgatctattcggtcgcagatctgatatttttttgaattttattttgattaaatattttaggatttggaagaatcggtaggttggtggctagggttgctttacagagggatgatgttgaactagttgctgttaacgatccattcatcaccactgattacatggtatttttatttcttttctttcatgttgtgatgtagtgtcttgatttgagtcctttgtcctattttttgtttttagttaatgttaatatttgtgatatttgataaaacatactcttcttttgtctgattttatttttttctttgtgaatacagacctacatgttcaagtatgacagtgttcacggtcagtggaagcattttgatcttaaagttaaggacgagaagacccttcttttcggcgataagcccgtcgctgtctttggcaacaggtatattaatgtatttttagcatacataacaatacacaagttttcttggtgttaaatataaatagtagatatttatggagagaacgtatgtggtataatttttaggaacccagaagagatcccatggggtcaggttggagctgatttcattgtggaatctactggagttttcactgacaaggacaaggctgctgcccatttgaaggtttgccattttcacttgatatatatttactgttcaattgaatatgcagcgttaagctcttgtgattgaaggtttgccattttcacttgatatatctaccgttcaattgaatatgcagcgttatacccttgtgattttgaacttgatgtagtgggttttgtgaactagggctccaaccaatttcccattctgctttaatataaatatgttccgtttatattccacatttttttagtgcattttctgcccatagtttcattctttttttccttactcttgagtgagatcgtttttttttactcttagcatgagatgagggaatttcttacgtccgaaacatgtaggcaattgtcatcgatgtgtcgaagaaaaaagtgtatttgttctgtttggaaatcagtctcacgtgttttcccgtactgagcgcttgtatataattacattaaattaatttttgtattttattactttcagggaggtgccaagaaggtcatcatttcagctcccagcaaggatgctcccatgtttgttgtgggtgtcaatgagcacgaatacaagtcagatcttcacattatttccaatgccagttgcactaccaactgccttgcaccccttgccaaggttcatttcatttcattctctttttttgatgaacttgggaagtaaatgcctgctaacatctatattgtttcaattttcaggtcattaatgatagatttggcattgtcgagggtctgatgaccaccgtgcactccatcactggtgggtttcttagtaatttatatgcttgtattgtgttgttgatttttgttaaaaccaatttgtgtaatcaatttgttgtgtgcaaatgttcctttatgcagccactcaaaaaactgttgatggaccatctgccaaggactggagaggtggaagagctgcttcattcaacatcattcctagcagtactggagctgctaaggtacctttttttttcactctttgtttttaaacatgtcaaaattaaccaatttagagctgtcttttatttccaaaatcgttatcttatgttgcccatttatttatttgttggtttgatatggtgaaggctgttgggaaagtgcttccagctttgaacggaaaattgactggaatggcattccgtgttcctactgttgatgtctcagtggttgacctcacagtaaggctggagaaggctgccacctacgagcagattaaagctgctatcaagtaagaaagacaattatattcctatttgaaattgattttaatttcacattagtttctttggcttgtgttttacctatcagctctgcccactgctgtttgtgctttgtttagctttagatatgtcaactttgatgatttatttctggtggtttctttaacattttctatttggttattcacagggaggaatctgagggtaaaatgaagggaatcttgggttacaccgaggatgacgtggtttccactgactttgtgggtgacaacaggtaatagatagatctatatactttatatcttgaatatgtcctggccatgcatttttaggatgcgggccttcataaagatttccgtaacttgattgtgattgatcaacttttcttctgaaaatctaatctataaatttggtcactatattttcaaagaactttatttttgcctttgcatctctgtcctttccctccccttatttatgttttgacaactattttagctgcattcttcaactagttatcttagaatgatgtgttgaatttgtcaactttataggtcaagcatcttcgatgccaaggccggaattgctttgaatgacaagtttgttaagcttgtttcgtggtatgacaacgagtggggttacaggtaaattgctcttttatctttgggtatattttttttcttttgcttcagctcggccttttgtacttgtgtttatgaatacttttgtgggattttgcagcacccgtgtgattgacctcattgtccatgttgcaaaaaccaagtgaaatagctagactgggcttctgctaatggtgttatctctattggcttatgatatttatcagtcttctgcttctcattatcgaaaataagaggatttttttttataaaaaaattacttgggtgtttataccaagtctttgtactctagatcatttagtttcagtgtgatcaatgatggggcaatagatgtgctccatgttttgttttcaagatagtaaacctttatttgccggtatatttgtttttgctgagtttattactctaatgctaaagggcatcttatggggtttttgcatattttggtgcaatcaacatctaaaaaaagaatccaaaaaataagaaaatgtcattaaccattaaagaagaaaagaagagaaaaaagtgaaggaaagaagaaaagatgagaggtatgaaatattgagtgggatggagtgaaaaaatttcatacaatcaaatagagtaaaaaattcagcgaaaaaaagaagagaaaataataataaaaagactagattattgataattgagtagtgataactacaactttttattttaacttttagttacatgttaaaatatatatatattttttttttatagtggaatattattctagtttacagtataggaatttgacacattttttttctcttcctaccaaaccatggctggagaatatcttttagatgtcatttcttgaaagacttgtactgatatagcagtattataggcaaaccttaaagttggtatatggtattctgttctttgtggctattcgtataaaattagattcttttttttttaattgatggtggcatatattaggtccagacttccgaatctttacaagtttaatcctattgcacatatcgagagccccaaaaatagaattaaggatacatgatcattaacttgttttcatgtgggagaaac

SEQ ID NO: 28215 - DNA, 3083 bp, Cannabis sativa
ataatggattgagaaatgaaaaagagtaccactaagtattataatattgttatggttaaataacactatttaaagttttgagtttataaaaagtataaatacaataattattaagttaatacaattttggatcttgtattttgtaaaagttataaattatatcatttattttgttaaataataaaatgaaccctgtaattagtacgaattaaattagatagacattttgtagtagtattgggtacctcaaatgattattaactataaggaaatggtatatattctttcatttggcttataaaggtcttttggcttgtaactattgaagccttaataggataaactctgttttgttgtttgtacctctcatgtgaatgattggtgtactcaattcattcatatataattttgctataatgaattattggaaaattttctctatatttaaactaacttttctatacaaaagtaaaaaaggggtccaaaaactttaattcatctttgaaattataggattaacttgttaaaaacaatgattgaggtagctagaggctattttttttttggttcttttttctttttttatgtttcttgatcattttgaaggcacgtgatgaaagtatcatacctactaaatcaattcaatgttattaccgacacttaaatttggtgtgtttggtttatggatgacaagaaatgtataatactatttattagttgtttttcttaactaaatactataaaaaaaattataaattaggttttctaatttgttaaataaaaaaaatagactttacatttttttataatggtacaaataagactttaatctcaatttttgataatttttttaatataaccaacttgaaaataattcttaacatgaacaaaagtaaaaaatttaactagttgtatcataatacttctatactggattattattaagttttattttgacaaaaaaaaattattcatgatcctatttatactattatagaaaatacaaagtctattttatcatttaacaaagaccaatttataatttttacaaaacacaagatgtaaaataatatttgtcattctctttatttataacattttgagcttaagcttaattatatttaagtcgtgaaaaacttaaattggatacaaactaatatgaactctttttttttttttttttttcttcttctaatggagagtccattagattgaataaaaaaaaaaatcaaactaatataaattttttttttcatgatttatttgattttctcaaaatttacaagtgttataattaaacatggaacatggaacatgtgcaaggaatatcatcatgagttgtacaagtcgattcattcagggtttcttttttcatatattattgctatgaattatgatatgaagccttaactaaattaattgaaagtaaaatgtactacgtacatacactacttcccttcccttataatatttcgaagtcttttcaggtattggcaaaaatggggtattatctcatctcaaatctcataaatataagagaccctttataaggtatagtcaattcatgatcattgacacttatgtattctagtgtacgtgtgttgtttaattagttttgttttttaatctcaaatatttaaaattaatttaattaatttatatgatggaaaatccaattttgcaccactcacttactggtcattattcccctttaaaattggcatgaatagaatagactatcataaaatgtcacttccataaggccaaagccagcacataaaaccaagtttcagtttacatcttatcacatcaaatcacaataattcactaataagacacactatgtacccctttttttttttttcttttggtatggtgaaataaaaataaaaataaaaactttgccatgaagtagctagaaatgtactagataattaagtgaaagaaagaaattcataatcataaaaccatggtccatccatgtctgccaatgctgctggtttagagggtggcaccaatggttcaagtgataactatgagttaattatatggttcaactgccacatggggagaccctgtttctttggtccctttttaacttttttaagatttggacaagagtagcattaaccacttctttaagtagtttttgtccttgtttgttgctttgttttggtttggtttggtctatgaataatgatggcttttcaatgctttgtttaacttttgtttacctaaaaatactttgcatcttgcttgaatttcgatctcgagcctgctcatgactgcactgaatgattgggattgaccaatcccgtgttaccacatagctcgaggatgaggctcaagagatcgagatctgctaactaattatttgataattttttgtcgttcctgaaaggtttgtaaattatccctaatgagcattagggatgtcatgtttttgttgtgtcgtccctgaaagtggctatttgggacgattaacgttttgggataatgtgtgacgctatcaataatcgtcccttgatgtataggaagaaaaaatcttatttttcttttttttttttaaaaaaaagataatattttaaaaagagaacaaaagtattaggaatgtcttaagtaaaaattgtcatccctaatattccccatattgttagaaaaaaaaataaattttattagggatgacaacatgatacaactataatgaacaacttaaagttgccttgatacaattgttcctaatgactatttttcttgtagtgaagttaaggccatttttaacagtgacaatctgtttgattgcttaagagatcccacgtgtaatattgagtcaattagaattttttaaatgaaaaaagatgaaataaataccgtagttaggcaatagtcatgctaactaaaatatccatattacattcctctttcttctattaattttgaattttttctgacaagtatttcgagggcaacacccattgaactagacctaaggacccatcaaaaagaactacataatttgtagctatttcacatcgatatatagttatattgaattgatatatagaactatgaggacaaaagat

SEQ ID NO: 28216 - DNA, 3137 bp, Cannabis sativa
tttgattgatgtgattgttcataatggatttgtcactaatacccttgattatcgcataattgccgaaggatgggtttatggcgtctgacacgtcctttcatatgcgtttatcaacgcttcttccatactgcattaaatgctagctgacagtacatctccggtacccttaattcggaggacctaaacactattctgctcccgtagacgagttcaagtcagatctctccagatttggtcatggctcctggagtagctattggttgtcctgagggaatttgacctttgtaatgactctcctttaattatctccgagtactcgagtctaacctaccacgtgtcctataatggaatttaccacgtatattaagagaaaaccaagacaatacaaaccaattcaaatcccaagatgtcatatgcattttactagtattacatttttcacctcacataattttttttacaaattttgtcaattttgaatcttttaaacctcaatcctccatacttattattattattgttttttttggctgaaacttataattgtgttataatattcgctaatgtgttgcatattacaatttgcaatctctacgatgatttatgcttctctgatggatgcttttcaacaagtttaatcaataacgaatcatttttcttttcaaaaatacagacaataattctattttaaaattttagtttcaaattaaatattattatttgtgatatgggcattctaaagttttgtttttttgctttccttttcagtgagagagatatatataagataccaacagccgatgtatttaaggaatcaccataaaattgggttattcatataattcagcaaaaacaataattgataagttatacttagatagatctgaattaggtggagttttcaaagttggggtttgagtcacatgttacacaaaataaataaaggattagcatgtgggaatgaggtttaagtagttttacaattcaaaacttcactattatataatctctaattctatttaataaaataaaaaaaaaatgtactgtacacaaaaaaacttaattttatgttgccgaaagtcacacatcacaaaataaaataaaggacaacgcgaattagtcctcgtaataaataaactttaattatacttattaattacttgtgaatagaatctttataaattctattataattattccaaaacatgttcacatcacccttatatttaaagtcattgcaaaagaaaaataaaaaatcttgcacatttatatttaagtgaaaagagtcgttctccactatatataataagtggaaaaagatttttttggggtattttgtagagcaaattacaaaaaagaataaaaaaaaaaaaacattcaccaataggaaagcaagaagaagatttagaattgtgcaataattttcttaagaaagaagaaaaaagaatatttttgttctttggaaaagaatatgaataactcaataatggattttaatgctaattacaaagagcaccgcaaacatataaagcaaggcaaaagctgttttcgtgtcagtttttgtaacgcaattttagaaaaataattgaaaaaaaaaataattcaacaataattacgaataagaaagataaatagatatgtacagtttcaaaaaaaaaaaaaaaaagtggactttaggtacggtccaactaacgaacgattcagcttcgaaactactcttataaatatataaaaataaactctttttacaatcagatttacaatcacattgttgtgaaaaattcgcaggaaccatatcagtctttctttttgttatctctcttttttttcttcttgggtttctctctataaaagtctaccataattagaggaggaagagggagagagagggatagtgacattgttaaatttgtggtgttgtgagctttttgatctgaaaatggcgagtaaaacagagggttacaacatctacaagattttcaagtatttcagtagaaagttcaagatcaaggataaggctttacccactgacgtaaaggaagctttctccaactacgctggctctcctgaggctcgcatgagacccgatcagctccgccgattcatggctgagcaccagggtgaaacggaaattactctctctgacgccgagggaatcgtacgccaggtcctcagtagacgcaaaaacgacgtcgttcaagaccaaacgacggggcttatcctcgaggatttcttctacttactattcctcgatgatctcaatggcccttgcaactcccaggtaactttgccttaataacttctgtctttttctaactattgttgaaacatttcaaattcattttgttaaaaaaaagaaaaattgaaggctctgaaggttttgtttttagtataactcttttttactgtttccattaagatgagatgaaaattgaaaaatacccataaagattataagatttgtaaaccagccaaatatatatctagtcaagtttttaagtatcaacaaatcttcttactcctttttcctttgttgggttttaattaaagtttagaatcttgttaagatgtacactttggatgcatttaactattaagctaatttcttttttaaatcttcttttattactgggtggggacctggtaacttttgtttgttctttgcaaatgataagcctataatgtgcgattttcaggtgcaccatgatatgacagctcccctgtcacactatttcatatatacagggcataattcatacctaacaggcaatcaacttagcagtgattgtagcgaggtcccaattataaaggctttacaaggaggcgttagagtcattgaacttgacttatggccatcttccaaagatgatattaatgttctacatgggaggttagtttaactatgacttctcctaaccccattttgaactataattctagacttgaacaaaaatttcaattttttcagatattgtttttctgggtatttgttgtaggacattgactactcctgtgccattgattaactgtttgaagtgcattaaagaacatgcttttgttacatctccatacccagttattataacttttgaagaccaccttacaccaagccttcaggctaaagttgctgaggttag
